United States Patent Application Publication US 2024/0392374 A1 - sequence listing, part 2

SEQ ID NO: 255 - DNA, 13670 bp, unidentified
  source 1..13670: mol_type = unassigned DNA
ttacatatactcgctgaaaggagtatagatattcctaatatcattagaattcctgccgttttcattttcgtcctccgtcaaatcaataatgtcaaatccttcatcaattccgtgtaaaaaaacaatgtgcgaaaattcacgagttgagataagctgaatagctatttgatttctcattaaatcattaatcgattttaaatggatagataaaataaacgacgtaccgcttgaaaatccgaattttattgcctctacttcatccgagtttcctatttcatcgcaaactattaattcaggcgaaagcgttcttactgccaattcgattcccttagcttttttatacgaggatataacatctgtattaattccgatatcaaagccggaagaaagttctttcctttcatcaataacgcttatttttttatattttcctgcatatccgcttgataaaagccgtgtcatatctcttaatattgttgttttgccgcttgaaggcggacctgcaataataacacttggcgttgaattggcgaaaagaatatttaaaatattttttgagcaatcaacaacattatgagatattcttatgttaagactgcttatattcttaacgcttgaaattaagttgtttttataaacagcttcacctgctatacctattcttgaaccgaatttatcggttacgtatccgtcaatcattgtttgcatatttgtatgatacgaattattacaaaaactgtcgagaataaatataaactcatcatcgctgataaatctgcaatcgttcaaataatgattaataagcttgtcatatttactgataaaaaaaggtttatcaagaatgtaaataactataggtttattaactctaagcctaatctcagttatttttgacaaaacagatacatcaaatgacaaaaagcagttttttaaatcgcttggaaagtgctctaaaacagaaaaaatattgtccataaaatcaccttgcttaatagtatgctgaatttttgaaaaatataacaaattttcagttgaagtagaaaagcaaatgtgatattatatgtatataattataatatttacggaagtgcggttgcagtaatgaatagcaatataactatcaacacaaaaactaacaaattcattaacggcgaaacggttagctatactcttatggctacggtttcgctttttgttctgtttgcgttaaaacagatattaaaagtttttatcggcgttgctgttgctccgagctgtatcatcgcttttatcacggcaagcattatttcatttttacttgaaagaaaatttgtgtttggcaaaaagatgttagcttcaaacgctaaacaaataatattttttataatcagagcagcagttaacttcggcttttataaactttcggaatttgggtttaaaaatatgcttgatatgccaatcacgtttgtttggtttatagccgttgtaacttcttttttatttaactatatctatgacaggacactcgtttttgattgcggatatgaggcaataagtgtaaaacagtcaagaatatataaaaccttttataaaaatagatatgtatttttatcctctgccttggcactcttatgtataagcattctttatatcatttattcaacatttccgtttggcgatacaactgttatgagaatggacctttatcatcaatacggaccgctttttgccgaactttatgacagaatagttgaacacaaaagcctgctttattcttggacaacgggcggcggctcaagctttttaggcaattatctaaactatctgtcaagcccgctttcatttttaattttcctttttaataaggaggatattgcatttgccattacctttatagttggattaaaatgcatattaagtgcaaccacattcagttactacttaaagagcagctttggcaaaaataattattacgtaagtgcattcggcgtactctatgcctttagcgcatatttccttgcatattattggaatattatgtggcttgacggaatgattatgctcccgcttattgttctcggaattgaaagaattttcaataaaggagacattaagctatatactatttcaatgattttgcttttctttgcaaattattatatgggctatatgagttgtatattcgcagtaatatatttcgttgcatacttcattatttcatacaaaaatgacggcaaactcaatcctaatgcaaaatttgaaaagaaatattcaacaaaagcattgatgaataacacttttattaacagagggattaaatttgcatttgccagcatcattgcagcaatgttttgcgctattactttaataccggtgtttatgatattaaagaacagttctgcaacgtcaggcacgtttcctgatacattcacaagctattttgacattcttgacttcataacctctcactttgcaattctcgaaacaactataagaagcagtggcgacaacgttctccctaatgtatataccggcattttgacgcttatattgctgccgttattcttactcaacaacaaaataagtcttaaagaaaaagcgacttacgtgcttttgatggttttctttattttcagtttcaacaataactgtgcaaactatatttggcacgcattccattttcctaatgatttgccatatcgtttttcgtatatgtattcatttatagttgctgttatgggatataaaaccttaattaatttcaaagcaattaatattaaagatatcgtatattcgggacttggcgttattgcaatcgttattttagctcaaaaatttcttactaacaaaatgactaacggcaccatttatgcaacaattattttagttgcactttggtgcggatatcttcttatcgttaaaaacaagaatattcaaaaaagactgacagcatttgtgcttatagtatttttagtcggtgaaacagttataagtgccgttaccggaataccgcttaatcaggaaaacggaaactataaagaaaatttttccacatataacgatgcaatcaaatatattgactcaaatgataaagacttctacagaacggagctttgctatctaaatacacgtatggacccgtcttattacggctataacggaatatcagtattttcgtcaatggcatacgaatcatattcagagcttcagcatagcttaggaatgttcggtaatagaattaacagctatacttacaatcctcaaacgcctgtatacaatatgatgtttaacattaaatatttaattcaaaccgatgtaagcttagctccttcttctaatctttataaaaagaaatacacaaccaaaaacaaaaaggcaaatgtatatgaaaacaagtataatctgcctatcgcctactgcgttaattcaaatattgaagattggataacagatgagggcaatccgtttgaaattcaaagtgactttataaagcttgcaacgggatattcaaatgtgtttaaaaacgttgattatatcagtaccgactttgactcagtaacaggtgatgacgttactgaaaacggaacatattggcttaataaaagcgatgcttcatcaaaatacggcacagaaacaattacgctgtcacctactatcgacggaaacctttatctttatgttaagtcaagcgatttaaagagcataactgttaattctgaaaaagtatctgatattacacaaaacacagatgaggaatatttacttgaccttggtttccacaataaaggcgatgaagttaaggtctcgcttgacggcggaactatggaaagtgagagcacatcgtttgatatttattgttacagttgcgatgactcggtattgaaaaatgcttataattctctttccaagaacactttaaatgtatcatcttatagcgacacatcaattaaaggtactatttcctcaaaagaaaattgttatttatattcatcaattccttatgatgacggttggagcgtatatgtcgatggcaaaaaggcagaaacatttgaaatcggcggtactcttcttgcaattgaattaactgcgggtaatcatcaaatcgaatataaatatactccatcaggccttgtttacggcatagcggttacggcaattactgcatttggattatgcggttattatatattcagtaaatcttctttaaaacttaacaaaagagcgagaaagaaggagaaaaatattgttgaataaataaaaatcagtataattcttaaaaatctatttacaataatgtgcttttattgtagaatacacgtgaacatttgagaggagtttcatattactatggcaagacaaacagcaatcagtattaacactattccaatcggtccacttggcataatcggtatgccgggatgcgaagaattaacggacaaaattgacaagtacctcgttaaatggcgcaaaactcaagcaagtgagcatgctgagtcaattgctttctttggctatcagagagatacatataaaattgatgtatctattccacgttttggcagcggcgaaggcaagggtgttattaacgaaagcgtaagaggttacgatatttatattgtgtgcgacgtatttaactacagctgcagctatgatatgtacggcagaaaggtttatatgtcacccgacgatcattttgctgaccttaagagagttatttcagcgctttgttcaaaaccaaaaagagtttctgttattatgcctatgctttacgagggcagacagcacaagagaagttcaagagaatcacttgactgtgcaatggctcttaaggagctcgttcatcttggtgttgaaaacattattacgtttgacgctcacgaccaaagagtacaaaatgcaattcctgacaaatcatttgaaaatgttatgccgacttaccagatgattaaggcacttgtcaacaatgttgaagacttaaatgttgataaggaccatttaatgattatctctcctgacgaaggcgcacttcacagatgtatttattttgctacacagcttggagttaatcttggtatgttctacaagagaagagattatacaagagttgtaaacggcagaaatccaatcgttgagcatcaatatctcggtgattccgttaaaggcaaagatattatcattgttgacgatatgatttcatcaggtgaatctatgcttgaggttgctatgaagcttaagaacttaggttgcggcagaatttttgtgtgcacaactttcggtctcttctgcaacggtcttgatgtatttgataaagcttataaagacggtgtattctacagagtgtttactactaacggtgtatatcagccgcaggagcttttggacagagaatggtatgtaagcgttgagctttcaaaatatgccgcatatttgattgacacattaaatcacgatatgtctgtttcaagtcttctcgacagctctgcaaaaattgatactttgttaaaaaataaaggtttaaaggactaagatattatggcaaaagtaaaattgtctaaagctaaaacagctataattattattgccgcaattattttcgcacttttggttgcaggcggaatttattgcgttgcaacagaccaaagccctgctactgcaattgaagcagcaacagcgcatcaggacaagcttgtcggcaagtggcaaagccaaaaatcgccgggattatccgcttatgtattttatgatgacggaacgtatgattcttatttgtctacagttaatttttcaggcgaatatactgtaaaaggcaataaaatcactttgacaaatcctaatactaacgcacaggttgtttataaatacaaggttaaaggcaaggttctcacccttactcttatggaagacgacaaagaggcagaatcaaacgcttatgattctgttgatgaacttcaaatgaaaacgcttgcagatttaatcggcgattctattaaagacaacaatacaactacacaagcacaataattaaaaacccctcgtcattgacgtggggtttgttctatttttagttcactttccatatacattaccaaggaaggtgaaattctttgattggtaatgtggaaaaacgttgtatcgatttaggacattatataattgaaacaggtgctactgtcaggcaagcggcaatagttttcaatatcagtaaatctaccgtacataatgacgtcacaaagcgccttgcaatgattaatcccctgctttgcagtgaggttaaagaggtacttgagcgcaacaaggctgagcgtcacataagaggcggacttgccacaaaagaaaaatacagaaagttaaaagataacaaaaacattgattaataagcaaaataatgctattataaaaaaagaaaatcaaaggaagtgtaaatatgaagataggttttataggctgcggaaatatggcaactgccattattaacggaattacgaataataacgtcgtaagcgaaaaggatataaatgcttatgacatttttgacggtgcaaccaaaaagcttaaagaaaataaagatataaacatttgcgaaaacgaaaaagacgttgtaaaatcaagcgacattatttttcttgcagtcaagccaaatgttcaggcaagcgtattaaaagcaattgacggtgaaattaaggataaattaatcatttcaattgccgcaggaaaaacaattgaatttatcgaaagcaatttaaaatgcaaagctaaaattgttagagttatgccaaacatcaacgctaaagtcggtgaggctatatctgcttattgctttaatgattcagtaaccgaagaggacaaaactaacgttgaaagccttttaaacggaataggacaggtactttgccttgatgaaagctacttccctcttttcggtgttatcggcggctgcggacctgcttttgcatatatgtttattgacgcaatggcacgtgcaggagttaaaaacggaatgaaaaaaagcgatgcacttaaaatttctgctcaaaccgtattaggcagtgcaaaaatgattttggaaagcaacgagcatccatggcagcttattgataatgtttgctcccccggcggtacaactatcgagggtgtaacctcacttcaggcagacggctttgaagcggcagttcacaatgcagttgataaagcgcttgataaagataaaaaattataaaattaaagttcggttttgggttactccctttaccgagcttttttctaaagtttttataaagatattattaaactattgacaatgtttattttatatgatatacaggacttggaggtggttatatgaaatattcttttaaagattatcttattgatacacttatgtttggtttatctgtatcaattaccccaattatatatttgtcaacatttataatagtaaacaaatttaattatataaattcccctgttaacttatatttagcaattttcatttcatttttgttaccgtttatattcggcatttttctttcaagaaaactttgcaaacaatctgtatgttcatatttaacagttttcttaataatggaaataatttgcatatttcatatcaaaattccggatagttattttgtttttttacttcctcaggaagaatggataagaggattatttaataagtataatgaaatcagagaaataataatatctattattacaccggttttatacacactcttatattttttaggttcaaaattaaaatcaaaaaaacaaattaataaataaactataaaaaataaaagctcggagcaatccgagcttttttcgcataatttttatagtatgattacatatactttttgatttcatcaaccatatcggtcttttcccaagaaacaccgaggtcttccctgcccatatgaccgtaagcagcaacatttttataaatcggctttctaaggtcaagcctgtcaataattgcagacggacgaaggtcgaacaccttattaacaatatctgcaatcttttcgtcatcaagcttacctgtaccgaacgtatcaaccataacagaaacaggctttgcaacgccgattgcataagcaagctcaacctcgcacttatctgcaagacctgcggcaacgatattttttgctacccaacgagaagcgtaagcggcgcttctgtcaaccttagttgggtccttaccgctgaatgcaccgccgccgtggcgagcatatccgccgtatgtatcaacaataattttacggcctgtaagacctgaatcaccgtgagggccgccgattacgaatctaccggtaggatttacaaaatattctgtatcatcgtcaataagatcagcaggaatagtagttttaataaccttttcaataatatcgtttctaagttgagaaagctcaacgtcagcgctgtgctggcttgaaacaacaacagcagttacctttacaggcttgtcatcgtcatattcaaccgtaacctgggttttaccgtcggcataaagataaggcaatgtaccgttttctctaacctctgtaagcttaagagcaagcttgtgagcaaggctgataggaagcggcataagttccttagtttcattgcaagcgtagccgaacatcataccttggtcgccggcgccgttgaggttatattcatcttcttcgtcattcttaagctctaatgatttatcaacacccatagcaatatcaggtgactgacggtcaagagcaagcaaaacagcacaggtgttgccgttaaagcctttcttatcatcatcatagccgatatcgcaaacggtttttcttacgattgacgggatatcaaccgtagctttagttgtaatttcacccataacaagaacttggcctgttgtgcaagtagtttcgcatgctacacggctttgcgggtcttgctcgagcattgcgtcgagaatagaatctgaaatttggtcacaaattttatcaggatgaccctttgttacagattcacttgtaaacaaatgttttgacataatatattcctctcatcaaaaaaatttgttaattgctttagaaagaaaaaagcacacgtaacgagcgtgtgcacttagctatcatcactcggtaagccgcaggtattagcaccttacaaatgcaggttgctgtggtttcacagggcctgtccctcaaccactcttgataaagcatattaacatcacacatataatacaacaacgattagataaagtcaacaaatatttataaaaataaaggttattttgtatttactattgtaatttcttaataaatagtttataattatatagcaataaaaggcatatagccttataaggaggaaaattatggcaaagaaaaccgtatttattaccggtggtacaggtaatatgggttgggctgccgttcaggaaatgcttaagcatccaagtgatatcaatatcaagatgcttgcaagaaaaagcccaaagaacgaagaaaagcttaaggatttaatggcaaagccaaacgtaaaggttgtttggggtgaccttaatgattacgattcaatccttgaaggtgttacaggctctgactatgtccttcacgtaggtggtatggtttcaccgactgctgactggaaaccttacagaacacaaaagacaaacatcggtgctgcacaaagcatctgcaaggctgttcttgctcagccaaaccctgatgcagtaaaagtttgttatatcggtacagttgccgaaactggcgaccgtaactatcctatccattggggacgttgcggtgaccctatcaaaatttcaatttacgaccactatgcaatttctaagaccgttgctgagcgcacatttgttgaaagcggtattaagaattgggttgtaatgcgtcagtcaggtattctttatcctaatattcttaagaatatggatcctattatgttccacgttccaatcaacggcgtgcttgaatggtgtacagtagaagattcaggcagacttatgtgcaaccttgttcttgaggataaggcaggcaaccttggcgctgacttttggaatcacttctacaacatcggttcaggtaaggaatacagaatttctaactatgaattcgagcaacttcttctcggaacactcggtcttgcaggccctgaaaagctctttgagcctaattggtttatcactaagaacttccacggtcaattctatgcagacggtgacaagcttgaagaatacttacatttcagagaaaatcttcctataaaggactatttccacagacttgctgaccacgttgaattctatttcaaaataccaagatatcttccaaagaatcttgtagcagcttgtgcaaagccgtttatgaaaaagattgcttctactcctgacttcggtactcttgattgggttaaaacaaataatcctgaaagaatgtctgcatactatggttcacttgaagaatacaacaagattcctacaaagtgggaagactttaaaatcatcaagtttgataaggatagcagcgcagcagaaaagtttaagcttgaccatggttatgatgaaagcaagcctgaatcagagcttgacattgaagatatgaagcaagcagctaagttccgtggcggtgaatgtctcagcgaaacaatggttaagggagatatggctacaaagcttaagtggaaatgcggcacttgcggtgctgaatttgaagcttcacctgcacttattcttcttggcggtcactggtgccctgaatgctacattccacagaaggaatggaactatgatgaggttgctaagactaacccgttcttcgctcaggtttggtatcctaaccacactaaggaagagcataatgtttacaagtttgatgacctcttccatattaacggagttaaatgggacgatattaagcactaagcactgacttaaatacatataaattactaaacaccttgcattaatttgcaaggtgtttttcattttttgaaatatctaaaacaataatataaaaaagctgtcatcaacgatgacagcttttaaaatacgatattaaaatgttttatgtattagtcaaacaaaatgtcagtattagcaaatgaaagcggtacatattcaccgttatttacataataaactgcagaaagcttaacggcaactgcatattgcttacctgaacatgtaaacatatagcaatcagcaccatttacagtcttaatactattattaaatgaaattgcgctgtttgatgcatctgaactgtaacctatttctctccaattatcgtgaattgtttgcttaagcatacgcttagcatcattaacattataatcaggagtagtagtaatctcgtgtggattagaataaaggtcatatacagccggttttttgctttcctctgcaacggttgtttcctcaacaacaggtgcgacataagcagtgtttacatacataatgatgaagtaaattaagaaccaaataagaagaaggagaattatcataaggataatctttcctgccttattttgatttgcagttgatgaattagcaaattcctcttcggtaggaatttgaacaggaacgaaaggtttacctttctttgcacactttttctctaccttggcattcttcttttctaatttcttaacatactttccgtatgctttagttgtagccttttcagccttgatttccttctttgtttgatattcatcaacattaggaattgcgataggaacaaattccttaccgtctttttgagccttagcctgaagctttgcattcttcttttcagtatcctttacgaagcttgcataagctttagcatgtttcttttcagcctttgctttatatttagcatttgctttttcagctttagcttctttcttttcagattttgcctctttcttggcaagtttctttgtttgcttttcttctttagtcaaggcacaattacccccttataagtctaatagtagtataccattaaagatattaaatttcaacaaaaaaatatacagaaatggcagtattttatgaacaaattgtaaacattaacgctttttgaactattttgtaacagaaaaataaaaaatttagaaaaataagacaaaagttgaatatttacaaatatagttattataaattaaactgaccaatatatagtatatttatttagtataaagcgaataagtgccgtgattttcacggctgataaattctttcttttcaaaaggagaattaatattaattgccgcctcaataagtttctttgtaagctcaggtacatcagaacgatttaaagcctcatcaacgtcaagccacaacacctcgctgttttcatcattgtcagaatgttccctaccgcttacataatcagcggaaaatgcaacataccaatccttaagattaaacctaacagcgataatatttttaggctcaatcacaactcctgtttcttcaagaaattctctttttactgcctgttcaggagtttcgtctaaattaagatagcctcccggaacaataagaaaatccttaccggcaccgtatgtatgacgagcaaggagcactttgttgtccctaagcaccaaagccgtgacagattgcttataacacgtattttcgccgttcatattatagttcctccgccaatgactgtatcgccgtcataaagcaccacagcctgtcctttggttattgctctttgcggctcatcaaaaataagtttcagtttgtcgccgtccaaataagcagttgctccctgctctttcatattataacgcacacgggctttacacttaaattcattgggtaaatcaggaacaagcaaattaaaatcaactgcgtttacttcccttgaaaacagttcgtcattagtacaaagagttaccgtattcttttcaatatccttatcggcaacatacataggcttgccaaaagcgacaccaagccctttgcgctgaccgtttgtgtatctaataataccatggtgccttccgattacattaccgttaatatcaacaaaatcaccgtcgggatatattttaccgagataaccttcaataaacttagcgtaatcaccgtcgggaacaaagcaaatatcctggctgtcacgcttgcgtgcattcaagaaatgctgctcctctgcaattttgcggatttccgttttagaatattcgcccaaaggaaattgaatatgcgcaagctgattttgagtaagcgaataaagaacataactttggtctttagtatcgtcactaccttttttaagataaaaccagccgtctttttcctcaacaattgcatagtgacctgttacaacataatcgaatccgagttcgttcatacgttgaaaaagcttttcaaactttaaatatctgttacaatcaatacaaggattaggagttccgccgttttcataagttctgataaacttatttataactttttcctcaaattcgtctttaaaattaaaaacgtaataaggcatagaaagacggcgtgcaacagcccttgcatcttcaatatcgtcaagcgagcaacaggtcttttccctactgataccgatttcctcgttatcataaagtttcattgttgcgccgatacattcatatcctttttctttcattaaaaaagcggcaacgctggaatcaacgccaccgctcattgcgataatacattttttattcat

SEQ ID NO: 256 - DNA, 7024 bp, unidentified
  source 1..7024: mol_type = unassigned DNA
atgcgtgtcgactggaaaccgggaacaatgatttatccgttgcctgccgttatggtgagttgcggaaacgatgagagtgaatacaacattattacggtggcatggacgggaacgatttgtacgaacccgcccatgtgttatatatccgtacgcccggaacgccactctcattctattataaagaagaatatggaatttgtcattaacctgacaacggcggatatggcctttcccaccgactggtgcggggtacgttccggacgcgattaccataagtttgaagagatggggctgacaccgggcaaatcgaccgtggtgggtgcgccgcttattgaagaatcgccgctttgtatcgaatgccgggtgaaagaaatcctgtctttagggtcgcatgatatgtttatagccgatgtggtgaacgtgcgtgcagacgaacggcacctgaatgccgaaaccggcaagcttgaactggcagaggccaacccgttggtgtatgtccatggcggctattacgaactgggcaataaaataggaaagttcggctggagtgtagagaaaaagagatgattgaatcaaaaaacggatcatttaaactgaataaccaaaccgggcaatcaaccggattaattaactgaataaccaataccgatatgccaatcagaaaaaaagaaaaccgtaaaggcggcatgcatctgaagcgacgcctggctttgtatctctgcagggcggtggcgatatggatatgcggtattgccggcgtgtggcctgcctttgcacaaagaaacatgcaggatatcatcgagcgtcccaataacagtaaattcaatatcggggtgaaagccggcttcaatgcctctatgtttctggtgtcggattttaagattcaagacgtcacgatcgacgaaattcagaacaattacagagtcggctatttcggcgcgcttttcatgcgcatcaatatgaagaagcacttcatacagcccgaagtatcctacaacgtcagtaaatgcgaaataacgtttgacaaattagggtcgcaccacccggatatagaacccgactatgcatcggtcatttcgatgatacacagcgtcgatttcccggtactatacggttataatgtggtgaagaacgggccgtacggcatgtccatttttgccggccccaaactgcgctacatctggggaaagaagaacgaaatcacttttgagaactttgaccagaagggtatcgatgaacggctttatccttttaacataagcgcggtgatcggcgtgggagtcaacatctcgcgtatcttttttgatttccgatatgaacaggggttgcacaacatttccaaatcggtgacctacgacaatatcaattccgatggaagtacaggagtaagcaatatcaccttccggcggcgcgatcaggtactcagtttctcgctcggggtgatattttaatagataaatctggatatttttgtcggattatcattctttttccataaatttgtgcgcttaataaagaatctcgcattaagaaacttatttttattataaaccagaatgaaaagagacgatttaattttcgatattatcgaaaaagagcatcaacgtcagctcaaaggcatcgagctgatcgcatcagaaaactttgtgagtgaccaggtaatggaggcaatgggctcctgccttaccaataaatatgccgaaggctatcccggcaagcgttactacggcggttgcgaggtggtagaccagagcgaacagatcgctatcgaccggttgaagcagatttttggcgccgaatgggccaatgtacagccacactccggcgcacaggccaatgcagccgtgttccttgccgttttgaatccgggagataaatttatgggattgaacctggcacacggcggacacctttctcacggttcgctggtaaatacttccggtatcatctatactccatgcgaatataatcttaatcaggaaaccggccgtgtagactacgatcagatggaggaagttgccctgcgcgaacgtccgaaaatgattatcggcggcggttcggcatactctcgcgaatgggattacaaacgcatgcgtgaaattgcagataaagtgggcgccatccttatgatcgacatggcgcatccggccgggctgattgccgccgggctcctcgacaatccggtaaaatatgcgcacatcgtcacttcaactacacataaaacacttcgcggtcctcgtggcggcgttatcatgatgggaaaagacttccccaacccatggggaaagacaaccccgaaaggagagatcaaaatgatgtctcaattgcttgattctgccgtattccccggcatccagggtggtccgttggaacacgttatcgctgcaaaagccgtggctttcggcgaatgcctgcaaccggaatacaaggagtatcagaaacaagtacagaaaaatgccgccgtattggcacaggccctgattgatcgcggctttacaatcgtttccggtggtacggacaatcactccatgctggtagacctgcgctccaaatacccggacctgacaggtaaagtagcggaaaaagcattggtatctgccgatattacagtgaacaagaacatggttccgttcgacagccgttcggcattccagacttcgggtatccgtctgggtactcctgccatcacaacccgtggtgcgaaagaagatctgatgctcgacattgccgagatgatcgaaacagtgctttccaatgtggataatgaagaagtgattgcacaggtacgtgcacgtgtcaataagaccatggagaaatatccgattttcgcatactaagaaatcagacgaatagcaaggaggtatcttgcaaatggagggtgtgtcaaaactaaaatgaccactctaaaaagttacagattgtaactaacaattataaaagagccatatcattactcaaaaacagagtttgatatggctcttttcatcattgatttagggagtcaagtttcagattaaaagttgtcttttcatcaaattacgttttgacacaccctctttttttatccgtttgtgaaccttagctccctctcccacggagagggctggggagaggctcagctcaacccgtctatctgtccgtcgacaatatcgatatgtttggcttgcggctctttaggaagccccggcatacgcatgatttctcctgcaatggccacgatcatttcggccccgttgttcagtacgatgtcttttatgtggaactcgaaattattgaccgcaccgtagattttcgggtcagcagagaaagagtattgtgtttttgctatgcagaccggataacgggtgattcccatctctgcggccaacttgattttcttacgggctatcgtgctgtaagtgatgacactggcgccataaatgttggtagccactttctctattttctgttcgatgctgtcatcatccttataggtgaacgacaaaggagcggacggctttttctcgatggtttctaccacaaggttggccagatctatagccccctctcccccttcgttgaaggcgttgttgatggcaaatcctactcccaattcttcgcaatgttgccgtagaagttccatttcttcatccgtgtcactggcaaacttgttgaatgccacgattaccgtctgcccgaaggaatgcaggttgcgcacgtgtttgtcgaggttgcgcagtccctctttcagcccctccatattaggctccttgatacggtcgagactgactcctccgtgcattttcagtccttgtgcagtagccacaatcacagtcagacgtggctggatgccgcttttacggcatttgatgttatagaatttctctgctccgagatcagcaccgaaaccggcttccgtcactacataatctccgaaggtcattgccatttttgtagcaagtatggagttgcatccgtgtgcgatattcgcaaacgggccgccatgcacgaaggctgccgtattttccgttgtctgcaccagattgggatggatggcatctttcagcaacacggttatggcaccggccacaccgaggtcttttaccgtaaacggcttaccgtcataagtgaatccgaggaggatgttttcgatgcgtcggcggaggtcttccacgtcactggccagacaaaggatagccatgatttccgaagcgggagtgatgtcgaatcccgactgcatggtgatgccgtccgtcttggctcccagtccggtgacaatgttacgcaacgaacggtcgttcacatcgagaacccggcgccaaagaatttctttcaatccgaaaccgtttgcctgattctgatacaggtaattgtcgagcaacgcggaaatcatgttgtgtgccgaggtgatcgcgtgaaaatcacccgtaaaatggaggttgatcttatccataggaagcacctgtgcatatcctcctccggcagctccccccttcatcccgaagcaagggcctaaagagggctcgcgcaaggccacaatcgccttcttgccaatcctgttgagccccaaggcaaggccgatggaaacggtagtcttgccgattccggcttttgtggcggtgatagcggtgacgagtatcagattgctttgtttcactttctcctcatcaatcagctgttcggggattttggcgatgtagcggccgtagttctccacctcttcacgagggatgctgatgctttctgcaacttgttttattttcttaagctccgtactgcgggctatttctatgtctgatttcatacggggttgttattagttacttttaaaggctgcaaaattaacaattaactttggataaaagttgcataggtataaaaaatgaaacaggctttcatttttcttcgggtttgccgggaaaggaaatttctttcatgaatggattatcggcaaatattttctatctttgcgtttataaaacctacggatatgaaaaagctgatattgtctctttccctgctgctggcaacggttgcagtgtccgcacaatcggaactgccgtcggacagcataccgcgctctcccagtgaaaactacaaggagttcggtggctttttgcttgatatgggcttgatgagtgtcatgccccctcaattgccaaaaatgaatttcgatatatccgatgccggtaaagactacaaccgattgttccggcttcatccggatgtaacttattctcagggattgtcggacgtgttttcacctttttattccggattcggatggtcgggtttcggttcgtcacaaaacctgcaaatgggctcgttcaagttgaaaaacggtatgcgtatcaacacatacggagaatacaatgcagacggatacaaagtgcctgaccgcagcgcgctgccgtgggagaaaaacacgtttaaaggcgctttcgaactgaaatcggccaacggtgcctttggcatccgcattgaagtgcaacagggaaaaaatccctattatccttaaaaccaagaagtaatgaatatattgattatcggtgccaatggctttacaggacgccggatgctggatgacttggtatcgtgtggaaaatacaacatgaccgccagctcactgcgcgacgacatagcaccgggagacggttatcggtttattcgtgcggatatacgccgtgcggcagaagtgcaggctctttttaaggaagtttgcccggatgtggttatcaatacctccgccttgtctgtgcccgatttttgtgaaacgcatcacagtgaggcccgtgcaaccaatgtcatagccgtagagcatctggcgcatgcctgcgagcaatacggcagccggttcatccatctttctaccgattttgtttttgacggtagaagcgaatgtctgtataccgaagaggacgcccctaatccggtcaattattatggtgtcaccaagctggaaggtgagcaacgcgtgagtgaatattgcagtaactatgccatcgtccgcgtagtagtggtgtatgggaaagcgttgcccggacagcacggtaacatcctgcaattggtggccgataaactccgcaacggtgaaacggttcgtgttgtttccgaccagtggcgtactcctacttttgtcggtgacatatccgaaggagtggaacgtctgatgcaccatccccgcaacggcatatatcacatttgcggaagcgattgcgtttccattgccgaaatcgcttatcgggtggcggatgtattaggactggacaggtctcttattcagcctgtcaccacggaggaaatgcaagaggccactccccggccccgtttcagcggattggacatagcaaaagccaaacgtgaaataaactacctcccgcatactttggaagagggaatcaaggagatgttctcataaacggccattgtaagctcaagggcagagcagatgttccatttgtccgatgatatgtgatttccaggtttgaagcatttcatggaagtcttcatcgccattgagaaagaccgaagtgcttagtttttttgccaggaaaggaaataccagaagcccgtagaaggtataaaatacaaaatgtatgggaacctgtttcagttttccggaatccatttctttttgcagcttgacgcctatctcatgaaaatagcgttccagttccaatgcacgagccgtactgatcaaatgtggcatatcccgttctatttcccttactatgaatatcgggagggaaggattatcggtaaatattttgaaataggcatcgactaccctgcctatccgttcggatatgggtttgtcctgcaccataatcccttgaatttcgggagccaaagaaagtatgatgtttccaaaaacggcttggaacattttatcttttgtccggaaataataatgcaatgtagggcggtttatacctacggctgctgcaatatcactcatgttggtgtctgtaaacccgtttttcacaaataattgctgggctgtttctattatcttgttttctatgttattgtcatttgtagccat

SEQ ID NO: 257 - DNA, 6004 bp, unidentified
  source 1..6004: mol_type = unassigned DNA
atgggaaaaccgacaggatttatggattatgaaagacaggataaaccggcagagagcccattggaacgcatcaaacatttcaatgagttccatacgcctcttagcaaagaagaacaggaacttcagggcgcacgctgtatggcgtgcggagttccgttctgtcagtctggaaagccgcttgcaggaatggccagtggatgtccactgcacaaccttgtgccagagtggaatgacttgatctacaatggaaattggaaggaagcttatttacgtctgaaaaagacaaacaattttccggaatttacttcccgtgtatgtccggcactgtgtgaaaatgcatgtacctgtggactgaatcaggaagcagttgcatcaaaaagtaatgaatatgcaattattgaaaatgcatatgagatgggatatgcaaaggcaaatccaccgaaagtgcgtacaggaaagaaagtcgcagtgattggttccggtccgtccggacttgcggcagcagatcttctgaacagaagaggtcatcaggtaactgtttttgaacgtgaggacaaaccgggcggattgctccgctatggaattccgaatatgaagctggagaaacagattatcgaccgtaagattgcgattatggaagaagagggaattatcttccggactggatgtaatgtcggaaaagacgtgaaggcggcagatatcctgaaagaatatgaccgcgtgatccttgcatgtggagcatcaaatccaagagatatcaaagcaccgggaagagatgcacagggaatttattttgcagtagatttcctgaaatcaacaacgaaagcactatgggcaaatgacatgaagcttaaaacaggaagctacatttctgcaaaaggaaaaaatgtaattgtaatcggaggtggagatacaggaaatgactgtgtcggaacatctattcgtcatggagcaaagagcgttctccagctggagatgatgccgaaagcaccggacgagagaacaccgatgaacccatggccggagtggccaagagtctgcaagacagattatggccagcaggaagcaatcgctgtgtttggttctgatcctcgcgtttacacaacgacagtgaaagaattcgtaaaagacaagaaaggaaatctctgtaaggcagtccttatcaagcttgagagtaagacagatgggaagaccggacggaaaatgatggttccggtagaaggaagcgagtataccgtagatgcagatcttgttctgatcgcagctggattccttggaagtcaggattatgtaacaaaagcattcggtgtagaagtgaatgaacgcacaaatgtaaagacagaggcaggaaaatattctacaaatgtgaaggatgtattcacagccggggatatgcacagaggacagtctcttgttgtatgggctatccgtgaaggtcgtgaagtggcaagagaagtagatgaaagcctgatgggatatacaaacttatatattcagtagaaaataaaagatcatacagtgaaacaggagtctggaaagtttatctaagaataaagagaactttccagatttttttgttacaaaaatgttacgaaaaaatgaaaaaagtaagggaaactattgaaaatattacataaatacgctataatattgaacgtagaatgtaaataaaataccctcttgttacgagaaatatgttgaaaaaacacaatagatgttgtattataacatatgagtatgtggaattataatgtaactatttacaatgaattgtgatatgaaaaattataatgcatcacatgggggactagataaaaataaggataggtggaaagatgaagttaaaaaaagtaagcagtatgattcttgcagtaacacttgcatgtacaatgactgttacaccggtacttgctgacgaggtcagtgatctgaagcagaagaagcaggagacacagaatcaggtaagtaatcttcagacacagctgaattcacttatgaccaagatctctgatcttgagaatgatctgatcgaaacaggtgaggaaatctctcagacagaggaagatctgaagacagcgcaggaggaacaggaacagcagtatgcagctatgaagcttcgtattaagtacatgtatgaagaaggaacaggcactgctacagtggagaaggtactgacatccggagatatttccagtgtactgacacaggcagaatattcccaacaggtacattcttatgacagagacaagctcgaagagtatgttgcgacagttcagaaagtagaagatcttaagacaacacttgagacaaagatggctgatctgcaggagacacagacagagtatgatgcgcagaaggatgaactgaatactacaatcacagagaagagtagtgagattgcaaatctcgatgttaagattgataaagctgtaaagaaagcagcggaagaagaagctaagagaaaggcagcagaagcagcagcaaagaaagctgccgaggaagcagctaagaagaataactcaagcagtagttcttctaatagaaataactcaagtaatagttcttccagtagttcaagctcaagcagctcaagctcaggaagttcaagcagctcaagctccagtagctcaagcagtagttcttccagcagttcaagctcaagcaactcaagttcttcctcatcaagcccaagctatagtgcagataagggaagcattattgtaaatgcagcttattcacagatcggagttccgtatgtatggggcggatctacaccgggagttggacttgactgttcaggacttgtacagtattgctacagacaggcaggaatttcaattccaagaacaagtggagatattcttgcagcaggaacaattgtaaatgatccacagccgggagatatctgctggacaccgggacatgtagcgatttacattggcggcggacagatgatcgaagcacagcagacaggagtaccggttaaggtaagttctgtacgtgttacatattatgtaagatattagaaccaaaaaaggaatcagtgatgctgattcctttttttaaactttttttatttgcccggtacaatttccagccagtatccgtcaggatcttcaataaaataaattcccatagatggattttcgaagcagatacatcccatctctttatgttttttgtaagcagcatcgaaatcatcgacagcaaatgcaagatgaatctcattatctcccagttcatatggtcgatccatatcacgcagccaggtgagctctaaaagatgcggggtcacaccgtctgtgagatatacaagcttaaaactttcgtcatcggcaagtttttcacgttctacttttaaattcagagctttctggtaaaaatccagagatttttcaagatcatatacattcaggttattgtgtgcaaatgtaaaattcattttagtacctccatagaattataaggtttttattcacagtcaagtggaatgatgactggaatctactttctaaggatatcacaggaggggaggaaaaatcaataatgcatagataaaacctgatgggatagagtgataacacagaatatagtgataaatgaatgaaaaacatttttgaaatgcaaaacatgtggaaataaagctaaaaaaaacaaaaaaataaaaaagaatgcaagaacccattgacgaaacgtcaaaaattatatacaataacaaaagtgaaaaaataaagaaagtggaggattcctgcaatgactgcatataaagatttgagcaaagaagagttattggaattaaagagtggcctggaggcgcagtttgaagaagtgaaggcaaaaggtctgaaactggatatgtccagaggaaaaccgtcagcagaccagctgaatctgtcaatggggatgatggatacactgacaagtggtgttgatctgacttgtgaagatggtgttgactgccgtaactatggcggacttgatggaattgatgaagcaaaacagcttcttgcagatatgatggaagttccgaaagataacgtgatcattttcggaaactcaagtctgaatgtgatgtatgatacggtagcacgtgcaatgacacatggtatcatgggaagtactccatggtgtaagcttgataaggtaaaattcttatgtccggttccgggatatgacagacatttcgcgattacagagcatttcggaattgagatgatcaatgtgccgatgacatcaacaggaccggatatggatatggttgagaaacttgtaagcagtgatccggcaatcaaaggaatctggtgtgtaccgaagtactctaacccacagggaatcacatattctgatgagacagtgttccgttttgcgaacctgaagccggcagcagaagatttccgtatcttctgggataatgcttactgtgtacatcatttatatgaagataagcaggattatctgattgagattctgatggagtgtaagaaggccggtaacccggatatggtttacaagttttcttctacatccaagatcagtttcccaggatcaggaattgcagcaatggcagcatctgatgcgaacctggaggatatcagaagcacaatgcgtgtgcagacaatcggacatgataaggtaaatcagctgcgtcatgtaagatttttcaaagatattcacggaattgtagaacatatgaagaaacatgcagatatcctgcgtccgaagtttgagactgttcttgaagttcttgaaagagaacttggcggacttgagattggatcatggatcgcgccacgcggaggatatttcatctcctttgatgcgctggatggatgtgcgaaagcgattgttgcgaaggcgaaagaagctggcgttgttatgacaggagcgggagcaacattcccttatggaaaagatccacatgacagcaatatccgtatcgcaccgtcttatccaacaccggaagaacttgcagttgccgctgaagtatttgtattgagtgtaaaactggcaagtgttgataagatccttgagacaaaataaataacagcattttataaagaccttttgcaagtggttgatctgccggcagaaggtctttttctgatggttgacagttactgtttactcccgtgtcaatcattccgctgattgacacggaggatgcgtgttttgatttgaatgcatctcgccccatcgccaaaggcgatttaaaatggcgagatgcgttgctggtcgcacatcgtgtgaacagtaacggttgacatgcgtttccagggagattataatgtagtgcatagcagaaaagaggaatgacatgataaaaggtgtaatatttgacgtagatggtgtccttctcaattccatgcctgtctgggagaatcttggagaattgtatctggatcatttgggaattgaggccgagaagaacctgggggagacattatttgagatgagcctggaggaggcggcagattatctgatctcacattataacctggagaagacagtggaagaggttgtacagggactgaataaggaagtggaagactattatgcaaaacgagttccattgaaagaaggggttcgtcagtatctggaggaattcagagagcggaagattcctatggtgatcgcaacaaccggtgaccggaagaatgcagaagcagctctgagcagattgaaggtattaccttattttcaaggagtttttacagcatctgagatcggaagcggtaaggatcagccggatatttattttgcagcacttttgcagctggatacggagccggaacagacctgggtgtttgaagatacttaccaggctttgagaacggcaaagcatgcgggatttaagacagtagcagtttatgataaggcaaatgacaagaatctggcgcagatctggaatacggcagatatctatttgccggaatttgatgattttaatgttttttggaacagggtgtctgaggaagagaaagaacagttgctgattgtagaataa

SEQ ID NO: 258 - DNA, 9532 bp, unidentified
  source 1..9532: mol_type = unassigned DNA
atggttcaggtggatctcatcaccggctttttgggcgcaggcaagaccacctttctgcgccgctatgtgcggtaccttgtacagcaggggcataaggtgtgcattctggaaaacgactttggcgcggtgaacgtggacgccatgctggtgcaggaggtgctgggtcccggctgcgatgtggagaccatcagcggcggctgcgactgcgacacccaccagcgccggatgcgcaccaaactcatcgccatggccatgcgcggctttgaccgggtggtggtggagcccagcggcatctttgatgtggacgagtttttcgatatcctgcgggacgacccgctggaccggtggtatcagctgggcagcgtcatcgccatcgtggacgcccttctgccggaaacgctttcgccgcaggcagagtatctgctggcgtccgagaccatgaacgcaggctgtgtgctgctgagccgtgcccagctggcagcgcccgcccagtgcgccgccgccgctgcccacctggagcgtgcactggaaaccgcaaaatcttcccgccgctttgcgccgggggagatccttgccaaggactgggacgccctgaccgatgccgaccttgccgcccttgccgcctgcggctaccggcaggccagctgcgaaaagctgcattttgaccagcacgcggcctttacctccctttgctttctggaactgcacctcaccccacagcagctgcagaccgccgcacagcggctgttcgcagcgcccgagtgcgggcaggtgctgcgggtcaagggctttgcgcccgccccggcaggcggctggctggagctgaacgccaccgccgccggctgcacccttgcgcccatcccgcaggggcaggaggtagtcatcgtcatcggtgaagcactggataaagccgccattgaagcaaaattgaaggggtgaaaggcagttttcccccataacaaaacgcattgtggaaaaacaggagggcacatcatgcaggaagtacgcgcagccgttattggcaccggggtcatggggcgcaagtatgcccagatgatcgcagagggaaaggcgggggcattgcgcctgaccgccgtggtctgccgcagtgccggggcgcagcagtgggcaaaggataccctgccggatacggtgcgggtgtgccccagcgccgaggcgctgtacgattatgcagaagagtttgacgccgtgctggtggtcaccccgcacaagacccacccggaactggtgatgcaggcttttgcccacggcaagcacgtcttgtgcgacaagcccagtgcaaacgcgctggcaccggcactggaaatgaaccgcgccgccgaaaaaagcggccttgttttcgccatgatgttccatcagcgccgctacaaaaagtatatgcggcttaaaaaattactggatgatggggcgctgggcgagatcaagcgggtgcagctggaaaacagccgctacttccgcacatggatgtaccaccgctccggcagctggcgttccagctgggcaggggagggcggcggcgcgctgctcaatcagggccagcatattctggacatctggcagtggctgttcgggatgccgaccagtatttatgccgtgattccctacggaaagtataacgattttatggtggacgacgaagccaccctgctcatggagtacccgcagcagcgcacggcaacctttatcctttccaccggcgagggcagctacaccgagcggttggagatcgtgggcaccaagggcaccgccctgctggaaaaggacactctcaccctgcacacctacgcgccagacaccgagacctaccgccgtaccgcagactgcaccgagcgccagcagcttaccgagaccaccgttaccgagcagttcgccccgcaggcagagccttacccggagatgctggcaaactttgcggacgccatcctgcacggcacgcccctgaccgcccccggcgtggagggcgtgcgggcgctggaactgaccgatgcggcttacctgtccgcatggctgggggaaaagctcaccctgccgctggacgcagaccggtttgaacaggagctgcaaaagcatattcaggaggaacaggcaaatggctaaactgcggtttattgtagtaggctccggctggcggtcgctgttttactggcgcatcgcgcaggcgcttccggagcggttcgagctgtgcgccatgctttgccgcaccgaggaaaaggccgaaaaaatgcaccgggaatacggcgtgccggtaagcacctcggcggagcagtgcattgccctgcacccggatttcgtggtggtggcagtgaataaagcgtccatcgccgccgtcagcaccgaatggcttgcccggggctttgccgtgctgtgcgagaccccggcggcgctggcggaggacgcattgcgcgccctctggcagctgcaccggcagggcgcaaagctgcaggttgcagaacagtactggctgtaccccacgctggcaaaacggctggcagcagtgcgcagcggcgcactgggcacgccgcagtttgcccggctgtcggtggcgcacggctaccacgcggtcagtctggcgcggcagttcctgaacgccgggcagcagccggtgcgggtgaccggacgcagctggacggaaaggatcatcgaaacggattcccgctggggtgcggtgcataacggcgcactggtggaaaagaccttgcagcagcacacgctggaatttgcgggcggcggcacagcgtttctggattttaacggtgtgcagtaccactcttacctgcgcagcacccacaccagtgtgcagggagagcggggcgaagtgttcgacgacaccctgcgctgtctggatgccgccggggagccggtgtgccgtcaactgaccccgctgcccgacccgctggcagctgccgccgcgcaggcagggctgaacgaggacgagaccgccatcgcctgttttctggacaggatgcagggctatcttgccggcggggcagaggtgtatccgctggcagacgccttgcaggacgcctaccttgccctgctgatggagcgcgcccttgccgccggtcagccgctggaaagcactccgcagccgtggaatacagaagaacgataaaaaaggctcaggagcacctgtcggcgcttctgagcctcttgatttataatgattggatcacatcaggtcgatcagtgcttccacctcgtccatgcgggtggcccagctggtggcgatgcgcaccacggtgtgggtgtcgtcgaacttttcccagaagccgaactttgccttgccttccagcgcagccagctgggtgttttccagcacaaggaagatctggttggtgggggagtccataaagaagcgatagccctttgccgcaaacccggccttcaggcggttggcggtgtcaatagcgtttttgctgatggagaaatacaggccatcggtgaacagcacgtcaaactggatgcccagcagccgcccctttgccagcagtgcgccctgctgcttgaccatggtcataaaatgcgccggtgcgccgtgggggaacaccacagcctcgccgcacagcgcacccaccttggtgccgccgatgtagaacacatcggtcagccgggcaaggtcggccagcgtcacgtccgtgccctcggcagccagaccgtagcccagccgtgcaccatcgaggaacagcggcatcttgtactcctgacacacagcgtgcagggcttccagctccgccttggtgtacagggtgccgtactcggtggggtgggagatgtataccatgccggggaacaccatgtggtcgtggttgtcgtcggcgtagaaggtggccaccagtgcccgcagctcggcagcgtccagcttgccgttgtgctggggcagggtgatgaccttgtggccggtgtactcgatggcacctgcctcgtgcccggctacatgaccggtggcagcagccactacgccctgccaccgctgcagcatggacgcgatgacgatggcgttgctctgggtgccgccggagatgaactgcacatcggcctccgggcaggcgcaggcggcgcggatcttctcgcgggcgctggcgcagtaggggtcggtgccgtagccggagaccttttcaaagttggtctcggtcagcttttgcagaatggcgggatgtgcaccctcgcagtagtcgttttcaaaatacagcatggcaaaacgctcctctatataattgtaagaaaacagtacctctattctacatcgccgcgaaaaccctgtcaaatccaaaaccgtgcacagcgcacgcaaggcaccgcaaaaacgcttacaggatacccggtgcgacaatatgttgaccggaactacggcctacgacagctttttttacgaaagtatgatcctttccaaaaagatgaaaagtttttcaaaaaagtgcttgacaattctgctgcatctggtataataactatcgttcccggcgccacggcgcaggaacacaacagaatatgcggatatggcggaattggcagacgcgttagattcaggttctaatcggggcaactcggtggaggttcaagtcctcttatccgcaccaaaccatgaaaatccgaaccttttctcgataggagaagggttcggattttttgttttcttcggaaagcaaaatgaaggctccttcccgacggctgtgtgtccgaaaccttatcagaaaaaagaccgtatcacaaaggtcacaactgtaaaggtgccgtaaggtagaaaggacacgagtatgaagtacgatgaaagaacctgcaaattcaacatggacaccggctgcgtggagctgctgctccgggatggaagaaaaatttccatcgactgcaccggggtcgaggatgcgttggatgtgaccatggcgcagaggtcggagttggattacctcatctacaatgatccgctgagctacgcggatttgattctgaatggtaacccggaggaatatttgaagaatgtggtcggaggtcatggatcagaggatttatcgtttagagattaactcgatataaggaacaagcccacaggtctgccgtatttttatgcggtctatcctgtgggcttgtttgctattatcgactcatgattgaatttgaaatttcaagcacgaccgtatcatgtttataggtggtaacaaccatcggcaggcctccagccttcaaaacttatgcagacgtttgattttcgtatcgtttaagccagaggaaaaagcagatgtttaataagatgcccactgcggtggaggtgggtgcggacagaccgatcatcgtcaggctggcgttgggctggatactcataatatacgccatggggagacgcaccagcagagtctgcaccagcccctgtaccatgacccagagggttttgtcgttgccattgaagtaacctaccatgctgaacaggatggcagtggcgatggtctcgggcgcaaagcccatgaggtaggcgtagctgttggcaataacagcggcatctgccgtaaacagaccggagagaacgtcacccttgcaccacaccagtgcaaatacggcgcaaccgaacactagaccgatgccaatgccggtgaacatggactgctcggcgcgttttttattgccagcacccacgttctgggacacaaaggatgccatggactgcatcagagaactggggatcagcatggcaaaattaacgatcttgcacgccacaccgtagccggaagatgcctccagccccaaccggttgacgaaagcgcagagcgccagaaaggaaagctgggtcaaaaactcctgcaaagccagcggcagaccgatgcccagaaattttttgcactgggggttcggcttgaaatcagagcgatggattttgaagggcagctccttcttcagcagcattgcgattgcacagattacgctgacggcttgtgctgctaccgtagcaatggcggcaccggcagcatccagatgaaaaccagccaccagcaccagatcgccaataacattcacaatgcacgccaccagcacaaagatcagcggagagcggctgtcgcccagaccgcggaaaagagccgagagcatattataggctacaataaagaagatgccgctgccgcaaatgcgcacatagctggcggtcaggtctagggcttcggcaggagcctgcatcagactggcaataaaccgtgcaaaaaacaccagcaccacgaacagtgcagctgccagaagggtgaacacaatagctgccccgccaatgacttgcccgatgtactgcggtcgtttttcgcccagatagcgggcaatgagcactgtgacgcccatggcaagctgggtgacaacaaaggtgacgagattgagtacctggctaccagtagaaaccgcagacaagcctgaagtggagccaaagcgccccactaccagaaggtctactgcgccgtaagcggcctgcagcaccagcgcacccagaatgggcagcatgaaaaaagcgagctttggcaaaatgcggccttgggtaaaatcggtcttatcgtttttcaagagaatctttcctttcgcgcataatagcatagaatttttccagcgtttggatggtgcacgctgcatcctcctcggaaatgctgtccagatacgggagcagttgcgagaagtagtccgtattgtacttctgggaaagcgcttgcccgctctcggtgagaaacagataggtcacgcggccatcttcagcggatacctgttttctcagataccctttgtgctccatctcttttacggtacgggtcacaccggggcggggcaggttcagtgtatcgctgagatcagagatcttcggctggatgccacgggtctgcaatttctgaataacatccagacactggatataagaggatgtcacaccctccggcagggcaggcagcatctcccgtgcccgctttgccagatagcaggcatccagcagctgcttgatcagttcgatggtcataatgaaattcctctccaaacgattatcgaaggtaattaacattgataattatatagaactgcccgggaatgtcaagtctttttgaaaaatcggagatgtcggcagctttgaggcatctgcttccggcataccattctagagggtgtttgagcgaatacagtctgaaccatggattagaagatcaaatacaaaacaaaaacagggtgcgtccctgaataggacgcaccctgccagcgtaattcacgatttgattcgttggcaacaaccgtgaattgcatatcgcaaacaggtcgttgagaattgctctgcttgtaaaacttgcgattaaagccacagataacagcgatatgtacaacagggcgttccccgtcgggaacgctctgcttttctttgctgggggcatgatgagcctgctccgcctgccataggcaagctcgcgtttgcgcagcaacaaaagcctcagtgaaatatcattcaagggtttccagtgcttccaccagtgcaaggatggtcagcgactggccgtatgccatgggagcaatcagaatgtttttgtagtggtcgcggtcgtagcccatacccgtaccgccggatactttcagcaccgtaccatcggtatcgatgttcttgaggattgcacggatagctttcttggcacagggcaggtaggaatcatccagaatccccatgcggatgcctttcaggatgccagcggtgatagcagcagagccggaagtttcttcgtagctggtggagtcatccagaaccgtatgccaaaggccgtcctcaccctgaaggtcacgcagtgcgcgcacctgtgctttgtaggtatccagaatgaacgtcttgacgccctgattcagcgtacccttaaacatatccagatagtccagaatacccagcgtgaaccagctgttgccgcggcaccagaacacgccgccaaagttgtccatccgattgaacgaccagccgtggaagaacagaccggtgtgggtatcgtacagatacttgatgtgcatcagcacctgcttaatggattcgtcgatccactcctgcttgccgtacttctggcccatccgattgaggaacaagacggtcatgaacagggtgtcgatccacatctcgctctcgtttaggcgaacgccctgacggtcgccgttggcactggtgacgtgctgaaagccaccctcacgggtacgcgggatgcactccatcagccactttgcccaatccagacaaagggcttcaaactcaggggcgtggtaaatctcattcaattcacacagagtcagcagcggagtagtcgtgttgatattgcgggaaggcagaccctgcgcaatgttctccttgaaccaatcatgcaggaaggtgcggtattcctccgaatcctgtatcttggcgattttgagcagaccgtacaggccgatgccctgcggccagtcccactccttgatgccgaagtcacggctaaaaaatccgatggcctcgccgccttctttcaaagtgtcctcgttttcgggggcaccaaggtgcatcagcttctggataacaagatccagctttttctgaatcagttcttttttgatttcgtttgccataagaaacacctcatgtatttgtattgtttttctcagcggttgaagtaagcgattttcgatattgtgcaggcgtaacgtgttgatatttcttgaacacacgtcccagataggtgatgctctcaaacccggtacggcttgcgatttcggaaacggaaagtgttgttgtttctaacaggctctgcgctttttttacccgcaggatgttgatgtattcgttgatgccgaagccagtcacttcatggaaggaacggctgagataatacttgctgatataaaactgctcggcaaggctgtccagcgagagcttttcctgaaagtaatcggaaatgtagtctgagatttggtagactgcatcgaactttccgccgctggccttaccctcctgcacatcgttcaggcaggcgacctgctgattgctgcgccggaagtagatgaagcctagaatcaactccgaaagaatagcggtctggctcataggctctgccttgtccagttcctccatgatttgcagaaacaatcggcgggtattcgctgtctgcttcggggtcagttcgtaaattccgtagtgcttgtggaagaacgcaccgatcttcagttccgggaacatcttatcgaccttttccacaatgtcccggtctacatagaggatcactcgctcgtattcggtttccgggtctcccacgatggaatgggacatatgaatctggccgctgtccacgagaatcaggttcccggcctgtgcttcataggcgcggttctcaaagaacatctgccgccgcccacggagcaggagataaatttcgtactcctgatggaagtggttgtaccgcatatcaaagtttgccggacgaaccatgtgttccaccataatgccgtttcgtttgcggtaatattgggtcgcatcaccctgaaccatgctgtgcagccatgttgttttcat

SEQ ID NO: 259 - DNA, 14677 bp, unidentified
  source 1..14677: mol_type = unassigned DNA
  misc_difference 29: note = a, c, g, or t
  misc_difference 30: note = a, c, g, or t
  misc_difference 31: note = a, c, g, or t
  misc_difference 32: note = a, c, g, or t
  misc_difference 33: note = a, c, g, or t
  misc_difference 34: note = a, c, g, or t
  misc_difference 35: note = a, c, g, or t
  misc_difference 36: note = a, c, g, or t
  misc_difference 37: note = a, c, g, or t
  misc_difference 38: note = a, c, g, or t
tcaccatgccgtcgtcgcgcaggaagcgnnnnnnnnnnccgccgtacctgccagaaactcatcctgaaccagccccctcgtctccgggggcatgcccgcatggtaggacttgacggagaaaccggcttttcccaattcgtaggaaaggttttccgcatctttgcgggtccgcgtgtacaccacggcaggacggcggcctccctctttcaacaattcaaccagccgcgcggtcttatcctgatccttcaacgtttccacctggcggaagatattcgcacggtacggcgcagcccggaaaatacattcatcactcacgccaaacaggccggccagatcgcggcacacccgctccgtagccgtggccgtcaacgccatgacgctgcggaacccgtgctttctgaaaaaaacgggcagccccagataatccggacggaaactgtgcccccattccgaaaggcaatgggcctcatccaccacgaacaagccggggggaacaagctccatggcccgctgaatccacggggattccagagactccggagcggcaaacagaaggcggacgcctccggacttcaatctgtccatcagggaggccttatcttcctccgccagggtcgaatcatacctggcggcggccacgcccagtttttccagacccgccacctggtcgcgcatcagggcaatcaacggagaaaccacaaccgtcagcccgtttccaagcaccgccggaatctgatagcaaaggctcttgccggaacccgtaggcaaaataccgatgcaggaacggccctccagcgcgcactccacaagctccctctgcatgggacggaaccgttccttgccgaacaaacgcagcgtgtcttccagagcagaggaaagcatggggcaaaaataccataatgcagaatcccggcaaaaggaatcctatgacattgacacggcgccgtcatcctatatcctccaggcaatatgagacctttgaaaaccatcatcgccggaactctggccctgctggcggcagctcccctttcagcccaaaccagagctgaggaaaataaaaaaccgaatatcctctttatcattacggacgaccacgcctaccagacgctgggcaccggcaataatgattcccccgtggccctgcccaatttcaacaaactgggacgccaaggcatggtttttgaccgcagctactgcgccaactccctgtgcggcccctcccgcgcctgcatcctgaccggcaggcattcccacatgaacggctttgtcttcaacggacaaagaccgctggacggctcccagcccacctacccgaaaatgctgcagaaagccggataccagacgggccttttcggcaaatggcacctggaatcaaatcccaccgggttcgacacgtgggaaatcttccccggccagggcagctactacaatccggactttatcagcctcaagccggacggcaaacgccagacaaagcgttttcccggatatgccacggacgtggtcacggacaaatccatccagtggctggaaaaccgggacaagaacaagcctttcctgctcgttgtgggccacaaggccccccaccgcgcctggtgccctgctctgcgccacctgggcaaggtggacacttccagcatgacgccgcccgccaacttccatgacgactatgccaaccgtccggaattcctgaagaaaaaccagcagacagtcgccaatcacatggcgatttattccgacctcaaagtgcttaaggaccaggttccggaagaaatgcgcaaaagcatcgtttcccccggttacggctgggacctgggcgagttgaaccgcatgactccggaagaaaagaaaacctggacggactattacgccaagcgcaccaagtccctggtggacggcatgaaatccggaaaactgaaggacccgaaagcgtttgcggaatggaagtggcatgcctacatggaggattatctgggatgccttctgtccgtggacgacagcatcggccgccttatggaatatctggacaaagaggggcttgcgaaaaacacgctggtcatctactgcggagaccaggggttctacatgggagaacacggcatgtacgacaagcgctggatttttgaagaatccctccgcatgcccctcatcatgagatggcccggcaaaattcccgcgggcatccgcaacaacaccatggtgcagaatatcgactacgctcccaccatcgtttctgcggcaggggcggacactccggaaaacatgaataccttccagggcgtatccctgcttcccaccgctttcacgggcaaaactcccgacaactggagggatgccatttactactgtttttacgaaaatcccggcgaacacaacgccccgcgccacgacggcatccggacggaccgctacacgctttcctacatctggaccagcggcgaatggatgctctttgacatgaaaaaggatcccatgcaaatgaaaaacgtcattgacgatcctgcctacaaggctacggtggaacagctcaagaagcgttaccacgaactgcgcaaaacctataaagttccggaaaacagccccggaggcaaaggaacgcctatccccaaattcgacgcttcctggtaaaagccacacgggaaactgcctttccaagcgccggtttttccggcgctttttttattttcgtccatagcaggccggagagatccgtcacggaggccgaaacaggcaaactccccttccgcacacaaccgtccatcaaccgtaaaacccgcggaggggtctcaagcccgccagcttcatcaatttattcatggctttttcatacaggaaaaacgcctgttgcatgcagcaaagcacgggcattaagggatgctccgctttctttgcgccaagctcttccaaaaaccggtccgggtccttgtcgtcaaaaccgggatgccgctcaaacgcccggcggccttccagatgaatgacgcccttcccggaatacaggcagtccagatgatgttgcgccgccacgagagacagcagcgtctgatcgtgcgtatgagctacaaaattatcgcggcaacggctctcttcttccgtagtggcggaagacaccaatttgaactgacggcacaaatccatccattcacggagaattcggaggctttgttccgattttttcaagaaaaggaaggagccctgaatcaggggagcctgttcaaaatacccgctatccagcttcaattcatcaaaaacgctctgcttgcaccaccgcgtaaggcctcccgtataataggaaatattcacgcccggcatcatatcctgccccttctcccggagccattggacaaacggctccaaggaatgatggaaaagcctccccggcgggcgccccgcatccgtataaagcaggtaatccccttcctccaaatgttccagctccttgagaatgatgaagggtttccatacccaaaacccggcgccctgtaaattcgggtcaaaccatggaatagcttccctgattccttccctctccaggcgattaagattccaacaggacaacgccactgaggaatccgccagcctcaggctcatcatctgcatccattgccgcaaatgatagccgcgggtcgcgaaagaacaataacggatagccatactcccagattccggtggaaaccatgtccctaaaaacgggaacacatcttctgcgtccgtacctataacgagttgtaaatccgctgtcaatggaaaactttaacggagaatcatctccgtgcatggaaccacggattgaaacaggatttttttaattaccaaaaaaccattcaacacgataagttatttatagttatctttttataactatatctaaacttttttaaaaacaggcggatttacaatcccccgttcaaatacaccacaatgtccagaatttgacttatccccgtggcatctgctccgctgccagccttttatccaaatcaagagccgcgccaatggccgcatccatattgtagtattcccactccgcaaaacggcctaataaataaatgcctttcggttccaagcgctcctttagttcccgtatgagggttcggctggaagcatcctgaacgggataggtatattcttcccagtgatgggccagatacacaggggaaaagggaataagctccagctggcgcctgatttccccttccgtcatttgctcggaaaattcaatagtcgcggtggtgatgtccccgttattattatttctggaaaaattccccgtgcaaatgatccggtgggaacggtgggacggagagggcatgtaaatccagctgtaatcattgggggaaatccggcaaagcacggaagtggttccgtgagagcgcaattctgaaatccgggggaaaaacgggcgcaattcatccacgcaggggaaacaatccccaagctgcctgacattccccgtaaagacgactctgtcaaacaattctccctgcacgagccatttcccgtccttcgggaggatatttacagcttcctgccggtacctgaccttaaggccgcgagccagcgtatccgccagaaactgggaaccgccgtttttcgcataaaagaaagaactgtgcaccatggcgctttcattgatgtgcccaatattgttcaacaggatttccgccacgctcggcatgggaagcttgtcttccagccaatccatggcaatttggctgatatcctgcctccacactttgttattgtacggcgtgaaataaaggttgttcagggtttttccgaaacggttcagaaaaaactcacccagggagcggggctccgcgggaggattcctgtaaagttccagcagctcatggacgatggaggaacggacggcctcgggaaactggtcgaggtggttctcaatgggataatccaccacatccccgccctccagggaaatgacagcccgtcgccgggcggaaacaaaatcgcgctccctgtcaaaccgggaccaaaaccagtccagcacttcctgccgccgggaattgaacacatggccgcccacacgatgatacaggttcccctgtacttccgtgcatttaatcaggccgccgggccgggaacccctctcataaacgaccacctcatgccctttcttcagcaacattccggccatggacaatccggaaaccccggctccgatcacagcatatttcatcatgggataaaaagaccaatttattgacgccactatctggcgaagcgggacaatttcacgggatggagatacaggtattcctccggaaaggaggcaagcagcttgccgaggtctcctccggaagaggacacgagcccgtcaatgacggcattcatggcttcaaagtgttccggatcctggggaaaccagacgtttcccgacttgtactgagtgtcctccagcgtagccagctttgttccgggaagaagctgcaacgccgtgggaatggccagctccacaaacatgttccatgcggagaacacttcaaggatacggcagaaatcgtccaatttccctttcggaatgcagacaatgtccgaatatccgaaaacgacaggataggaataccggtattttttaatccggtgcttccagtaattcagcagatgccataccctgcccttcaacactttccaattcgcatgaatccccccggagctccatttgggcagaaacatgcgtacgcgcgacaattcatcatgccgcatgaggttcctggattttaaaatccgcctggcctcctcataggacggaacgttcctgttgacgctttccgcatcaataccgggaggggttatggaaaaatggtgggcttccgccgttccccggtaacacaccggaagagaaacatccacaaaaccgtcaaggtaacacgtatcctccccatggattcccagcagggacggcgttgaaaattcgtcaaacctgggatttaaaagaagatcgtctccgataataagaaaataatcgccatccaaccgcctgattctttccctggactgcaaaatataattatagaactggaaagaattcccgaagacggaacatacgtcaggggcatctcccttgtagtagggcattaattgaagcaacccggaaaagcgtcttgaataaagctctctgattaccggaatgttacgttcatactgatggttgaacaacacaacaagagacgttttccgggaagaagtatccatggccgtttgatgttgagaaacaaaccgtacccttcaacataaattattgaaaaaaagggatttgctctctgagtgcacgcacagtaaaaagagtgcggggcatattacacggattccaaattcgattggggaattccaaatccgctgtaattaaaaagagattgcgtgcggttgtttctgcatgacaggagagcctcttcgcagaaaggaaataaaactgatgatcaataattttctttgaaatacggactttccggcaggtatggatgtttctgccggaatgggaattgatggggttacccggatggaatcatgaagacggaagatcccggtcattggggaagcttattttcagaagttcctttctttcaaaatttaaccttgactccggatttggaattcgttatttttagacagtttaaaaaaacttaaactgtttattcgatttcatgatttcagccattcttctttgttacaatcagaaacgttttatcaaggaacagttccgggctattttaaaacaggattatccaggagaatgggaaataattatttcggacgatttttctcaggacggttcttttgaatgcctggaagaaatggtggaaaaagagggagaaggacggcgtattattctccaccgtaacgaaagcaaccggggaattgcagggaatttgcaatgtgccgttcatttgtcccggggggaatggattatcaagtttgacggcgatgacatcgcccgggaagacaggatttcctcgttggcgtctctggcggaacaatatcccggtcatctggtttactgccattcttataatgaaatcgatgaagatggacaacccgcctatggacgcatgctgccagactcagattccgtcgtcgtcaaaccttacagggaatgtatttttgacatttcccatgtttacagctgttttggcggaaatgccatgtaccacaggtctttgttcagcgacttcgagtatttgccttcaggtcccggcatttcggacgatatgatgctgtccatgcgcgcctatttgaaaaaatcaggcatggtcgcatccggcaaacggtgttcgtactatcggagacacaacagcaatatctgcaattttaagagcgggaaccccaggacaaccctgatcaagagatcggaattccagataacaacctggataatgatcatgaaagaggtatacggaaagcataagtccggggaaataacataccaggccgccgaccgcctgatgaggctgattcaggcggaacagagaaggctcctgctcttcccctatgcttcattcgataacagccttcttaccaaactcaaatggttttggaacatcctgcaatgcaggccggggctttggctggtcagcattccaagattgctcccgttttgcctgctgcaaaggtatttgaacattaaagaccggataaaaagtcttcctttttttcactaacagcagggatcctgcataaaaaacaggaagaaaaataaacgtactgataccctgcctccctcccttccatcatcgggaaaacaaaaaagccgttccgccggacaggcctgcgcggaacggccgggaaaagaaaaccttgacaaggttaatacctgtaaaagtccggcttgtaaggaccttccaccggaacgccgatgtagtccgcctgctccggacgcaggacagtcagcttgcaccctatcttggcgaggtgcagccgcgccacttcctcatccagcaccttgggcagcacttccacgcccacggaacggtctttacgggtattccacaattccagctgggctagcacctggttggcgaagctgttggacatcacgaagctgggatggcccgtagcgcagcccaggttgaccagcctgccttccgccagcaggtacaggctgttgccggacgggaacgtgtagcggtccacctggggtttgatgttaagatgcctgatgccgggatacgtctggagcttgtgtacctggatttcattgtcgaaatggccgatgttgcagacaatagcctggtccttcatcttttccatgtgttcgatgcggatgatgttgcagtttcccgtggtggtcacgtaaatatccgcccagcccagcgtgtcttccaccgtcagcacgcggtagccttccatggctgcctgaagggcgcagatggggtctatttccgtcacgaccacctgggctcccatgccgcgcagggactgggcgcagcccttgcccacgtccccgtagccgcagacgacggccactttgccggcaaccatcacgtccgtggcgcgcttgatgccgtccacaagggactcacggcagccgtacaggttgtcaaacttggacttggttacggaatcgtttacgttgatggccggaatcagcagacggccggctgcctgcatctggtacaggcggtgcacgccggtggtcgtttcctcggaaacgcctttcagctcgggaagccagcgatgaaaaatacccggagtcgcctcggcaatttttttcaacagagccttgatgacttcctcttcttccgattccgacggggtatccacccagtcggagccttcttccatttcatacccgcggtggataagcagggtggcgtctccgccgtcgtccacaatcagctgcggccccagcccgtccggaaagttcatggccttccacgtacagtcccagtattcccgcagcgtttcccccttccaggcgaaaacgggggtgccggatttggcgatggcggcggcggcgtggtcctgggtggagaaaatgttgcagctcgcccagcggacggaagcgcccagagccgtcagcgtttctatcagcacggccgtctgcaccgtcatgtgcagggagcccatgatgcgcacgccctccaggggtctggcggcagcgtacttttcgcgcacggccatcaggccgggcatctcatgctccgcaatatccagttccttgcgtccgaaatccgccaggccgatatcgcgcaccttgtattgttccgtttctgaaaacatgtctgtaagcgttgtcgtaggattaatgaagaagttgtttcaggaaggccaggcgcgtttcgtccagctgttcccagggcagttccggattagtgaaatgcccgtagtgcgtcgtcttccggtaaataggctgaagcagattcagctgtttcaccatatccgcgggcttgaaggaaaagatgttttccagcgcattttcaatggatatttcctccactttcccggtaccgaacgtatccacccggatggaaaccggagcggggtagccaatggcgtaagccacctgcaattcacatttgtccgccagtccggcagccacaatgtgcttggcaacccagcggcacatatacgcggcggaacggtccaccttggacgggtctttcccggaaaaggctccgccgccgtggcgccccatgccgccgtatgtgtccacaataattttgcggcccgtcaggccggaatccccgtggggaccgcccacgacgaatttcccggtggggttgatgaaatattccgtcctctcatccagaagctccgcaggaagcacatttttaatgagtttgacgcaatatgagtaaatcgtgtcatggtccacgtcttccgtgtgctgggtggaaataactacgttttcaatatgcgcgggacgcccgtcttcgtcataggccacagccacctgggacttgcagtccgggcgcagccagtccacatgcccgcgcttgcgcctcctggccagctcaatgagcagtttatgcgcaaacacgatgggggccggaagcagctccggcgtctcattcgttgcgaagccgaacataatgccctggtctccggcgccctgctccgcatggcccttgccctccgcctcccgggcgtccactccctgggcaatatccggggactgttccgtgagcaaattcgtgaaaaagacggtatccgcatggaaaacgtcgtcgtcctgcctgttgcagtacccgatctcccgaatggcctggcgggcgattttttccggatcgatcaccgctttggtcgtcagctctccggcaatgatgaccatattgctcttcaccaacgtttcacatgcaacgcggctagttttgtcttgagccaggcaggcgtctaaaatagagtcggaaatgtagtcggccaccttgtccggatggccttctccaacggattccgacgtaaagatgtgaggggtgtttctactcatatcgataaatctcgatgtgttgatatattattccgctatgaagtcaaccctaaaaacgctcaaactcctggcagatcccacccgcctgcgcatcatcaacgttctgaatgaagaatccctgagcgtcgcggaacttcaggaaattctcggcatggggcaaagccgcatttccacccagctggcccagctccggcaggaaggggtggtggaggacgcccgttccggcaaaaacgtcttttacactctttccctggcaggtgatctgcacaatgtagccctgaaagcctgcgaggaattgccggaggcggaaacggacaaaaaagcccttcaggttatcctggacaagcgcaaaaaccgcacccaggcctattttgacgaagtagtgtgccgtctgggcaagaactacgcgcccggccgttcctggaaagcgctggccggtgctctgctccgcattctgaactatgacgtagtggcggacctgggagccggggaaggtttcgtttcccagctcatctcccccagcgccaaacaggtgatcgccgtagacaactcccccagcatggtggagctggggcaggagctggcgcgcaaacacgggctggacaatctggaataccgcctgggcgatatcgaagcgccgcccattaaacccggcacggtggatctggccctgctcagccaggccctgcaccatgcgcaaaagccgtccagagcgctggaagctgcgtgggatatcctgaaatccggcggttgcctggtggtgctggatctgctccagcatggacaggaggaagcccgtgaactttacgcggaccgctggctgggcttcacgcccgccgccctggaaagcatgctgaaggaagcgggattccggaacatccacacggatattgtggacagggagccggacccgccccatttccagactctgatggccgccgcctggaaaccgtgacgtacagccgtcttaatccattttccttccggaatagccggagcggactttccgacatgcctccacaagattcctcacggtaccggcatgccatccatgaaaagccgctacatcccggaaaccctgtcttccggaggcctttccgccggaaaggggcggcttccggattgcagggcttcccgcattccccggacaatatccatcatctgtcctgcagacagctcctccttaccctcaatttcctcatccaccagcgctttcatttcctccagcagatgctccggctccagacggtaagtaagcagcacccggaacagctctcttccggcagcctgcagagggaccgcaggaaaatccgcgacactattcaaatctttttcttcaaaggaattcaggagctttgcataccgcaggaaagcgcacttgaattcccctgggcatccgcccatatccactgaagccaaataccggcggaaggaaatctccgccgccagatgcacggcctcatcccccgtggattccgccagccacgtttccttttgcttcagatgcacaagcaggaggaccttcctcatggcttccctctgtctgcccttggggccacttttcagtttgaccaggtccaaatccagatccgcggcatcggggctcgctacatcctgggcgagagacacacccagggaggccgccattatgacaaacggcagccacctcctcatgcattcccgaatatggaccattgcggtcagccattacatgaaaaacgccggaaaatcaacccaaatccagcgcctccggcatgaagaaaatccatgccggaatgttgtgcccgcccagaggaacacccggaactgcagatcattccgacataagctccatccctccgttttccaagcgttccgggcgggaaaagaaggaaaaaacgatgtccgcacccgtacccggctgctggccgggaaggacggcttcatgccagccggagagattgacggacacacgggcatatgagaaaaaaccgtctatgctattcgcagtagtgattttcctttccgtggtcgtgctcggtgtcattgccgcgctgcgtttcaccaaaggcatcattcccctgcgcacctacgaatcccgggaactgcccggcttccccggcccggcgggattaatccaccgcctggacggtgcggaaaaacgccagcggaaactggagaaagcccggtttcccggagtggatgaaaacggattcatcagccttcctccggcatgggaaggcaaggtgaccgcaggccggctggcctgcgtagcccatacctgggccatgagcagcctggtccgggaagacccggaggcggcaaaagcccgcaaaaccgcctctgcgcgcgccacgatgattccttttttcacagctcttatcctgctgggaatgctgacggccggactgttgaaattccagatcgcgctggccatcgggctggcctgctgggcctttttcactttctccgcccttccctcccagttccgcgaatggaaagcggcggaaatagccaaatcagggctaaaggaagccgggctgtggcccgtgctgccttcggacgccatggctgtggaacaatgcctgaaagcgttgtcatggtgccacgtggcaggcttccgacgcattctgcccagatagcggtttccccggcgatgaagcgcatttttccggtcaaaccggcctttgggagaaaaaaatcttgaaacggggatgcgtgtaacccactctttcatcgtcgtcaacttttccttaccgtttccatctctccatgaatgagtccgcaaaccccatcctcaaatatttttcggaattcaagatcctgaaaaccgtatccaaggatttctggcttaccaacgtcgtccagttcttcgacggaatggcctatttttccatgattacggtattcgtcctctacctgacagactattgcagcttcaacgatgcggacgccgccctctgggtaggcctgtacacccttttcatctccgccttcgtcttcgcggtgggttccatctgcgacatcatcggcatacggcgcacttacctgatcggcttcatcatcctcattgccgggcgccttatcatgggcttcggtccggacctcagcccaaccgtggactccggaaggctggccgtcatggcgggcattctgattatgtccttcggcacggcgttcatgtcccccgtcatccaaacttccatccggcgcttcactccgctgaaagcgcgttccacgggcttcaatatctactacctgctgatgaacatttccgccgtcatcgcgaacgtgttcctgattgaatttttccgcaagcacttcggcgccgtggacggcggatactggattatcaacttcggaacgctgatggtgctgctgggctgcatcaccacccgttttattaatgaagacaactacgcggaacccagcgaacgggaggcgaacatcaatgcccccctccgcagacctctccagctcttcatggaggtgtggaaggaatccgccttccgcaaacttatcctcttccttgtgctgaccatgggcgtgcgcatcgttttcacgctgcaattcctggtgatgcccaaatactacgtgcgtacgctatatgacgactttgccataggctccatcaatgccgtcaacccggccatcatcgtctccggcctcatcctgctcattccggtgctgggccgcttctctaccgttggtctcatgattgcgggcatgtccatctccgctttctctctcgttttcatggccattcccattgaatggtactacctggtgcccggcattgaaacgcgctctcaggcgtatctggtagccattgtggcgcagatcctggtattcgcattcggggaactgctcttctccccccgcttctccgaatatgtggcgcgggtagctccgaaagacaaagtggcctcctacatgtctctggcggcgcttcccatgttcatcgccaaacccatcaatggcatcatcggcggcctgctcgtcgcctacctctgctatgacggcatctgcgccaagatggataccgggcacatcggcttctgggactccccggaattcatgtggaccatttacctggccatggccgtaatcagccccatcgccattatcatgacccgcaggaccatcacctcggaccatcccgaggaagacgcggcatcgccacccatcagcgccattgaagcggaaacggatcccgccctgacggcggaagaatttacggaagccaactcctga

SEQ ID NO: 260 - DNA, 15116 bp, unidentified
  source 1..15116: mol_type = unassigned DNA
atgactttttcagagtttgtcatttctgtccgcaggaaacttaaactaagccaaaaacaattggcaactgcaattaatgttagctactcaactattaaccgttgggaaaatggtcatgttgtaccaagcaatttggcggtaaagagtttttatgatttttgcgaaaacaatttcatcgatgttcctgatggcctgttatgacactgcttgccatttatcattggaaatattaggaggtaaataattatggcaagagcagatttgttatgtgaattaataaaatacggtttaataaatgattctgcgagttttaggaaagccgcagaagcattatgcgcagaagaacgtgcaaagcagcacactgtacttgcaacaaaaattgatgaattattaaaaaattcgcgcagaccaactgcaaaagaaaatatgacttcgccagcgattattcgtggtggtatgaatgaacaaagcttattttccgaaaaggtccctcgaaagagattggaccatctaattcttccagacaatgttcggtcagcttgtcaagatttaattatagagcaaaaccgttctgatttgctgcaatcatatggaatagaacctagaaataaaattttattaattggcccacccggaaatggtaaaacctcgttggcagaagcaatagcagaagcgttaatggttccactccttacggttagatatgagagtatcattggctcctatctcggcgaaacagcatccagattatcgaaattgtttgagtacgctaaaacaagagaatgtgtcctgttttttgatgaatttgagacattgggaaaagaacgtggcgatgttcatgaaacaggtgaaattaagcgagtcgtaagttctttactgatgcagattgatgctcttcctagttatgttgttgctattgccgctacaaatcatgatactctgcttgataaagcagcatggcggagatttcaaatccggcttgaaatacccagaccaacccgaagtcgtttggaagagtattatcgcttttttgaaaaagaaaaagattttaagtttggcctgcaaccaagcacactggctaagaaaactttaggtataagctatgcagaagcagaggaattcgcactctcagtttatagacagtatgttttaaatctgccaaatgataatgtgaaagagattactgagagagcaattcatagttggcaatctcaagtgatcgtagcacataaagatcagaaaggagtagaaacatgccagatagacctttaatactgtttccgtctccagagcatgcggatcgtgaacacaaaactcctgtttttaccagaaccattaaaccatctttcggaaggcaattcattagattacagccatcctttagtgtgctcaaaaccgcttttgagaaaaaggcactgaagattcaacagtctccaactggaattaatcctgagtttgcattggtttttgaaataattggaacggtcgatagtttttataccgcagtcaagcacactgaaggttttgaatggatttttgatagcgaatctgatccgtttgaaccggatgatgatttctatcaaatcaataaagactctgggcaaagagttgatgattttctaaacggaaagctatattgcgtaatgtccaaccagcaggcaatgcttcaattactatcattgtggcaaagataccaaaatggagaggctgacgtattcaagagaaatttcacgggactccgtgatatttttactcacataaagaacataaggaaatgggaggcacaggatagaattgcagaaacgcatgctgtggagtactggcgtgagtctttggaattcgacggtaattctcctgtgccatttgaaatcgaattattttttagaaatgatgcaacaaaacgaaatattgctactgaaactattcgccgagaaattcaatcattaggcggtcgtgtgattcaaaattgtataataagtgaaatttattatcacggcatgttagttgaacttccgagaatttctattgaaggtttagttgatcgatacgaagaaattgaattatcgcaggttgacgatatcatgttttttcggcctacatgccaatctgtgtttgtttcgacaactgattccgagagttatgttgctaacgaggaagatgtaccattaccaaggggggatgctgttgttgctgtttttgacggtatgccaatgcagaatcaccacctactacgtggacgagttatcattgatgatcctgatgactacgcttcgggatatgaaagcaaaaatcgcattcacggtacatcaatggtatcacttgctatttacggcgacctcaagagaaatgatacccctattagtagtcctgtttatgtgcgtcctattctccgaccaaagcaaagcggatttgataaagtaacagaaagtgttcctgatgacagcttatttattgatgttcttcatcgggctgtaaggagaatgatggaaggcgatggcgaggaaagcgcaactgcccccaataccaaagtaattaatctgtccattggggatcctgttcggcaattggctgtcacaatgagtccaactgcgcgattgcttgactttctcgcttataagtacaaaattctgtttattataagcgctggaaatcatccagaggtcgtaaactttgtaggcaaatcattcgacgagctaaaatctcttgatatgatacagcgaagcaaagtttttggtggaatcattaaggataaccaacgcaatctaaaaatacttgcaccagcagaaagtttgaacggactgacaattggcgcactatatgatgattttacgaatacaaatgaaacagagcgtcgtattttggctgtcgatagagggctaccttcccctatatctgcaattggtaagggctatcgctctgttattgctccagacttgttttactatggtggcagagagttcatcaggggaaaacataatggtgaaatcgactgggtagaatcttcgcgtgaaccgggatgtttatctgccgctccatatgggacaggcgatatcgatggatgtgctttttcatttggaactagtgatgccgcagctcaaataacacatgaagccgccaaatgccatgatgtacttgatcaagtttttcttaaccaaacaggtactaatatgccagttgattctaccgcaatccttttgaaggcgatgcttgctcatggtgcttcatggaaaccaattgccgacaaactcgcccttaccatgggtgcttcaccaaaacaattaagtaagtggctcggaaacggcatacctaatataaaccgtgttatagagtgtactaaagaacgcataacacttattgggcttggtgcactaaagaaagataagggagatatttttaagctcccacttcctgtggatttttcaactcgattaataaaaagaaggctaaccgttacattatcctacatttctcctgttgtctcaaataagcaaacatatcgcggtgcgcaactgtggtttaatattgatgacggtggaaagggtcttgtccccgaccgacaaaatacggaatggcaagcagtccgaaagggtactttacaacatgagatttttactggagaaaattcaattgtctggaatgatgatgaccttatcataaaagtgaactgtaaagaagaagctgccaaaattaacgaagcaataccatactgtctatttgttagttttgaagtagcagaaggttttaatgttgatctgtatgatgatgtctctgcaaaaatccaccagcgtgttcagatttcaaataactaagaaacggtagtactgcggacgaaccgatgaagctatacctcagccttttggtattggactttctgttctgagtttcggtttggtttgtgatatggtcatttatctacaatataaatcatatcgcattagcacactttggagtaagttatgtatcgattgctcttattttttacaaaagtcgtgctcagttacccgttcgtcacaaaacgtgattacgacggtatgagaattcaaatgtcacctcccagacgaaaaattctttcagttgtattagttttatagtgcgctatattgcttcgtagtgaaatgcgatttattcctctagatatcgcccttcaggcagtttcgtgtaaatataatattgctcatacaaggcagagcaaaagctaaaataataacgatgaagtttttaattatttctgaattcgctggttctaaactaccataaaaatcggcaaaaacatctttttatgctcaaccttgacagaatcataaaatccgaacatcaatcggtgatacgttcggatttttgatttttattaaatattactacataaataataatagtgatttgcaaaaaatataaaaaattcataggtaagtaacatattgggtgtcgtaaacaattaacattcgcatataatatatagaaagttgttgacataacacgctgatagtgttacaataattgcattattttagaggagagattgttgcagattaaatttgcaacattacagagatgagtaacagattaaaaacaagtgaagaaaattttattaatttaaataacgctagtattgttcttgagagtctagaatcgcaagagaagggatttcaggagcaatttttgactatggtacagggcaatacttttggcggagttgatattactgattctaacatcaaaaacaactcacgatttatcatagatctttgggattgattataaaatgtcggataagaaaattaaatcagtcaattgtatgcgaattgactatgttaatataaccaacggggatttttttacaaaaaaacgactttctaaatggcgcatattcattgctaaatgttgcttggatatatgtgaaggcttaatagcaaaggtcgctccggaaaatcatgtgtcatattttttgagtgaatcactactaaatgaagtggtgggagatgctgtcattggcatgtcaaaaataattgataagaccccacaccctgtagagcatccaaatgcttttaaaatagcggcatatttaggttattggtttttaaggcataaacctataagtatattatatcctgatgaagttgacttagacaatattgatgttgcctcagggtgtaatacggatgcaaaatatttaagttggcaactcaagcatattaatgaagcggtggccgtaaatatggttacttcttttatttttgattttgacaaagaattgtgtacaagcgctcaatgtaaaaaaataaaacagcacaatacgtatgaaaaaaaaccagcctttggatttgatgattttaatcagcaaaggcaaataatgttacaaaagatgatgtattacttcgtatatagggccattgctcccaaagtgatagaacatatgcttgaggggtatgcttttcatccagcgtggtgcttaacaggtgcacattggaatactaccatattggatgatattacgcaggcaactgagaattgacgagggttttttgtggataaaagtaaaaaaataggattatgtattatcattggttttgctgtattaggtattgctggttcatcagttctgttttttgtcgaaccgcataatggcattgtaagtattatttcgttgtggtctggaattatcggaacaactgcttctgtagttcttagtgttgtagcaatggtatattctaataaatcatcccaagatgccgaagaaagtttgaaaaaagttacagatcaatataaaattttatgtgataaattaaagagtgaggaaattataaaaactcttggcaagcgtggaatagagaagatcatcgaaaacaatcaagacaagtaagtggttatatcaattagaacatagcggggctgtcgcaaatgattaaaatttgcgacagcatctttcagttatatcgcctttggtgagttatatcgtttcgcagtgctatacggcttactccgtgtgatattgcccttcgtgcagtttgggcgaatataatataacttaggcaaagcataaatattaactttcacaaagtgaaaatatcactctgccttagtcagaataccacctatcaccatgatatttattttctctggttcgaaactaccataaaaattgccaaaaacatcttttttgcacaaccctgacaagcttaaaaaacgccttaaacattgaagtttagggcgtttttcttttgcgttcagcagagataaaacccctctgaaaatctgtttgtctaacataacgctaactaagcaggctcaatgtcaatagttgggataacccgaaaaaacgaaatatatgaaaattaggctcaatgtcaataaataggggtaccccgataaaaacagagccactgcatctaattcgaattgttttgtgctgtttagatacctaacattagcggatatatttccgcaagatacagccaagcatttgcagcagttgtgcgtataatttaaactgctgcaaaagtcatcaaacaagccgttttttaagccgttcgcttatttccttgacatcaaaactacagtttcgatgtggcacggttgttcaacgaaaaacatactcaacccctattgtacaagggaatggcggaacgcacctttttccttaaaatccagtggttcgagcctgtgacaaccttgaattgtcctataatttgtataggcaaacagggtaaagctctgttccttaaacttcatttttcatgtcatccatacaaattggaagttgcacttcctcactcgtcttcttttttattgtttctactaatattcgagcttaacaataaaattccagagcataaaaataatacccaaattataatattttcttgatttatcgcattataaatcaagcatattatgcttaatataatctgtacaattgaacaaatcactcctattttttgtgtctttttatccatcattgtctcctccataaattccgatttatctaatttctattaacatctatttcactgttcatgaacccctcaaaacggtcgaattgcaggattgcctgtcagctttttgttctataaaattctctccaaacaccctgacatctaatccactcactcaatttgcattatctaatccgaggttacaaccttgaattgtcctataatttgtataggcagacagggtaaagctctgttccttaaacttcatttttcatgtcatccctacaaactggaattgtatcatcatttatctttatctttttttgaaaaaataagactgccggttataccaaaagatatacccagacatattccgattccaattccagccatgctatttaagacatttataaaaacaacactccaaagtattgctgcgattattccgatagtgactcctataattatcctcttgttgttcatcagctttatcctccataaattccgatttatctaatttctattaacatctatttcactgttcatgaacccctcaaaacggtcgaattgcaggattggtcgtcagctttttgttctataaaattttttccaaacaccctgacatctaatccactcactcaatttgcattatctaacccgaggttacaacctgaaagaaattttgcgttggatatgtttcgataagatatacccgagtgcttttgatggttaaatatataattttagatttagaaaaagtcatcaaacaagccgaattttatattgcttaattattttcttgacatcaagactaccgtctcaatgtgtgcggtgtggggaaacatatctacgggttggattttttgggctttgtaggggctgttttgggttaggtaggctaaatctcttgccaatgtttcggggttgcaggaaacatagacaacctttttcggagacattttgattagtgagtcgagaaattttcggtcacttccggctcttggcggatccatgaacacaacatcgggcttttcgtcctcgtctgcagcttctctcatgaactcgcccgcatcggctttgtagaaacggatatttttcagattatttgctcttgcatttacgattgcatccctcacggcatcgccgttaagttctgcaccgataacattgcctgcgccgtttttggcggcaattatgccgattgtgccgattccgcagtaggtgtcaagcacggtttcgttgcctttgagatttgcaaattcaattgctttgccgtacaaaacttcggtttgaacggggttaatttggtaaaagcttttcggcgaaattctgaacctgcaaccgcagagaatatcctcaatataacccttgccgtacagcactttctgattgtcaccgagtacaaggttggtgcggtaggggtttatattttgcacaatggttgtgatttcgggaaactgtttcagaatcgcttttacaaaattgttttttgacggaaaaacaggtgtacctgtcacaagcacaagcataatctgatttgtcgcaaagcctcttttcacaagaatgtgacggagaaaacctttgcctgtgtcctcgttataggttgtcattctgaaagaggggaggagcttgcgtactgcaacgatgattttgtcggcaataacatcctctgtctgacagctgtcaattccgacaacatgatgactgcccgactgatacacaccagaaatgattttgccctttttgtccgtataaaaagccgcctgaaccttgttgcggtagtggtagggagttttcattccgataattttttcaacggtgcaaaagcgtttgagaagtttttcgactttcttctgcttgaattcaagctgttcgggatatgacagattttgcagttgacaaccgccgcattttttgtaaacgggacagctttgtttattggtttcaggtctgttactcataatatttcctcacattttattgcattgtatatatcctttattttatcatcaatcatattgatatgcaacagaaacaaaccctaaatgacaaagaaaaacgcaggagggaaatccgctcctgcgctttctgattattaaccggtatatcgaaaaattgaggattatcaggttatttgtaatcaattaaagatttgtgtatcccataaggctttcgtcaacctctttggcaacatctctgccctcacgaatcgcccagacaacaagtgactgtcctctgtgcatatcgcctgtaacaaatacattttcaacatttgtcttgtgtgagccttctgccgttgcaacattggttcttgcgtttgtttcaacaccgaatgccttggttacatagttttcactgccgaggaatcctgccgcaatgagtacgagttcaacatcaaccttgtattctgagccttcaacctctttcatcataagtctgcctgttttagcatccttttcgggtttaagcttaacaagctccgcacctacaagattaccgttcttgtcagcaatgaactgcttaacggttgtctgataaactcgtggatcgtgaccgtaaacttcaatagcctcttcctgaccgtagtctgttttgcagactctcggccattgcggccatgggttatcggcacttcttgtgtcgggaagcttaggcatcatttcaagctgaagaacggattttgcaccgtgtctgatgcttgtgccgacgcagtcgttacctgtgtcgccgccgccgattaccattacattcttgccttttgcgctgatgaatgtaccctctctgaggttgcagtcaagaagtgactttgttgttgatttgaggaagtcaacggcaaagtgaatgccgttagcctctctgccgggaactttgatatctctcggatttgatgcaccgcaagcaaggattacacggtcaaagtccttgagaatttcgcttgccttgatgtctttgccgacatttgagcaggtttcaaaggttacgccttcttcttccataatgttaatcttgcgttcgataacatctttttcaagcttcatattcggaatgccgtacataagcagaccgcctactctgtcattgcgttcaaataccgttacagagtgaccgcgctgattgagctggtcggcagcggcaagtcccgatggacccgaaccgatgattgcaattttcttgcctgttcttacctttggaattcttgcgtctgcaagaccttcttcataggcattttcaatgattccgtattcgttggctcttacgctgacagcgtcaccgtttgcaccgcaggtgcatgccttttcacagagagcaggacatacacgggatgtgaattcggggaagttgtttgtaactttaagacggttgtaagcctgttcccagttgcccttgtagatgaggtcattccattcgggaatgaggttgttaagcggacagcctgagaatgcagaaccaatctgcattcctgcctgacagaaaggcacgccgcagtccatgcatcttgcaccctgtttttgctgatcctctttgctgaggggatcgtgaaattcgtcaaaatttttgattctttcttttacggagtatgccggggcatcctcacgcttatattccataaatcctgttggctttcccataaatatcccctccttatttattattcacaatttcgtagaaagcttcaatctgtgcctgctcgtttgtaagacctttttcttcataagcggcaattgcagccatcattctcttgtagtcgtgcggaataatcttcttgaatttcggaagatactcgtcaaagttatcaaggattttcttgcctctctgtgaacctgttgctgcaacatgttcttctataagcgttttgagttcgattatatcgtacttttctgttacctcagagaagagaaccatttctttgttgagctttgtgtaaagatctctttcttcatcaagaacataggcaacaccgcctgacatacctgcggcaaagtttttgcctgttttgccgataacaacaacccgaccgcctgtcatatattcacaaccgtggtcgccgacaccctcaacaactgctgttgcgcctgagtttcttacgcagaaacgctcgcctgcaacaccgttgatgaatgccttgccgcttgttgcaccgtaaagtgcaacattaccgatgatgatgttgttacctgcgtcaaatgttgagttcttcggaggataaactaccagcttaccgcctgaaagtcccttgccgaagtagtcgtttgagtcgccaacgagttcaagtgtgagtccctttggaatgaatgcgccaaagctctgaccgcccgaaccgttgcagactactgtaaatgtatcgtcatcaaggttgttgtaatgctttcttgtaacctcagaaccgaagattgtaccgaatgaacggtctgtgttcttaacattgacttcaacctttttctttgtgccttttgcaagaacctttgcaaattctttgcagaggattctctcgtcaagtgttgattcaagtttgaaatcataaaggctctttttgttgtattcaaccttttccgaaacaaagtttgtatcaagaatgttagaaaggtcaacctcggcagcctgtcctgtgatgccttcttttctcttgatgaggtcaattcttccgacaagctcatcaacggtttttacaccgagctttgacatatattcacgaagttcgcttgctacaaacttcataaagtttattacatattcgggcttgccacagaatctttttctgagctcggggttctgtgtggcaacaccgaacgggcaggtatcaaggttacatactctcatcattgcacaaccgagagttacaagcggagcagttgcaaaaccgaattcctctgcaccgagcattgctgcaattgcaacatcacggccgttcataagcttaccgtcggtttcaataacaaccttgttacgaaggtcgttcataatgagcgtctgatgagcctcggcaagaccgagttcccacggcagacctgcattgtagattgagtttctcggagcagcgcctgtaccgccgtcataacctgaaataaggattacgcctgcacctgcttttgcaacgcctgcggcaaccgtacctacaccgcattccgaaacgagcttaacagagattcttgcgtctttgttagaattcttgaggtcgtagataagctgtgcaaggtcctcaattgagtaaatgtcgtggtgcggtgggggagagatgagcgatacacccggtgttgaatgacgggtttttgcaatccagggataaacctttttgcccggaagatgtccgccttcgcccggctttgcaccctgagccattttaatctgaatttcgtttgcagatgtgaggtatcttgatgtaacaccgaaacgacctgacgcaacctgcttgattgcagaacatctgtcaaccttctgtccttttgtgagaagtctttcaaggctttcgccgccctcaccggagtttgacttgccgtgaagctgattcattgcaatcgcaagtgtttcgtgagcctcctgtgagatggaaccgtaggacatagcgcctgtcttgaaacgctttacgattgaatcaacgctttcaacctcatcaagcggaacaggagtttctgcaaagttgaagtcgaaaagacctctgatatttacaggatccatttcttcggaaatcatatgagaatactttttgtaaagctcatagtcgcctgttcttgttgcctgctggagcatatatatagtctgcggattgtagaggtgttcttctttgccgcttctgaacttgtgtgaaccacgggattcaagctcatcgcttacaccgaggtcaagcggatcaaatgccgctgtgtgaagtttgtcaacattctcttcaatatccttgattgtgataccgccgattctgctgactgtgcctgtgaagtattcgtcaataacatccttgccgataccgatagcctcaaaaatctgtgagccctgatatgactggattgttgaaatacccatttttgacgcaatctttacgatgccgtggagaactgcgctgttgtaatcgtcaactgctgcgtagtagtccttgtcaagaaggtcatcaccgataagctcgtgaattgtttcctgagcaagatacgggttgattgcacttgcaccgtaaccgagaagtgttgcaaaatgatgaacttctctcggctcaccgctttcaagtatcattgcaagtgaagttctcttctttgttgcaacaaggtgctgatgaagagcggatactgcaagaagtgacggaattgcaagatggttttcgtcaactcctctgtcggagaggataagaatatttgcaccgtcattgtaagccttgtcagcttcaatgaaaagtcgcttaacagcctttgaaagtcttgtgttcttgtagtagagaatcgggataaccgcaaccttaaagcccggaatgtgcatattcttgattttgagaatatcggttgatgtaagaatcgggttgtgaatcttcataaccttgcagttttcgggacgctcctcaaggatgttgccgtcctcgccgatataaattgttgttgatgttacaacttcctcacggattgcgtcaatcggcgggtttgtaacctgtgcaaagagctgtttgaagtagttgaaaagcggctgcggttcttttgaaagaactgcaagtggactgtctgtacccattgcggcaattgactctgtgccgttctttgccataggaaggattgatgtcataacatcttcgtaggtatatccgaaagccttctggagtttttgtctttctttatatgaatgctcctcaaccttcatattaggaattttgaggtctttaagacaaacaagattactgtcgagccattcgccgtaaggctgttttgacgcataatactctttaagttcatcgtcatcaatgagtctgccctgaaccgtatcgacaagaagcattttgcccgggcgaagtctttcctttgtaacaatctttgcgggatcaataggaagtgcgccgacttccgatgaaagaatgaggttgccgtcattcgtgatgtaatatcttgacggacgcagaccgttacggtcaagaaccgcacccataatatcaccgtcagagaaaaggattgacgcaggaccgtcccacggctccatcattgttgcataatactgatagaagtcctttttcttctggctcattgtgccgttattatcccacggctccggaattgtaatcataacggcaagaggaagctccatgccgctcattacgagaaattcaagtgtgttatcaagcattgcagagtctgaaccctctgtgtttacaacaggaataaccttgtcaaggtcgcccttgagatgctccgaacgcattgtttcctcacgggcaagcatcttgtcagcgttgcctctgattgtgttgatttcaccgttgtgaacaatcattctgttaggatgagctctctgccagcttggatttgtgttggttgaaaaacgggagtgaaccatagcgattgcagactcgtaatcatcgtcctgaagatcaaggaagaagttacggagatcgccgacaaggaacatacctttatatacaatagttctgcttgaaagcgaaactacatatgtgtcttcattactctgttcaaaaactcttcttgcaacatagagctttctgtcgaacggaagacctctctttacgccgtgaggtcttttgataaagcactgcataattgcaggcatacattcaacagctctgtgaccgagtacctcgggctttgacggaacatttctccagccgagaactgtaagaccttctttttctgcaatgatttcaaacatcttctttgcctgatttcttgcaagctcattctgagggaagaagaacatacctacagcgtaatctctttcggaaccgagcttaatgccgatttcagcagctgccttcttaaaaaatttgtgtgaaatctggagaagaatacctacgccgtcacctgttttgccttcggcatccttacctgctctgtgttcgagagtttcaacaattgtcagagcgtttgccacggtgtcgtgtgacttgatacccttaatattaacaacagctccgataccgcagttatcatgttcaaacttcggagaatacagagtcttgttgttctctctgactgtctgttccat

SEQ ID NO: 261 - DNA, 7450 bp, unidentified
  source 1..7450: mol_type = unassigned DNA
atgaaatcatttcaaaagcttccgccgcagtttcagtgtgccgaagtaaaagaatactatgacattctctgcaaaaaacagggaagttttgttttaaagcgaattcttgatatttttgcttctgttattcttcttgtgtttctcatcattccgattgcaattattgcgattttagttaaaaccgactcaaaaggtcctgtgttttacagacaggaaagggttacaacctacggaaagaagttcagaattcttaaattccgtacaatggtaacgggagccgacaggctcggaacacttgtcacaaccgacagcgactcccgagttacaaaaacaggaagagttttgcgaaaatatcgtcttgacgagctgccgcagattttcaatgttctttcgggcagtatgtcaatagtcggaacccgtccggaggttcagcattatgtagatatgtacgaacccgaatatcttgcaacactccttatgcctgccggaataacctcgttggcatcaattatgtataaggatgaagaaaagctgttgaaaggcgagatagatgttgacaaggtttatgttgaaaaaattcttcccgaaaaaatgaagttcaatctttcatatgtcaaaaatttcagctttggttccgatataaagctgatgttcaaaactgtaaaagaagttttcagctgatttcgttttgattggagtattcagatgaccgattttaaacaaaagctcagaggatttttttccgattcatcgctttttagaagaatctacattatagatttgttttttacaaacattgcgtttctccagattcctgcgtatgtacttcttgtttttctctttatatggggtgtatgcctttcggtatataatcaaagacataataatactttttttaaactgcgcttcggaatatggatcggagcatttcttgccgtaacggtatttacgatgctcatcaatttttcacagacatttctttacagccttcttatgcttctgcacgttgtaatgtgtttttttcttttttacggaatgcacacagagcctgaatttgattacagaatagagctttatcacattgcaaaattcataatgtacgcaaccacggtaatgaacataatcggtataacctgccttatgttcggctttaaatttgaatggtactggattaaatttaccgtttacgaaaacaggttcaccggttgttatgtcaacccgaatctcctcggcttcatatctgtggtgtcgattttctgttgccatatactttcaaaagggcattttatgcgcagaattgccgaaaaaattcctgaacccggcatcagtaagatatggattgtagcctgtcttgccacaaatgcgttttcgctcattctgtgcgattcaaacgcctcacttgtgcttgctctcggatatgcaattgtttatatagtttatatgttctttgccgacaaggcgggactttcaccttcaaaaattattttgaaaattacagcgctgtttcttgtgggagttttccttacaggctctgccttgatgttcagaacgatttgtcaggaaggcttttccgttgttgtatcaaagacaacctctgttgtcgatttgcttttaggcaaaaccgaaagcgaacttgtgcaggaaggactgactcccgaacagagagaacagcttgaaaaggataaaatcaccttttcacacgaaaacaaaaacattgacagtggaagaaagaagctttggcttgaatcaatcaatcttttcaaactgtcgccgattatcggaatttccaacggaaatattgttctctacagtgccgaatattcaaacggtgctttggaatattcgtatcacaaaagtgatttgcataacggctttcttacaattcttgtttcaactggtgtaatcggttttgttcttttcggaattttcggttttcgatttgcaaaacactccgcacagcacctgtttttgcagaaaaaaacatatcgtgatgatgtttatccctgtttgtttgcttttcttttcgcatatttgatttttgcctgctttgaaaaggcattgctttatgacatatcgtttatggtggtgtggttctggctgattatgggatatatgagttgctacatcacaaagtttgaaccgacgcttgaaagtcagtatctttttcacggaaaaagactcagacgggtaacaagaacaatgctctgatgcttgtataatcggaaaatttgatgtataataaccgtaggagcgttttgcttctgcggttattattttgtgaggtataattttatgaaatacggtttcatcaaggttgcatccgcaacaccgaaaatcagggttgcagactgtaaaaccaacacaataaatattattgaacagattaaagaggcacacaaaaacggtgcgtcactggttgtgtttcccgaactttgcgtaacgggctacacctgttccgatttattttatcagcgtgttttgcttaatgcggctgaaaaatcagtagagaaaattcttaaagaaacagcagaccttgacataatctcaattgttggtgttccggttgcaattgaatcggcactctacaattgtgccgcagtaatttataagggcgatatccttggtattgtacctaaggtcaacatccctaactacagcgaattttacgaggttcgtcattacacaagcggaaaaaatctttacgatgaaatttcatatgcaggcgtcgaaaccataatttcagacaatattgtgttctgttgtgacaaaatgcgtgatttcagctttggtgtagaagtttgcgaggatttgtgggttgccgcatctccgtctgttgaacacgcaaaacacggcgcaactataatctgcaacccgtcaacatcggatgatgtaataggcaaggcacagtatcgccgtgaccttgtaaaaatgcagagcggtaagctttgttgtgcatatatttacagcgattcgggctttggcgaaagcacaacggatatggtattttcgggacagaacataatctccgaaaacgcatctctgcttgcagaaagcaagcgctttacaacaggcattatctatgccgatattgatgttcggaagctttcggcagaacgcagaaagacaaatacttttacaaaaagtgatgacaataactttacctcggtatattttgatatgccgttaaaacataccgaacttactagagagttctctcagactccgttcattccgtcaaacaaatcagatcttgatgcccgttgtgaggagattataacaatgcaggcaacaggtcttgcaacaagacttgctcacacgggaattcaaaatgcggttttaggactttcaggaggtcttgacagtacgcttgctctcatcgtctgcgttcatgcttttgatatgctcggtattgacagaaagaatattcatactgtaacaatgccgtgtttcggcacaacaaagcgtacaaaatcaaacgcacagcttctggctgaggcttacggagtgtcttttgaagatatcaatattacaaaagctgttcgtcagcattttgcagatatcaaccacgatgaaagcgttacaaatataacctacgaaaactcacaggcgagagagagaacacagattctcatggatctttcaaacaaatataacggtcttgttatcggcacaggcgacctttctgagcttgctctcggttgggcaacctacaacggtgaccatatgagtatgtatgccgtaaatgtgtcaattccgaaaacccttgttcgctatcttactgcctatgaggcacagcacagcgaaggcgttctaaaaactgttcttcttgatgttcttgacacccctgtaagtcccgagcttcttccaccagataaaaacggcgaaattgcacagaaaaccgaagatgtggttggtccttatgaactccacgacttcttcttatattatttggtaagatttggctttgagccgaataaaatatactaccttgcaaagaaatcatttgcaggaaaatatgacaatgccacgatcaaaaagtggctcacaacttttgtcagaagattctttactcagcagttcaagcgttcatgtctgcctgacggaccgaaggttggttctgtaacactttcgcctcgttcagactggagaatgccgagtgatgcgtgtgtaaatctttggcttgaaaatcttgaagaagattaagaaataaaattttgacggtgattttatgaaattgtttattacacgagatgtatctccgtccgatgtttgttttctgattcgtgatgaattgggcagggataaatatactgctgttatgaaacgcagaaagagaagtatgcgtggtgttgtcaacaacattgtaagacttaatattcttgatgagaataaaaaccttgttgcaagacttcgacagttgcccgttgcaggagtaaattcatttactctaaaaacagacaaaacagcggcaaccctcgtggtgcttatgaccaataatatggttcaatgcaggttctacggcaataattggagaattctcggtgatgtaatttcaaaaaatttcagcattgttgatgttgacaacgcacagatatgcaatcacatcaagcaccctttaggatgcgaacttgaaattgccgatgcgcaaaacgaattgatatgtttgatgaccgccttatgcgtcaatatgataaatacagttgacaagcgagaggtacaggttgtataatctatgtgcagacagttcccaccgctaaagccatgtgaactgccacagagcaagcaaataacagtgcaaacagcgcagataaatattaaaaattgaaattgtcaaagcgacatcctttgatgtcgctttttgcaaattcagcttgcaacgcaaaattttgcgtttaatatattctcagggaggaataaatatggacaaattattaaagcttttaagtgaaaattccggttttacaacagcggaaatagcggcaatgctcggcgagcctgaggattacattaaggcgcagattaaggaatacgaaaattcgggggtaatcaagggctatcaggcagtcgtaaactgggatatggttgacgacagctatgttgaggctttaatcgaacttcaggtaactcccaaaaaggaaacaggctttgacgaaatggcagaactttgcatgggctttgaagaggttgaatctctctatcttatggcaggtacatatgactttgctctcattgtaagaggggagtcaatgcaggatatcgcaatgtttgttgccaaaaagctttctacaattgacggtgtgctttcaacgggtacacactttattatgcgtcgctacaaggacagaggagcgtgcctcttcagcgatgaagagaagcgtgacgggaggcatttaattctgtgatagattacaataattttattaataaaaagatttcaacggtaaaaccttcgggtatccgtaagttttttgatatagctaacgaaatggacgatgtcatttctctgagtatcggcgaaccagatttccagacaccgtggcacatccgtgaagaaggtattaacagtctgaaaaaaggtaagacttggtattccccgaacagaggctttgccgaacttcgtgaagaaattgcagcttactacaaaagaagattcggtattgagtatgatgccaaaaagcagacgcttgttactgtcggcggcagcgaagcaattgaccttgttttcaggacattgcttgatcctggtgatgaggttatcattcccgaaccttcatttgtttgttacgaaccgcttacggtgatggcagacggcgtgcctgttattatcaacacaaaaaacgaagataatttcagacttaaagcgtcagaccttcgtgccgcaattactccaaagacaaagcttcttgtacttccgttcccgaacaacccaactggtgcaattatggaaagggaagatcttgaagaaattgcagaggtaattaaggaacataacatttttatcctttcggacgaaatttattgtgagcttacatacggcaataagaaccatgtttcaattgctgaaatcgacggtatgtatgagcgcaccattgttgtaaacggcttttcaaaatcatatgctatgacaggctggaggcttggttatgcactcggtcctgttcctgttattgctcagatgacaaagctccaccagtacggaattatgtctgctcctacaaccgcacagtatgctgctattgaggctttgcgcaacggtgacagggatgtagagatgatgcgtggcgagtatgatatgaggagaagacttgttgtggacagctttaacgcaatgggactcacctgctttgaacctttgggtgcattctatgtgttcccgtgtatcaaaagcacaggccttacaagtgaggaattctgtacaagacttattgtggacaagcatgttgccgttgttccgggtactgcgttcggcgaatcaggcgaaggctttgtccgtgtgtcatattcatattctatcaagcatcttaaaattgcgcttgaaagaatcaaagagtttcttgatgaactgaaaaagggttaaaatatggaagtaaaagttcttgctcctgcaaaaataaatctttctctcgatgttctttcaaagagagcagacggttatcacaatatttcaactgttatgcaggccgttgatttgtatgatacaatcacaattacagacaatgaaagcggcacggtgacaatttcatgtaactgtgagggcgtgccgtgcgacgattcaaacatttgtgcaaaggcggcttacaagttctttgattattgcaaaacggatgttaagggcattcatatcgacattgacaagaaaattcccacacaggcaggtcttgccggcggaagcagtgacggtgcggctgttattttaggcttgaacaatatgttcggaacaatgctcaagccggcagagatgagagaaatcggtgaaaaagtcggtgcggatgtgcctttctgccttgagggcggaacaaagctttgcacgggaataggcactgcaattaaaaaagttgcctcctttcgttgcgacagcattgtaatctgcaaacccgacacagtcagcgtgtctactgccgatgcgtacaaaaaggttgacgcactcaatcctcacgcctgctataccgatgaaatggtaaaggcactgttcagcagagatatgtttatgatttcaacaacaatcttcaatgactttgaacttgctctgcaaattccggaagttaatgaaatcaagggtattatgctcaagtcaaaggcaaggggagcaggtatgagcggttcgggttcagccgtgttcggtgtgttcacttcgtcacgcagagccaagaagtgctatgacaagctttgtgaaagctacaaagaagtttttctctgcaagcccgtttcagacggttgcaaggtgctttga

SEQ ID NO: 262 - DNA, 7637 bp, unidentified
  source 1..7637: mol_type = unassigned DNA
  misc_difference 3646: note = a, c, g, or t
  misc_difference 3647: note = a, c, g, or t
  misc_difference 3648: note = a, c, g, or t
  misc_difference 3649: note = a, c, g, or t
  misc_difference 3650: note = a, c, g, or t
  misc_difference 3651: note = a, c, g, or t
  misc_difference 3652: note = a, c, g, or t
  misc_difference 3653: note = a, c, g, or t
  misc_difference 3654: note = a, c, g, or t
  misc_difference 3655: note = a, c, g, or t
atgaagaaatcatatgcagtgatcacaggggcaagctccggaatcggtatggcgtttgcacggcagcttgcagcagaggggtatcgtctggtgctggttgcacgcagagaggaccggctacaggaactggcgcaggaattacaaaagaagggaaccgagagcattgtgatatcggcagatttgtcacaaaaagaagcctgttatcacctgatgcagcagatcgagaagctgccagtcgggatattgattaacgatgcgggattcggtgactgtggcagctttctggagacggacgcagataaggaaatgcagatgattgatgtaaatgttaaggctatgcatcttcttatgaagctgatgcttcgccgtatggagaagcaggagggcggttacatcttaaatgtggcttcctcggcgggacttcttccggcagggccttatatggccacctattatgcgaccaaagcttatatagccagcctgacacgtgccgtggcactcgaactgaaacagagaggcagccgcgtgtatgtgggggcattatgtcccggaccggtgaatacagaatttaatgccgttgcaaatgtagagtttgcactggcaggaattactccggaatattgtgttagatatgctttaaagcagatgaaaaggcgcaaagtagtgattgttcctacgttgacgctaaaagccgtgacaacctgtggaagatttataccacaaaaagtgctgattgcaattaccgcacatcagcagaaaaaaaagctcagagcagaggatatatcataagatggaagaaattaaaatcggttcccatgtgggaatggcaggaaaagagatgtttttagcgtccgtaaaggaggcagaaagctacggagcaaatgtgttgatgctctatacgggtgcaccacagaatacccgcagaaaagaaatcaaagatctgaatattgaggcaggatgggcctatgcaaaacaggccggaatccgggagattgtggttcatgcgccttatatcatcaatctggcaaataccgtaaagccggagacatttgaactggctgtacagtttctggaaaaggagatccggcgcacggctgctatgcgaagtcatatcctggtgttacatccggggtccgcgctggatgcgggtgcagaggccggaattgcacagactgtccgcgggctgaatatggtgctggatgagaacgaggatgaggtatttattgctctggaaacgatggcaggaaagggcagtgagattggaagaacctttgaagaaattaaggcaatctatgatggagtgaacaaaaaggagcggttgagagtctgttttgatacctgtcatgtaaacgatgccgggtatgatctggtgcatgattacgatggtgtttttaaacattttgatcaggtgatcggactcgaccagattgcggtctttcatatcaatgacagtttaaatccacttggggcacacaaagaccgtcatgccaatatcgggcagggaaccattggatttgagacgttgcatcgtctggttcatgatccacgttttatggaaattccaaagattttggaaacgccatggctttgtgcagagggggagacaaaaaagacgattcctccatataaagaagaaattcaacagcttcttgcaaaataatgacaaaaaggagaatggttatggaaacaaaacaaccggggatttccggctattggttaaagctgattgctgtaatttccatgctcattgatcacacgtcagccgttattttagaacagattccgggactggaaaatcccgcatttttgatgcgcatcattggaagactggcgtttccgatttactgttttcttctggtagaaggattttaccatacacgcagcagggcaaaatatgcggggaggctttttttgtttgccctgatttccgaggttccgtttgacctggcattcagcaggagaatgtgggatttttccagcaacaatgtcttttttactttgctgttcggacttttggtgatctggggtgttgaagggataaaacagaagtttgtggaggaagtttacgggaataaggccgcagtcatccgcctgattcttaccattgtgacagttgcagccgggggatttctggcacttcttttccgtacagattacgatttgtcgggaattgtgacaatttttgcaatttacatgttttatccgaagaaagtgaagggaatgggtatcggtgtttttgttttaaccctgctggcaagtatcattgaagcggcagcatttctggatatgataccggtttatttttacaatggaaccaggggaaaacagatgaaatatttcttttatatattctatccggcacacctgtttcttcttgccatgatcgcacgggcaatgggactttgggcttaatattttaagaagatgttacgattcttatgaaattcttatctttttcagatacagcttgcgttcctgaaaaagcgggagtacaatgcagacgaaatgaaagacagataggaatggaggtcttggatgatgagacaaaaatcttggaatcagtttaaaaaaacaatggctgcctcgacactggcaggagcgatcacttttacagggtgtgcggtgatgccttcggttacagcttttgcagatacaacagaacagaccggtcaggtatcgtatgataatgaggtgatgccgatccacacggacgtgaagacggaggcaaaaccgttgatgaagggtacgtcatgtacggtttcggatggaaagaacctgtattatgcgtttgaaatgatgggtgtgcgtatgggcattatgaaatacaacaccaaaacaggcaaaaagagtgaggtatattcctacaaaatagggaaaaacaaaaagggaagcaatggtttttcccaattatctgtggataagaaatatatttatgcaacctgggaccgttactatggaaccgatgcaacaaaagaatatatttaccggatcgcaaaagacgggaaatccgcaaagaaacttgcgctcggacgtgatccacagcttgtagatggacggatttattatctggcactgaaaagtaaaagtgaagatggcatgaattattcggaagataccggaaccgttatgagtatgaagacggacggaacggataaaaagaaagttgcacagattgtaaacagcggagatgcttatcggtattccctgtttcagagtgagggaaagatttactataccaaggaaaacgagaacaagacattttatgatctggagggaaacagttatcagagagaggcctttgcggttaaggatgaaaattatctgagtgtttcgctggaagccgtcaatgatggaacgtatacctaccgtacgacaggaaaggatcggtacatgcagacgaaactctaccggacagataacaggacgggaaagaaaaaccttgtggcatcctttaaacttggcattgaaaaatactcggtttgtggaaattatgtattcgtggaagcaaatgttccgtacaagggagctgatgtgactgagaaacttgcagtttactgctataaggcagatggcagcagcaaagtaaagcttgcttcctggtttccggcagaataaaatccgggtaacaatcgaaaaaataaaagannnnnnnnnncgactgcggtgcttcttttattctggggatttatttatccagatcttttttatctacattctgcagcatcattgcacgaactttcagaggaagtccgaacagtgtgatgaatccgtctgcatcgtgatgatcgtactgatcaccggttgtgaaacttgccagagactcactgtagagagagtatggagaagttgtgccggctttgatgatgtttcctttgtagagcttgaattttacttcaccggtgacatacttctgggtagaagtaacaaatgcctggattgcttcgcgaagaggagtgaaccattttccttcgtatacaacattggcaagacggttgcccatctctttctttgcagataaggtatcgcggtcgagaaccagttcttccagctggtcatgtgcttccataaggattgttccgccaggagtctcatatacaccacgggatttcataccaacgacacggttttctacgatatcgatgatgccgacaccgtgctttccaccgagacggtttaattcacggatgatatcggaaactttcatttcttttccgtttaccgtctttggaacacccttttcaaaggtcatggttacatattcgccttcgtccggagctttctcaggggaaacaccaagaaccagaagatgatcataatttggctcgtttgcaggattctccagctcaagtccttcatggctgatatgccataagttacggtcacggctgtaactctggtctgtgccgaatggaagatcgattccgtgtgctttgcagtatgcgatctctgcctcacgggaatccatctgccacttgtcatcacgccaaggagcaatgattttgatatccggagcaagtgctttgataccaagctcgaaacggatctggtcatttccttttccggtagcaccgtggcagattgcaacagcgttttcttttctggcgatctctaccagtttctttgcgataccaggacgtgccatggcagtacctaataagtatttgtgctcatatacagcaccagcctgtacacaaggtacgatgtaatcgtcacagaactcatctgtgatatcttcgatatataatttagaagcgccggataatttggctctttcttccagtccgtctaattcttcgccctgtccgcagttgatacagcagcagacaacctcataaccataagtctcctttaaccaagggataatagcggtagtatcgagtccgccggagtaagctaaaacaactttttctttcataagattgtatcctttctttctatatggaattgtacgctctcgtacgactaaccctactatacatcaatccaaatgaaaacacaagtgaaaaaatatacataaaattgcataaatatacataaatttgtgaatatttgctatttacggatggaaaaagatggactattatagggtagaatcatatttttaaaagaaagaaaaggtaagaaacatggtaaaggtaggaattatcggagcgaccggttatgcaggagcagaactggtgcgtattttattgaatcataaagaggcacagatcgaatggtttggatcaagaagctatatcgatgaaaattatgcagatatttacagaaacttttttgaacttgtcgatgcagactgtctgggtgataacatggatgagcttgcttcccgcgtggatgtgattttcacggcaacaccacagggatttctggcaggtgtgctgaatgaggatattttaaataaggtaaagatcattgatctgagtgcggattttcgaatcaaagatgttgctacctatgaaaaatggtataagattgagcataaaagcccacagtttattaaggaagccgtttatggactctgtgagattaaccgtgataaggtgaccacccagacccgtctgattgcaaatccgggatgttatacgacctgttccattctgacagcatatccgctggtaaaagagggactgattgatccggatacattgattattgatgcaaaatccggtacttccggagcgggacgtggggcaaagacaccgaacctgttctgcgaagtgaacgagagcatgaaagcatacggtgtgacaacacacagacatacaccggagattgaggagcagctcggttatgcggcaggaaaagagattacagtgaattttacaccgcatctggttccgatgaaccgcggaattcttgcgacagagtatgcaaccctgatcaaaaagccggatggtacctatccttcttatgaggaactgaaggctgcttacgataaatattatgcaaaggaacgtttcgtgcgtgtattaaagaaaggtgtctgcccggagaccaagtgggtagagggcagcaattacgtggacgtaaactttgtcattgatgagcgtaccggcagagttgtgatgatgggtgcactggacaatctggtcaagggtgcagccggacaggccgtacagaacatgaatctgctgttcggatttgatgaggcagaaggactttccatggttccgatgtttccataatgaaatgcatctgtttgatgcatttcctacgctcattgtttccgcgtaagaggaactttcatacaatgagctctataatgaggtgaataatgagtaaagaatatacaatccgtgtgatgacactggaagattatgatgaggtgtatgcgttgtggatgggcatccacggttttggaatccgttccatcgatgattccaaagaaggagtggagcggtttttaaaaagaaatccgaccacgagtatggtagcggtagcagatggaaagatcgtgggagccattctctgcggacatgacgggagacgcggatgtctgtatcatgtctgtgtgcatgaagattaccggaagaacggaatcggaaaagccatggcagtcgcatgtatgcgcgccctgcagaaagaaaaaatcaataaggtcagcctgatcgcatttaagagcaatgagctgggaaatcatttctggaaagatgccggctggtgtttccgggaagacttaaactattacgattttacattgaacgaagcaaatattacgagatttaatcagtaaggagaatgttatgagtgagaatttaaacgcattggaaaaagcacaggtgctgattgaggcattgccttatatccagcgttttaaccgcaagattatcgttgtaaaatacggtggatcagcgatggtagatgagaaactgaaaaaacaggtcatccaggatgtcaccctgttaaagctggttggattcaaaccgatcattgtgcatggcggtggcaaggagatcagcaaatgggttgccaaagcaggaatggaaccggaatttatcaatggactgcgtaagacggatgcgcctaccatggagattgcagagatggtgttaaaccgtgtcaataaatcacttgtatccatggtgcaggaacttggggtgcaggcggtcggcatcagtggaaaagacggtggtctgttaaaggtggaaaagaaattgtcggatggtcaggacatcggatatgtaggagaagtaaaggaagtgaatccaaagattctgtatgatctgctggagaaggatttccttccgattatctgcccgatcggtcttgatgacaattatgatacatataatatcaatgcggatgatgcggcatgtgcgattgcccgtgcggtttccgcagagaaactggcattcttaaccgatatcgagggagtatacaaagatccggaagatccgtccactctgatttccgaacttacggtttccgatgcaagaaaactgattacagacggatatatcggcggcggtatgcttccgaagctgaataactgcattgacgctattgaaaacggagtatcccgtgtgcatattctcgatggaagaatcgcacattgtctgcttttggaaatcttcaccaatcgcggaatcggtactgcaattttgggtgatgaagaacatcatttttacaatgaataa

SEQ ID NO: 263 - DNA, 7431 bp, unidentified
  source 1..7431: mol_type = unassigned DNA
atgtctctttccgaagaagcaatcactcttcagcgtgctgcgcacgaactgatgtatttgggtatggacggcagtcccgtctatagcgatgacttgtcacggcggaacggtgaggtctaccgtcttaccatggctttataccggtcgggtgtaaaaggcactaccatcgaagagcaggcaaatgtctgtcttgcccttcttatgggttacagcgcctcttttgtggaccatggcgaaaagcagcagcatgtccaggaagtgctggactgttgttgggatgtgctcgacgcccttcccgcttccttactgaagctccgtctgcttaccgcctgctacggtgaagtgttcgacgagtctttggccgacgaaggccgttccatcatcgcctcctgggattccttatcacttactcccgaacagcaggaagcggttgatgaatttcagaatgtgacagacaatccctatccatgggaatatatcgatgaataaaacttttcatataatgcttaacaataaatccgtattgattaccggaggaacgggttccttcggaaagaagtttgtggaaaccattctccgtgattatccgcaagtaaagaaaattattatttactcccgcgatgagctgaagcaatttgagctgaaacagaaatatcccggtcataagtatccgcaactgcgtttctttatcggtgatgtccgtgacctcgaacgcctgacgcgggcttgcgaaggagtggacgtgattatccatgcagccgccatcaagcaggtggataccgctgaatacaatcccgaagagtgcatcaaaaccaatgtacacggtgcgcagaatgtgataaaggctgctcttgccaccggtgtacagcatgtggtggccctttctactgacaaggcttgtgcccccattaatctttatggcgccaccaagctcacttccgacaagctgtttactgctgccaacaatatcagcggttccaagaacatccggttctccgtagtccgttatggcaatgtgatgggttcccgcggttccgtaatccctttctttatcaacaagcgtgacaacggggcgaaggaacttcccataaccgatatgcgcatgacccgtttcaacatttcactggaagccggtgtcgctttggtcatgtatgccatcggacatcacctgggtggtgaaatctttattcctaagattccttcctatcatatccaggacgtggctaccgccattgcacccaatctgccgcaggtggaagtgggcatccgtccgggagagaaactgcacgaggagatgattactgtaaccgatgctcttgatacaatcgatttgggcagatattatgtcattcttccttccgtatctttcaagcacagtcgcgaagagttcatcagacatcacaatgcagtacccgttcccgacggtttccactacagcagtgacaacaatacggagtgggagacagtagagactatgcgcgagaatatcaagaaatacgttgaccctaatttcgaggtgaaatgataagcaagcctattccatacggtcgtcagcatatcacagatgaggacatccgggcagtcatcgataccctgaaaagcgattacctgacacaaggtcccaaaatcagggaatttgaaacgaaatttgccgaatatgtaggtgcacaatatgccgtagcggtgaacaatgctacttcggggcttcatcttgcagctaccgcactgaatgtaaagccgggtgacaaggtgattgtcactcccatgacctttgctgccagtgccaactgcattcgctattgtggcggcgaggtggtattctgtgatattgacaaggatacttacctcatggatatccgtaaactcgaagccatgcttaaagcttctcctcgcggtacttacaaaggtattgttccggttgattttgcaggctatcctttggatctggaagagttcagaaagcttgccgacgagtacggtttgtggattatcgaggatgcctgccatgctcccggcggctatttcatggacagtaaaggcaagaaacaacattgtggtaacggttgttttgccgactgtgccgtattctctttccatcccgtgaaacatatcgctacgggtgagggaggcatggtgaccaccaacagcaaggagctctatgacaagctttgtctttaccgtacgcatggcattacgaaagaccctgctttattgcacgagcatcatggtggctggtattacgagatgcaggagttagggtataattaccgtctgactgattttcaggctgccttgggtatttctcagctggagcgtgcgaaagcaggtcttgaacgtcgtcatgaaatcgtaagacgctataatgaagcgttttccggaatagatggtatcaagactccgttcaatactgccgatgtctatcatgcttatcacctttatatcattcaagtagctgaccgcttgggtctttataattatctgcacgagaacaatgtctatgcgcaggttcattatgctccgcttcatctgatgccttactatcagcagtggggcaataggaaaggcgatttacctatagtagaagagtattacgaacattgtctgagtcttccgatgtatcccacgctgacggacgaggaacaggagtatgtgattgaaaaggttatagaatttgtagcgaaatgaaaaatatagcaatcattcctgcacgtggcggcagtaaacgtattccgcgtaagaatatcaagccctttatgggtaaacctatcattgcatattccatagaggcagctttacaaagcggtctttttgaggaggtgatggtttctaccgatgatgaggagattgccggaatagcttgtaagtatggtgccaaagttccttttatgcggagtgccgagatgtcaaatgactatgccggtactgatgatgtaattcttgaagtactgaggaagtataaagagcaaggcagggagtttgaaacggtttgttgcatttactcaacggctccttttgtcactcccgaaagactccgggaagcatacggaaaaatgaattcggagatagattccgttttcacttgtgtggcttattcctatcctatacagcgcagccttcacatcgtggatggaaaaattagtatggtttatcccgaatacaaaaatgcacgttcccaagatttagaaccgatttatcacgatgccggtcagttctatttctctcgcactgctccctttgtggagagccggactttttggggtgagaatacagccgggttggtgctttccgaacttgaagtgcaggaccttgatacacagactgactgggcattggcagagatgaagtatgagttgcttcataaatgatgtaatgcagaaaatctatctccgtgccgatgcaagtgctgccatcggctacggtcactttattcgtactctggctttggccgatatgctgaaggacgattttgattgtaccttctttacttgccatcctaccccttatcaggtgagtgagatggagaaggtatgtcctttcatccccttacaggaagaatcacattatgatgagttcctttcccttttgcaaggtgacgaaattgtggtacttgacaactatttctttactactgattaccagcgtgccatcaagcaaaaaggttgctgtctggtgtgtgtggatgatatgcacgacaagcactatgtggctgatcttatagtcaatcagggattgggttacacgcgtgatgactattcgtgtgaaccatatactcaatttgcctttgggcttcaattttcattgttgaggaggcctttcttcaatgttgcgctgcagaataaacggaacaattattcaggagatttatatgtattggtggcttttggtggttctgatttcttgaatttgacgtatcagaccattcatgcaattaaagccaaagacaatgtgaagaagataacggcaattgtcggtgattcgtatgcagccgagaatatggttgatgaccccaaagtaacctatcagaagaatttgtctgccggttccattgcagacttgtttagtactgtagatgtcgccatattgcctgcctctacgatgatgaatgaggcattggcctgtggaactcctgttataggagggtattatgttgataatcaggagcacgactattatatgtttttgcgtgaagggctgattcagggggcgggtgattataccgatgccgctgcctttactcttgttgctgagaatttggataagatggccattcgtaaaagacatgccatcactccggatattcccaaacggtttgtcaatttgtttaaaagtctgttgatatgcaagtaacttcacaaagagcttcggccatattgtataattatctgtctggcaaccattttgataaaccgttcttattgccggcaaatgtgtgtcctgtagtgcccctgtcgtttatgaaagcaggtgtcggttttgagtttatagacatagatgaaagccatgccatgtcaaccgagaaatgtttgacagctatagaggcgggaaaatattccggtcttgtatttgtgcatgcctacgggaaaaagtatgacaacaaagaattttaccgggcagtgaaaagtctcgatccaaatctttgtatcattgatgattgttgcttgtgcattcccgaattggcagattccttgcctgaaaatgtggatctctgcctttacagtaccggatatgccaaattcatagaactttcctatggtggctatgcaagttttagggggggtacgaagttgttgattatcagtatgatagcattagtgaacaaaagcattcggtatatataaggaaatgtctcctggagaatgtcagatatatgcttccggctgactatccttggctggacgcctcaaatttgcaaatgaccgatgaggaatattttgacatcattgaaagaaagctcccaaaagtgattgcggaaaaagagaaaataaacaagatatacaggaatctgcttcctgaatcgattcagatgggagatgatttccagaactggaggttcatgattgtcatcgagaaccggcagaaggttcttgacgcaatattcaaggccggtctgtttgccgggactaatttcccttcggtttcatacatgttcaaaggtgtttcttctcctgttgcggaagtggaggcgaagtatatcgtcaatttgtttaatgatttccggttcagtgaagcacaggcaagaaagatctgtgatgtgataaattcggttatatgaataaaagattattgatactgggcgcaggtgaaatgcaggttcctgtcatccgaaaggcgaacgatatgggattgcataccatagtcgcagatatggatgcgaatgctccgggaatggggtacgcctcggaaccggttcttgtcagcacgatggataaggaaggtgttttggaatgtgccaaacgtcactctgttgacggcatacttactacaagtgacgcgcctgtaaatgtggtttcctatgtcggggaacagctggggcttccgtccatgtccactgaggtcgcaaaaatctgtacaaacaaatacttgcagagggaaatgtttgcggccaacgggattgatgtaccatttttcatgctttgtgataaagatacggacttgggcacattgcaagattatccatatattgtcaaaccggtagattcctctgcaagccgcggagtaaaaaaggttacaaatcataaagaacttgtacttgctttttccgaagctctcggttattcccgtaccggaaaggccattgtcgagggctttataacaggccgtgaattcagtgttgaaacatatacgcaaaacaataaaactaccgttgtcactattacggagaaactttgtatcggtgaggcagaaggcttctttgttgaagatacgcacattgaaccggcgcgtataacgaaacaggagtgggagctggtttcggagaccgtatcaaaagcactttgcctgattggacttaataattgcccctcgcatacagaaataaagctgaatgaatcgggcgcttatatcatagaaattgcttgtcggcttggaggagattatataacctctgatttggttccattgtcaaccgggatagatatgcagagaaatctggtgaactgttctcttggtttgcccgttgatgtccttcgcaaacatgaaaaatgctcagcggtacagttccttaatccgctcaactatcagcgttgtgtggattttctaagctcttcccggtcatcggctgtttttcggtctgaaataagaccttattctgaaaaaaaataaaaaactctttagaccgtttagggtatatcatacttcagactgatagtatggaagagcttgaaagtattctaaggacgattaaatagtaaagacatgagagataagtgtatgattgtggctgagatgtctgccaaccataacggtaagaaagaaacagccattgaaaccgtcagggctgcaaaacgtgccggagccgatgccgtcaagttgcagacctatcgggctgataccattacgcttcgctgtgacaagcctgattttataattaatgaaggctctatatgggacgggcaatatttttatgatttgtatgaacaggcttatactccttgggagtggcatgaagagttgttccatgtggccaaggaagaaggactgatctgtttttcttctccttttgataagacagccgtcgatatgcttgaggctttggactgtcccgtttataagatagcttctttcgaaattacggatattccattgatagaatacgcggcttcgaagcataagccgatggtacttgctacaggcatagccaccgaagaagatattcaattggctgttgaagcttgccgcagaatgggaaataatgatattacggttcttaagtgtacctcttcttatccggctccagttgaggaagccaatctttgtatgattcgtgatttggcagaacgtttccaggtaaaaagtggactttccgaccataccctggggagtgtctctcccattgtggcggttactcaaggtgcgagtatgatagaaaagcactttattttgaatcgttccatcggtggtccggattgttctttttctatggaagagaaagattttgcccaaatggtaaaagatgtgcgcatggctgagttatctttggggaaaacgacttacgaattgacggagaaaatgagaggtagccgttccgcatcacgttctctctatgtggccgaggatatgaaggccggagaagtgattacggagcggaacgttcgctccgtccgtccgggcttcggcctgcaccccaaatatctgaaagatatattgggaaagaacgtgaaccgggatttggagaaagggacgaggtttgcattggagtacgtgaatggttag

SEQ ID NO: 264 - DNA, 7280 bp, unidentified
  source 1..7280: mol_type = unassigned DNA
atgagtttcaatattcctaaaagtgacaaaaaaagggttatcattgtcggtggtggttttgggggtctgaaattggccaataaattgaaaaggtcaaattttcaggttgttttagtagacaagaataattatcatcaatttcctcctcttgtatatcaggtagcttcgtcgggaatggagccgagctctatttcatttccatttcgaaaaatttttcaaaaacgtaaagatttctattttcgtatggcagaggtcagagctatctttccagaaatgaatatgatacagacatctatcggtaaagctgaatatgattatctggtatttgctgcagggacaacaacgaatttctttggaaatgaacatatagaagatgaggctatgcctatgaaaactgtgtcagaagccatgggattgcggaatgctctactttcaaatatagaaaggtcaataacctgctctacagataaagaacggcaggagcttctcaatattgttattgttggaggtggggctacaggcgttgaaattgcaggagttttatcagaaatgaaacggtttgtactccctcatgattatcccgatatgccaagtagtctgatgcatatatatcttatagaagccggacctcgtttattgccgggtatgtcgacagaatcttcagaaaaagccgaacaattcttaagagaaatgggagtaaatatattactgaataagaaagttgtcgattataaagatcataaagtaattcttgaagatggctcagagattgcaactcggacatttatatgggttagtggtgttactgctattccagtgggtaatttgagtccggcactattgggacgcggtagaagaatcaaagttgatgaatttaatcgcgttgaagggatgaataatgtatttgcaattggagatcaatgtattcagacttctgataaagattatcctaatggacatcctcaattggctcaggttgcgattcaacaaggaaagttacttgctgaaaatttaaaacgcatcgaaaaaagtaaatccttaaaaccctttcactatcgaaatttaggatcaatggcaacggtaggacgaaatcgtgctgtagccgaattcagcaaaataaagatgcaaggttggtttgcatgggttatgtggttagttgtacatttacgctcgattcttggagtacgaaataaagtagtcgttcttttgaattggatatggaactatcttacttatgaccaatctttacgaatgatagtatatgcgaaaaaagcaaaagaagttagagaaagagaagctttagaagcaaagacacacttaggcaatgatattttacatccggataataaataaagattatgtgtgttattcgttaaaaaaaatatcagacaggaaaaatttcctgcctgatattttttatatcatttgaccaatgtaacacttaatggctgctgtattgccgcagcagcttgttctagataggaaaaccaggattctggagtatcaaatccgtatttactccatcctgctccccaataatatacgaaatctgaacctggagtatactcgctgatagcaagaagttgtccatctgctcctcctctttcatttgttttttctttttcactgtaaaataccggtttcgcatcgttcaaggcttgtggaaatacagctccgacatagattataccattgttattgtcaacattatccgttgggtctgcatatccgatataacccttatcagcagacgcaacatatcggcatacatctgctggttcatgaaggacaatacctgcaacaataggtgtattttctttcagattgctatatgacacagttgtcttatttaattgggtaccagcatccaaacttataatacgagtttcaacaatatcactctctccttttacggtcaaagggttatattctaatttcaccgtgaaacgtagtggcccgttatctaagatttcgaaagatttataacaataagggtaaagaatagaatcattgaccatcagagcagcagtaccacctcctaatgtaggacctaccttatagcaatccaatccattaccatgatctacatggtaagaaactgatttatataattcatcagcagctttaggatcagtcttttttagttcagcaatttttgctttggtttcaggattcaattctcctgcatatctatcttctacaacaagttcaggaacagattttacccaaatatcatatccaaaagcacgctctccggtagcttgaagagccggaccatatgtacgaaatgcaattttatcgttttcccaagctatatcatcaacacgttcaggatattgttttcctgtcgtcattgtcagaaactgctcaggagtacctggttttattacatattctgattttgtattggctttaacatttgctggaaaaatgattttttcatcataagtaatctggtaaggtacttgctgtccttgagcatctattataataaatgtagccgtatcattaagttgcaatttttctgcaacagaggacattgctacttctacaatttcattgctccggtcaaaagaagaatcattttgaatggctatttgtacctcttttttttcagtacacgaaaaaccaacaatggaaaataagcttaaaaaaagtatttttctcatttttgttatataattaaagaaaccctacatagtcttgtaacttaaaagttacaagacttgtaaggtttagatataaaatttagaatattatttaggttgtttcccgatatatgctaatataccaccatccacataaaggatatgaccgtttacaaagtctgatgcttcagaggcaaggaatactgccggtcccatcaaatcttcaggcgttccccaacgtgcagcaggagttttagcaacaataaatgcatcaaatggatgtcttgaaccatcagcttgtttttctcttaaaggagctgtttgtggtgttgcaatgtaacccggacctataccattacattgaatattgtattctccatattcagaggcaatattgcgagtaagcatcttcaatcctcctttagcagcagcataagctgaaacagtttcacgtccgagttcactcatcatagagcatatattgataattttaccatgacctttttttatcatactggggataactgctttagaaacaataaaaggaccatttaaatctatatctattacttggcggaaatctgcagcagacatttcatgcataggtatacgcttgataattcctgcattatttacaagaatatcaataactccaacttctttttcgatttgagcaaccattgcatcaacctggtcttctttagttacatcacatacataaccatgagccttaattccttcagcttcataagcagcaagacctttttctaccaattcaggtttgatgtcattgaaaacgatttttgcaccagcttgagcaaaagctgtagccaaagcaaaaccaattccataagaagcacctgttacaagtgcaaccttaccttctaatgaaaagtttaccataaaaataaagttagtgtgttttgttaattaattcgatttatcgcaattctgtatttttgtagaaatcttgatctccataatctagattttcaccacccataccccatataaaagtataattacgagttgctgcagctgagtgtattgaccattcaggagataatacagcttgttctccttgcatccatatatgacgagtctcagtaggttctcccataaagtggcatacagcttcaccttctggaacctcaaaatagaaatacgcttccatacgacggctatgagtatgtgctggcatcgtgttccatacactacctggttgtaattcggtcatacccatctgtaattggcaggtttccaatacctgagaaaccaacattttattgatattcctatgattagatccttctaatgagcccatttctgcaaccacagcatcagcttttgtcacttttttatcaggatatgtcttatgagcaggtgcagagttaaaatagaattttgcaggatttttcggatcaatgctttcaaatgtaacagtcctttcgcctgctccaagatataatgcttctttataattcaaatcaaatattgcatctccggcttttactctaccaggtcctccaacgttgaatatacctaattccctgcgagagaggaaatgtgttgcttttaaaggatctatggcttcaagtattaatgtttctcctactggcttggctccacctacaataagtctgtcatacatagaataaaccatgtttacttcattatcggtaaagattttttcgatcaaaaaatctccacgtaatcttgttgtatcataactctttgcatcacggggatcacatgcatagcgaagttcataatttgttttcataagtatctgttgttaaatatgtaaataactcaatttatataatatcgatatcacattttatatatgtaagtacgtgaaaatgtgattgcgtaatcgattgcacaaatgtataaaaaaaatattattctacaattttttttctttactttttttcttatctctcattttcaaggaagactcccttttcaccaaatccggttgtaataaaatacattctctgtgctccatttcgctttcatggttcattttttttaataaaagttctgctacatttttacccatttcccggtttttttggtctactgaagtcaaaggaggatcaacaaacgaatcaaaaggttcattggcaaagccaacgacagatatatcttgaggaatacgtaatccaccgttacgcagtgtatgcataacccctattgcagaataatctccggcagagaaaattccatcagggcgatttttcatatttaatattttgagtccagcctcctctcctgttactaatgtaatgctgttttcaagaattagctcatcttctacaggtatttttgcgtcttcaagggcctttatataaccttctttgcgttttcggtatacactaagagtcataggtcctgccaaatgagcaatacgacggcatccttgtgatattaaatgctgtacagcatcataggaagcttggaaattatcaacttctaccatgctactaataggttctaaaggaactcggtcgaaaaagacaacaggaataccggcagaaattgctgtttcaaaatgtttataatcaatggtttctgatgccaaagaaacggctaatccatctattttttttgacatcatggttttaacaattgctttttcatcatcatatcgttcgtttgattgagatacaagtacactatacccgttttcatgagctatactttctataccaccgataacagaagcaaagaaatgacgatcgatacgtggaacaattactccaatgacaaagccttttcctgttcgtaaatgatgagctactgggtctggatgataattcattttttttgctaattccaaaaccgcagctttcatttttgcactaattctcggatgattttgtaaagctctcgatacggtagaggctgaagtgtttaattctttagccaaatcattgatagtaactttatgtattccagacatcttctttatcttttagtaaattttgtggcgacccatttatttttctctatataattttcaaatttcaggtcgcatttctctgcttcttctttaattacaggaatatcatctacatagaacccactgaaatatatttctgacccagggtgcatacatcgcgcatagacgtgcatatcatttaataaaatattacgattgatattggcatatataatatcatatgtttcgtttcctaataattctactccacctaattttacagaaatatctgaaacattatttaatgcaatattctctactgcgttttcgtaagcaaaggggtctatatctatagctgttattttgtcagctccccgttttgccgctaaaatcgctaaaacagctgtaccacatcccatatctaatacttttttccctgaaacatcccctttcaatatacttttaagtatcagacttgttgtttcatgatgacctgttccaaatgccattttgggatcaataataatggaatattttacttgtggtatattcttgtgatgtgtactgtatatgacacattcattatctataacaataggctggaaatagttcttttcccattcctcattccaatttttccctttgatcgattctattacataacttatggttgcattgaatggaaagttttcgataacagactctaacttttctttattgaataaggatgtttgaatataagcatctaatcctgtcgctgtctgaacaaaactctcaaatcctatgtccgcaagtaatgctgataaaatatccgatacagtttcggaatatggtgtaatttggacttttacattaatataatcattcattcttccttgttttactatatcttatttttgtattatccgttgtcctgcatatatttttgaaaaaaattttcaacttttcatttttttcatcaatctgggatatacaatattttttacgtgcccataattgggttgtaattgcaagactttttggtacatctttttggcttcagtataattttcatttttttcttcgacaagacctatagttgtaagtaactgtatgtacatccaattattctttatatatccatcatgactttccatatatttcaaggctttttggtagcctgctaatgccttgtctttatctcctccaaacatagatggcatatagaaaaggatattggaatacaagatatttacataaggattatcagggttcagagatattgatttttttgccttggacatcatacctttagccaatgttgctgcttttatcggagagagagctatttggtatccaataaggtttgccatcagtcctaataataaagcatcattcggtgtttgtttgtacatttggtttgccaaagccaaagcatttgccaatactctttccgcatcgtcttttctttttttatccaacaaatgtcccacaagaccgtaatagtaagtcagtgtttcgagttgacaatcatggttctgccactctggatccttcgaaattttattaatcaagatttcccactggggcattttaccattgatatacatattaaatgctgttgctttgtagtcaatattagcagcttgaattaaagatatggataaaaataataatattactaaaattgatgttatttttttcat

SEQ ID NO: 265 - DNA, 13032 bp, unidentified
  source 1..13032: mol_type = unassigned DNA
atgactttaaaaaagaacgatattgtaaaccttacaataacttcggcaactgccgagggcagcggagtcggaagaacagatgacggcattgccgtttttgtacagggttctgcaatcggtgacgaactcaaggtgcgtatattaaaggttaagaaaacctacgctttcggcaaaatcgaagaaattctcgttccgtccaaggcgagaattactcccgactgcgaaaactttatgaagtgcggcggttgcacatggcgacatatttcttatgaagaagaatgcaaaataaaacagcaaagagttgaggatgccgtaacacgcatcggcggtcttgataatgttgttttcaagccgattatttcgtcggataatatcacaagataccgcaacaaggcgcagtatcctgtcggtcttgaccgtgacggaaatgttgtgacgggtttttattcattccacagccaccgcataatcaattgcaccgactgtattttacagcccgaaatttttgcaagggtaattgaaattacaaaagattttatcgcaaaaactaacacggaaatttatgatgaaacaacaggcaagggcagacttcgccacatttatatcagaatcggcgaggtttcgggcgagcttatggtgtgctatgttgtcaacgcaaacggtcttaaacaggaagatttactcgtgaaaatgctcaaatccgaacttccgcagttaaaaagtgtgattattaattcaaacagagaaaaaaccaatgttgttctcggcagaaaaaacagaacaatctacggaagtgaccatattaccgacacactttgcggattgcagtttaaaatttcaccgttttcgttctggcagatcaacagaaaacaggctgaaaagctttacggcaaagccaaagaatatgcaaatcttaaatctgacgaaattctgcttgatttatactgcggaacgggtacaataggtcttacaatggctgattcctgtaaacagcttatcggtgcggagattgttgaagatgccgtgaaagatgcaaatgaaaatgcaaaagcaaacggcattgaaaatgcacgattcatctgcggagatgcctcagatgccgcatttcagcttgaaaaagagggtttaaaacccgactgcgtaatccttgacccaccgagaaaaggttgcggtgaagagcttgtaaagacaatttcaagaatgtcgccgagccgtgtagtctatgtatcctgtgaccccgcaaccctcgcaagagatttaaaattcttcacagaaaacggctacacccccaaagaaatcaccccctgcgatatgttctccggaacctcccatgtagagagcgtggctctgttgactaaagtacaggagtaaaagtgtgaaaattattaaatttgaagaaatctatcgtgatgatatgatttttacggttttacaggcaaaagatgctttgggtagaaaacctactataaatcctgaccttcttgatattaaggcaaactatcttgattgcaatgatatgttttggcttgcaatagatgaaaatgacagggtagtcggatgtattggatgttcaagaattactgatacagatcaggcatttttgcataggttttatataaaaccgtcattaaaacgaaagggaatcggcgcaaagttacttaatacggcagagttatggatgcgtgaaaacggtattgctgtttcaaaagtacatttggggacaccaaaagagcagtggtttgaatcttatgctttttatccgaaacacggatatatagaatatgaaccaaggtatatgatgaaggttctgtaattaatgaaagtcaaaagtaacatatttattatgattattgagtagtgcaacaaataaaatgaaatatgtttggggtttggggtacgatattgaattgacttatttaaaaagaaaaagtgacaccgatggtgacgctttttgatggaggtgcacaaaatggcaaagaagaaaaatgaaataagtattcgctcaagtgctgcggaatatctcacatatgttgcttctgtgggaaatcaggcagatagctttgaaatgcgttatgaggacgaaaatatatggctcacacagaaaatgatggcaacgctgtatgatgtttctgtgcctgcaatcaatcaacatctaaaaaaaatctttgaagatggcgaattagtcgaggattcagttattaagaaatacttaacaactgccgacgacgggaagaattatcaaacaaaacattataatcttcaggcaattattgcagttggatttaaagttaataatgaacgagcagttcgattccgtaaatgggcaggtcaaattgtaaaagattataccattcagggctggacaatggatgtagaccgtctgaagaagggcacgatgttcacagatgaatattttgaccgtcagttagaatacattcgtgaaattcgcctgtctgagcgaaaattctaccaaaaggttacagacctttatgcaacagctttcgactatgataaagatgcaaaaaccacaagactctttttcaaaactgtgcagaacaaaatgcactatgctacgcacagacatactgctgcggaactgattgttgaacgagcggatgcggaaaaggaacatatgggactaacctcttgggaaaatgctcctgatggtaaaatagtgaaaagcgatgtatctgtagcaaaaaactatcttactgaaaaagaattgtcttttttggaacgcattgtatcgctgtatctcgattatgcagagttacaagccgaacgtcatattcctatgagtatggaggattgggcgaaaagacttgacggtttcctcgaatttaacggtactgaaattctcacaggagcaggaaagataagtgcagagcaggcaaaacttcacgcagaaacggaatttgaaaaatatcgtgtaattcaggacagattgtttatgtctgactatgacagatatttacttgaactggaagaaaagatgaaagaagagtaaatggaaattttaatgttttgcgagaaattataaaagcatctcattgcatgagtctgtttattgagatatgattggcttggaggtgatacattatggcaaatgaagataaaaaggattttaatgctatgcttatggatagcaaggatatgcctaaatttcaaataatcacagatgaaaagagtattaaaaaatatggtggagataaaatgtattttgcaccgccaatcgactatgacaaagtaatgaaaaaaattccatatggtaaagtgattactgtcggaaaaatacgagaatactttgcagagttaagcagtgccgattttacagagcctatcacagccggaatttttgtttcaatagttgcatgggcgagttatcagcgcacagaggataaaaccccttattggagaacattaaaagcaaatggagaattaaatgcaaagtatcccggaggaattgaggcacaaaagaaaatgcttgaaactgagggacatactgtagtgcaaaaaggaaaaactaatatcaagtattatgttaaggattatgaaaaagcattatttacattgaaatagataatgcgaaaacttcagtttcacggacatatccccacaaacggcagaaccacgaaaaaggctgtggatgtattcccttgaaccaaaaatcagccaagaaattcattgtattcagatgagccatgttgaaagtgtggcattgattgaaagaaattaacaaaataatatagaaaaggacttaaaatgcaaaatacacttaaaataaaacgaacaaaaacagctttggcatttaatcttgcgattatcgcttgtgagattgccgcaataattatcgtgtttttcaaaataggctgctatccgcttgtatattacactgaggacagcaacctgtttgcacttgttgcctgtgcggttatggcaggctttcaggtgcgatatctcaaaagcggaaaagaaattccgcactcggttcagatgttcaaatatatggcggcggctgtgctttcggtaacatttatcgtagttcttgctgtactttccccgatgcgtggagagggcataaacggttggctctatatgctttttaacaaagacttcacctttttacatactttgtgtccgattcttacaattttatcgtttgtgctttttgaaaaagaacctcaccttaacacaaaatcagctttcacggctacaatccctacattattatatgcgattgtgcttattatacttaatatagttggtgcagttgacggcccatatgcgtttttgcgtgtgatgaatcaaccgttgtatatgtcatttgtttggttcatcgttatagtaggcggtgcgtttttccttgcacttctgcttcaaaaacttaattcgataggaagaaaaagaaaataatagataataagacagtaaacagatgaaaatttcagattggagtgatttttatgaaataccgcaagttggtggagaatgctaaaaagccaaacggcttttggggcaaaatgatgattaaggctatgaataaaggacattcaagccttacctcatggggacttgaacatatgaatatcgaacgcaccgcaactgtacttgacataggctgcggcggcggaaaaaccgttgaccgactttgctcaattgttgccaacggcaaggtttacggaatcgattattccgaactctcagtaaaatcctccgaaaaactcaattcaaaaaatatactctgcaacaaagcgaaaattcttcaggcatcagtatccgatatgccttttgataacaatacattcgataatatcacggcagttgaaacttactacttctggcctgataaggaaaatgatgtaaaagaagttttccgtgttctcaaacagggcggaacggttatgctgctttttgaaatgctcagaacagacgatgatccgttcaagtgggaaaaggttgaaaatatgctgaatatcaagtcggtaactccgcaggaaatcagagccgtacttgaatctgcaggctttgaaaacataaacacatacactaaggaaggtacaacatggctttgtgccacagcacaaaaaccgaagggtgatgaaaactaatgaaggctttgattacaggcgcaagttcgggcataggtaaagaaatcgccagatatcttgcagaactcggttatgaccttattcttgtatcacgctcaaccgataagcttaacaagctgaaagaggaactttcaaatgtgaatgtcagggtaattacgcttgatttttcacgagaaagtgacagtatggatttgtatgagcatattaagaatgaaaatgaacagattgattttcttgtcaacaacgcaggctttggagcatacggaaaatttttggatgttccgcttgaaagagagcttgaactcattcacacaaatgtttcaacggttcacattctcacaaagctttttcttaaagatatggcggagagaaacagcggatatattctcaatgtaggttctgccgcaggatttcttgcaggaccgacatttgcaagctactatgcgtcaaagaattatgttgtccgtcttactcaggcgattcatgaggaaatgcgtagggataataaaaatgtcaaggtttccgtactttgcccgggtccagtaaaaaccaacttcaataatgttgcggatgtaaaattctgcataagaggacttgacccgaagtttgttgcaaggtatgccgttgacatgaccatgaagggcaaaatgattattacacccggctttgaaatgaaagcggtgtcgtttttcagacattttgcacccgaaaaacttctcacaagaatttcttataatgtgcagatgaagaaaaacggtataaaataattgtcatatagaaataggggaggtgacacattgaggataaaattcgttgacaaggcgataaaactttacaaaagaataacaggcagatttgaaccgataacaagcaaatgcgttcacgataatatttttgcaattgccggacaatcggcattctttattatattatcggctgtgccgctctcaatgttctttgtgtcacttttgcaaaacctgcaaattccgattgattttgtttatcacggactcagcagtgtgttttcgtcaaaaattgccgatgacttaacatactttctaacctctgcctatgaaagtgctgtgggaatttctcttgtaacgcttgtagtcactctgtggtcggcggcacagggaatccacgcaatcacaaacggtcttaacagaatttatgacgcttacgaaaacagaaactggttctttttaagaataagggcgatgttctacacaattgcattgtttgtaattgtgcttgcgtcacttgtacttattgtcctcggttcaacaattaacgatttcctttcaccgcatttaaaatcgttgccggacataatcggaataatctatcatctcagatatatacttatctttttgtttctgacggtattgtttgccctgatttacaggaactttccgaacatctcacgcagcgagcataaggaatacggctttaagtcacagttgcccggtgcgtttctctgcacggtttcgtggtatgtgctttcgttcggtatttcggtttatgtgtcggatttcaacggattttccgtgtacggaggtcttaccagaattgccgttattatgatctggttttactttcttatggtttgtcttatggtttgtgcggaaatcaattatgtctatcatgacaggataaaagtgtttaccgttgcaaaatttaaaagaaaggtaaaaaccaaaggttcagagcttaatcaaataagaaaagaaagaaaaaataataagtcaaataaaagtaaataaatcaaaataaaacacttccgttcggtgatactaccaatggaggtgttttttatgaaaagaaaattttctaaaaaggtgatttcaatattgctcgtatttgcaatgctcatcggcggagcgtgcttttcatgcacaagtgcagcggcgtttgaccttggctatatcagcgaggacggaatgaagctcggttacagtataatcaagggctattcaaaaatgtcgatgaaaaaaggtcagtacaaggacgggaaaattgccgtttactgcggacttgatgtgaataatctatatgttatgggttcgctcggttggttctatatgacaaacggtgttgatctcgaccgtgcaatgacggataacgattacgcaatggagatgattgcaaagcttgattcgcatcttcaaggtgcaggcataacaaatgacagggcaaaagaaaagaaagccgagattttaaaggatgcaaagtatgtttatcaatgctttgacacattgggactttacattgttgatgttgacaaaaacagagccgatgaactcatgaacgacagcggtattgattttgtgcttgacggcggttgcgttcccaaaaatatgaaagacctcaacattgacggaaaaacagatgaaaaggacgctgagcttattcagaagtatcttatcaaagacctgacctttgacgattatgacgaaaatcagtatgctatttttgtttgcgatatcaacggtgataaaacccccgatatccgtgatgcgacagaaatcctaaaaaagtgacaattgtcataatttgtgcaaagtgaatatgattttaactgcgacagctgtaattttagctgtcgcttttgatttgtgacagcaatgtgaaactttgaataattatttgtaatttctcttgacattcaaaatgaaggtgctataattactgatacaaattgttttgtatcgaactattctatatagaacaatatctcataagtgtgatttcggaggtgaaataatgtgtgatgacaaaagcgtaaaaagctgtaagtgcaacaaacgctttaatgattcaatcggtcacgaaatcaaggtgcttaatcaggttttgcagagaaagttaatctattccgccaaggataagggtgtggataagctgactcttatgcacggctggattattgcatatctctatgatcatcgtgatgaagatgtttatcaaaaagatattgaaaacgcattttcaattgcccgttcaaccgttacaagtattcttaaacttatggaaaagaaaaattacataacgagggagagcgttgaaagtgatgcaaggctcaaaaaacttgtcttgaccgaaacaggtattgaacttcattacaaaatcgaaaatatgataaccaaaaacgaaactttgcttgacagtctgctgacaaaagaagaaaagaaacaatttctttttcttataaataaaattctcagcggacttgaaaatgcaaattaaaacggaaggagataagtatgataaaaactttggcaaaaaatatcaaaggtttcgtcaaagaatccgttctgactccgttctttatgatactcgaagtaattgttgaaacaattattccgtttcttatgtcatcaatgattgacgacggtatcaacaagggcgatatgcagcacatattcataacgggcggttatatgggtgcacttgcactcacgggcttgtttgcaggtatgatgggcggtatctacggtgcaaaagcttcggcaggctttgcaagaaacctcagacgctcaatgtttgcaaatatccagtcattctcgtttgccaacattgaccgttactcaaccgcaggacttgttacacgtatgacaacggatgtaacaaatcttcagaatgcatatcagatgcttttaagaatgtgtttcagagcgcctgtatcgctcatctgtgcaatggcaatgacattcatcatcaatgcaaggcttgcctgtatttatctcattgcaacaattttactttctgttgttcttgcctttattatgaaggcaacatacaagtatttcagtcaggtttttgaaaagtacgatgaactcaacgcaagcgttcaggaaaatgtaacttcaatcagagttgtaaaggctttcgttcgtgaaaaacacgaagttggcaagttccgcaaggcagccgacaatgtttacagactctttgttaaggctgaaaatgcaatggtaacagtatcaccgattatgatggttacttcatacgcatcaatcattcttgtaagctggttcggcgcaaatatgatcgtaagcagtgagcttacaactggtgaacttacaagtatgctcacattttgtatgaacattcttatgaatcttcttatggtggcaatggtgtttgtaatgctcacaatgagccttgcaagcggtaagcgtgttgcaggtgtgcttaatgaaaaatcaacgcttgcaaatcccgaaaaccctgtttacgaggttaaggacggaagcattgagtttgacaatgtttcattctcatacaacacaaaagccgaaaaaccgattctcaacgatatcaacctaaaaatcaaatcaggcgaaacaatcggtattatcggcggtacgggttcttcaaaaacaagccttgtaaaccttattgcaagactttatgatgtaaccgaaggttctgttaaggtcggtggaaaagatgttcgtgactatgatatcgaaactctgcgtgataaggtttcggttgtgctccagtcgaatgttcttttcagcggtacaatccttgacaacctcagatggggcaacgaaaatgctacagaggaagaatgcgtcaatgcctgcaagctggcgtgtgcagatgcgtttatcgaaagcttccctgataagtacaacacaaaaatcgaacagggcggtactaatgtttcgggcggtcagaaacagcgtctttgcattgcaagagctttgctgaaaaatccgaaaatccttattcttgatgattcgacaagtgcagttgataccgcaacagacgcaagcatccgcaaggcattcagcgagaatatccccgatactacaaagctgattatttcacagcgtgtatcaagcgtttcacacgcagacaagattattgtaatggatgacggtgagataagcgcagtgggtactcacgaagaacttatcaaaaacagtccgatttacaatgaaatttatgttgcccagacaagcggcaacggtgattttgatgcgaaaggagagctgtaattatgccgggaccaatgggaagaagaaaccgaggacctgcacaaaaggttgaaaattcaggtcaggttcttaaaagactattcggtattatcttcaaaaaatataaatttcagatgattattgttttcgtatgcatcctcatcagcgtacttgcaaatgttcagggttcattgtttattcagaatcttattgacgattacatcactccgatgattcagagcggcagccgtgacttcggaccgatgctcggagcaattttaagagttgcaattttctatgcgatcggtgcagcgtcggcgtttatctacgccaaaattatggtttatgtaacacagggtacaatgcgtgatttgcgttgtcagatatttgaacatatggaaagccttccgataaaatactttgacacacaccctcacggcgatatcatgagtgtttacacaaacgatattgacaccctccgtcagatgatcagccagagtattcctcagcttttcaacagcggaattacaatcatagccgttcttgtcagtatgtttacactcagtattcctcttacaattcttacacttgtaatggttggtgtaatgctttttgtaacaaaacagcttgcgtcacgaagcggaaggttttttgcaaaacagcaggcagacctcggtgcgactaacggttacattgaggaaatgatgaacggtcagaaggttgtaaaagtatttaaccatgagaaaaagagcattgaagaattcaatgagcttaatgacaggcttttcaacagttcatacaacgcaaacaagtttgcaaatatccttatgccgattaacgcacaaatcggtaacatcagctatgtactttgtgcaatcgtaggttgtatctttgctctcaacaacttcctcggatttacaatcggtaaactcgtaagcttcctcacattcaacaagagctttacccagcctatcaatcaggtcagccagcagtttaactcaattgttatggcgcttgcaggtgcagaccgtatctttaaacttcttgacgaagagcctgaggttgatgacggatatgtaacacttgttaatgtacgcaaagagggcgacaggcttgttgaaactgaggaaaaaacaggtatgtgggcttggaagcatactcacagcataacaggcgaaacagagtatcgtgaactcaagggtgcgcttgttatggacgatgttgacttcggttatacagatgataaaatcgttcttcacaatattgatttgtacgcagaacccggtcagaagattgcgtttgtcggttcaacaggtgcaggcaaaacaacaatcacaaaccttattaaccgattctatgatattcaggacggtaaaatccgttatgacggaatcaatatcaacaaaatcaaaaaaggcgaccttcgccgttcactcggtatagttttacaggatacacacctgttcacggataccgtaatggaaaatatccgttacggcagacttgacgcaacagacgaagaggttatcgcagcggcaaagcttgccaacgcagacagctttatcagaaaacttcctgacggctacaacaccctgctcaaaggtgacggcggcaatctcagtcagggacagcgccagatgcttgcgattgcaagagccgctgttgcagatccgcccgcacttatccttgatgaggctacaagttcaattgatacccgtaccgaaaagatggttcaggacagcatggataagcttatgcacggcagaacaacctttgttattgcccacagactttctacaatcaagaattcagactgtattatggttcttgaaaagggcagaatcatcgagcgtggttcacacgaacggcttcttgaacaaaagggcagatactatcagctttatacaggcaaaaccgcataatgataatcgaaaggggagagttgcaaaggctcccctttttctgttcttgaaatattgacttgtttattgtacaataatattcggaattgtgaggtgttaaaaatcaaagctaattcaaagctaatattaaaacttactgcattgctaacagtaatttgtcttgcactttgttcgtgttcaatcaatatcaatgtgaacggttccgattcggaaagcaaaacaactgtttcagaaatcggaacattatcggttcattaccttgatgtcggacagggtgacagcatatttattgaactgccgaatcaaaagtgtatgctgattgatgcaggcgaaaatatgtacggcaaaagtattaccgaatatatcaataatctcggatacacaaatattgattatctcgttgcaacccaccctcatgccgaccatatcggttcaatggcttatgttgtaaagcataataatatcggcgaaatctatatgcctaaggttacaaccacaaccaagacctatgagaatctgctcacggcaattgcagacaagggacttaaagtcaagtcagccaaagcgggtatgaatattattgatggcaacgatttcagcataaatattcttgctcccgtaacaattgacgatgataatctgaacaattgctcgataattctaaaaataacttataaaagcgacagctttctgttcctcggagatgccgaaaagaaagagcttgaaaccgttacggcagatatgagtgcagaagttcttaaagtaggtcatcacggaagcagaacttcaacaacaaaagcgttgcttgaaaaggtaaatccaaaatatgcggttatttcactcggcaaggataacagctacggacatccgcacaaaagcacattaaagttgcttgatgaattcggagttgaaacatacagaaccgatgaaaacggaacagttgtcatttcaaccgagggttcaggtgtgacaatcaaaacgggacaaacttcaatgaaaagggatgaataa

SEQ ID NO: 266 - DNA, 16356 bp, unidentified
  source 1..16356: mol_type = unassigned DNA
gtgataagcattttagaggaagcaatgacgcacattgatgaattggaaatagaaaatgaagaacttagggctgaaatagagcgtcttaaggcacgtaatttaggaggacgtaaaaggcataatgcggcatggatggcttcttatcaggaatttgcaattaagtatgaagcgggtatgacaattatggaaattgtaaaagaaggtcaaatcagccgaaggacagcgtatcgttatagggcatattatgatgaaatgataaatcaagtgcaggaatctgctatgtcggataaaggatgtatttataattgaaaaaagaaacgggcaagccacaacaataagtgcggtgaaaacccatttcttgattagaatggtagcaagaagatgtttgattgtcaagaactatgtaaaaatataattgtgaataaggggatattaggatgcaaaaacttatgtcaaaggataaaaaaggaagaattttagtgaatgggggttataagatttgcaatataccaagcaattgtagccgtaatgaatgttacaatgactgcgtcatagatatgatgattaaacgtttatatgaattggaacatgccccaaaatcaataaattataacatgaatatataaggttatttcaatttcaatcatattttttgcattgaaaagaagcttttttgaagaacgagctatgagaatagtaagtgatatcggcaataatatcgcagtaaggaagattataaaaaattaatattagtaaaaccgtaatataccgtaatatgcgcatttggtagtgacaatgtagaaggttttacgaggaatgatacgtattgcgaaaaatgaaatctataaattagaacaataaaaggtgaaagaaaattattaatgaaaaagtttgaaaaattgtatgaacttataaaccaaataatgaaagtcatgttataataatttagttatattcaaaagtgaaaaaggggatagttatattggaaaaaggtgatagatatattgcagatatactttttagaattaaaatattacagtataaaggacaggcatttgaagatttttttgtttttgttatgacgaaagcggaaccaaattttcagccggttaaagcatatggtaatataggtgatagaaaaaatgatggatttgttagccaaacaggtatttactatcaagtttatgcacctagagatgttaataaagaaaaaacagtaggtgatgcggtaaaaaaattagaaacagattttaaagggttgtatgataaatggaataatatatgtgcaattaagaaattttattttgtcgtaaatgatagatatgaggggttgccagcaccaataattcaaaaagctctcgaattgaaatcaaatccattatattcagaaatagaaattgaaacttttacagcaaaagatttgcaaggaaaatttgacatgttagatgaaaatgatatgcaggagatagtgggatttattcctgatgtgtcagattgtattatagaatatgatgcacttaatgaagttgtaagatatttattgaatgcagaattgccaattagtactggagaaaaattggttgtaccagatttcgtccaaaaaataacctttaataatttaagtgaagaaattgaagcaaatcttactgtagggagctatcaagaaggattattaaatcaatactttaacgaaaatccgggaataaaggatattttacaaaaaaagtttagggctttatatgaaaaggcatgtgaaattattgaagatgagcaagagaatgcttcagattgtagatgctattatattctggaaaattccgtgcctaaaagaaccatgtcgatgcttacatgtgtctgggttttgatggcatattatttttcaacatgtgatatatttgaagaaccaaggtagataaggctagatatagaaagggatgaaaatatgatattaccgaaaaaacaattgtcagtaagtgagtccttttttggatttggtgcttttctacttcagcaattatctaaacctatgacgatagatgatttatgggaatattataaagaagaatattctaataaaagatattcgacgaaattttcctttgatcaatatattatggccttagattatttgtttattattggtgcgattgaaaaaaatgaaaggggattgctgtgttatgagactgataagtttaactgctaatcaaaaatcttttcatccaattatttttaaagatggcattaatataattgcagggaaacaggttactcctcataatgagaatgatggcaatacatataatggcgttggcaaatcattaactttacatttaattcatttttgtttgggatcaagaaaaattgaatcttttgcgaaagttattccagagtgggagtttacattaagatttcaaatagatgataaagaacactattgcatgcgatcaacatgcaatcaaaataaaattgaatttaatggagagatactgaaaccaaaagaagttcaggagagattgagagaactttgttttggattaaaagaaacacccaaagatatgacatggacaactcttttttcaagatttgttagaaaatctcgtctgtgttattcaatatatgatgcttttgttcctaaagaaagcgattatagtaaaattttgaataattgttttttgttagggatagataaggaactaattgttgctaaaagggaacttcgcgataggcaagtggctgcagcggcaacagagaaggcaataaaaaatgatccgctttttcgacagtactatttgggaaaaaatgatgcagaattagatgttgcagatttagaatatagaattgcagaattggcaaaggaaatatctgtgttcaaagtatcaaaaaactatcatgagttagaaaaagaggctgatgaaaagagttatcaaaagaaagaactggaaaataaaagagtacttgttagcacatatataaaaaatattgaggaatctacaaaggaaactactgaagtaaaagaggaaaagttactaaaaatatatgaggcagctcaaatagaaattccagagatggtaaaaagaagtcttgcggaggtaacccagtttcatagtgagttattggctacaagaaacgtacgccttcgaaatgaactggcaaaacaaaaaagagcgttagaggaaattgacagcaaaatagtagaacttggaagtaggatggatgaattgcttgattatttgaattcgcatggagcattggaagaatatgtggcattgacaaaacaattatcatctttacagaatgaattgaacaggatacaggaatatcaaaaaattttgaagacatatcgagaaaataaacggagaattaaggaggaaatgataaagcaagataaggcaacagatgagtatcttgatgaggaaagcgggtatttggaagaattacgaaataagtattgggaatatgccaaacgcttttatcccaagaaaaaaagtggattggttataaaaaataatactggagaaaatttgttgcgatattcattagaagcacgtatagaagacgactcctctgatggggtgaatgaagtaagaatgttttgctttgactggttgattttgaattgtgagataagcaagatgagatttattgctcatgatagtagattgtttgctaatatggatccaagacaaagggagactctttttagaatagtatatgaaacatgctgtaaaaaagattttcaatatatatgtactattaatgaggatgcacttgaatcgtttgagggtataatgagtacagaagactataaaaatattgttagggataatgttattctggaactcaacgatgatgcaccagaaagcaaattacttggaattcaaatagatattgacttagaggataagagtaaggtgacagatgacatagcttgaaagatgaggaatgttcatgcaaactatgagcattcctccttttgcatatatgtatttaagacatatggtagactaggaggtaacagaaccataggaaaattgttgttgaatataggcatacactacttatgtatccatagataaaagaaagcaataatataattggagagataaatacaatccctatcataacccctcagatactttcatacactgtaaaaaagtatcctgaggggttttcctttgaaagactatattgaagaacgagctatagggatagcgggctatatcatcgaccacaacgccacggtacggcagactgccaaggccttcggcatcagcaaaagcacggtacataaggatgtgacggagcggctggcccaggtgaatccggcgttggcgaagcaggcgcggaaggtattggatgtgaataaatccgagcgtcatatccgcggcggactggctaccagagagaagtatctgcaccagcactagatattcgatgaggcaaatcattctatacgggaaagtgtcttgaaataccgggtaccaacttatataatggatacatagctatatgggacaaagtagttgggacataagatacaaaagatatcaggacctttacgcggcaggatcacttatgaggagagaaaaacgaaatggcaacagagtttctgaatgatgcacggaaagagatcgagagacggacagaagacttctgtggggaattaaaagcattctatcagggcaacggggaagcggaacagaacctgatggagcagacaacccagcctttctggcaaagtctgcgcctgagcagaaaaagactgcagcagcgggaactgacggtggatatggagatgcaggagccggcacgactggcggactatgatggtccctggaaggatggttatgattatagctgccgccgtacccagccggtaaaaatgagacggacttattaccgcaagggaaaaaagattgcgttcctaaagacaccggagattgcagcggcgagctttttgaaagcggatgtgcagggagatatggttatctgccctaactgtggacatgagggaaaactgaccagctatatcgatggctgtgatgcctgcggggcaaagtttctcgtcagtgattttgaaacaaaggtatccggattttctctggaggaggacgcaagacagaaaagtatttccaactttatgaaagccggtgctgtggtgggaattacagcgatttctcttgcggtactggccatctgtgcgggcggcattatgtttttgctgttggcgttgggcaggaacggatacaatgcggtaaaggcagccgcagccatgatgctgggaattggtctggctccggtatttttccggtcgttgttttacatgctcattatatttattgtaatgttgatcgtgatggagactcgcagaaagccgagaattcaagacgaatcgaaagtaaaggccgcaatcccggaattctccacgggtaattttcttcagaatctggaataccagctgcgaatgatccatctggcggatacggtagagcaggtacgctttttcgcatcctgtgatctggatacggtggtggcacggtatcagaatgtggtggactgttgcatttgcggtgtgcgttttctggaggcggagacacggggagagtcttacagaatcagcgtggaagtgaggacccgattgacactggatacaggaaagaagatccggaaccgttatgaggagatccggctggaactggaaggcagacaggatgtggtaacgcagcacagcagggcactccgggaatacaaatgccccaactgcggaggcagtgtggacattttgggcggcggagtctgcgaatactgtaataccgcggtggactaccgaaattttggctggatcatcacttcttatacaaatctggggcagccagagaatccttctgcgaaaatactggcgggagcactgggaagttatctgctcattttgcttttgagtctggtactcatggcgcattccgaggatggaaaagatacttttgagatcttacagagtgtccggatgtcaacggaatatctgaaagcggtgcagcaggatattatctatcccgatgctgtgatttcagattgtacggagacagacagcgaagatggaacttttgcttcaataaaggtgtactcctgtggggaccgggatgcagtaaaagaagactacaaaactgcactgctggaaaagggatttctggagatgcagcagtacccggagggattttctgtctttttgccggagaatccgtcagaatatgccgcggattcggaagaaggaatgttctatcttgtgatccgcgcagaaaatgcatcggagggaattacagtaactgcgacactggtggatgagaactgggatccggtacaggaataaaaatagaataagaaaatgcgacaagggacccgggcgaaagcttccgggtcctttttagagggaaagtgtttgtagttagcttattgggtgagaggaattctgtggaccaccctgcgatagagcttccacaggagcacagcagggaaactgattgccagatatgctgtggataaaagtccggtagcaccgcctacgattgcaataattaaaattccgatgttcatgatggattcctcgcttttttgtcagtctgtaaagtgcttgctgattccttcaaaaactttacatatcgtattatagtaaacagatacccccgggtgaatagttttgagcgacccttaacaccattttgtcgggttatttacagaatctttgcaaggcatttacagaatcttaacagggcgggaacgatcccgggagtaaggtttgcaatcgcaggaaatatcaagtataatagagaaaattgactgttacccggggtggaatagtcggagaaaataaaacggaggtaggaatatgagtatgacactggaacaggctaaggagaagcttgcaaagtatggtcaggaacatgttctgaagtattacggggagctcaacgaggaagagaagcaggggattctggatcagatcgaaactacggatatgagcattctggaagcttgcaagcataaagaagatctggcaaaaaaaggagtgatcacaccgttggctgccatgcagttagacgaaatcgaagcaaacagggaggaatttaccgcaaccggtatcgaagcgatccgacagggcaaggtagcagcggtccttctggccggtggtatgggcaccagactgggatctgacaatcccaagggaatgtacaatgtgggactgactcatgaactgtatatttttgaatgcctgatcaataatctgatggaagtcgtacatcaggcagacagttggatccatctgttcgtaatgaccagtgataagaacaacgatgcgaccatagcctttttaaaggagcatgatttcttcggatataatgcggaatatgtgcatttctttaaacaggagatggctgcggctaccgattatgaaggtaagatctatctggaggaaaagggcaagctgtccacttcccccaatggtaacggcggctggttcatttccatgaaaaacaatggcatgctggacattgtacacagagaaggcattgagtggatcaatgtatttgccgtggataatgtattgcagcgaatcgcagatccctgcttcatcggagctactattcagaaaaattgtgtggtaggctccaaggtggtccgcaagaatgcaccggatgagaaggtaggcgttatgtgcttagaggatggcagaccttctatcgtagaatattatgaactgaccgatgaactgatgaatgctaaggatgagaagggagaacccgcgtataattatggtgtgatcctgaattatctgttcaaggtacaggatctggaaaagatcatggcagagaagatgcccctgcatatcgtagagaagaagatcccgtatctggatgagaacggagaaccggtgaagccggaggctcccaacggctacaaattcgagagtctggtgctggatatgatccatcagatggacagctgtctgcccttcgaagtagtcagaagaaaagaatttgcgccgatcaagaacaagatcggtgtggactctgtggaaagtgccagagaactgctcaccgagaatggtgtggtgctgtaaacatttcgacagattttcacaacataaggttattgaggaatcgatagaattacagtaatctgatactgtaagaaacgaagaaaaaatttcatccggctctgacagatgagagattgtgcagccgccatagtgaacaaatagtattgtcctatgcacggcggataggagagagtgtatgagaattttggtaacaggtggtgccggattcatcggcagtcataccgtagtggaattacagcaggcaggctatgatgtagtcgtattggataatctctgcaatgcaagtgagaaagtgatccccagagtagaagccatcacaggcaagaaggttcctttctataaggcagacattctggaccgtgaagctctggaagagatcttcagcaaggaacagattgacgcagtcattcattttgcaggactgaaggcagtcggtgagtccgtacagaagccctgggaatattatgagaacaatattgccggtaccctgaccttggtagatgtcatgagaaaacatggtgtgaagagcattatcttctcttccagcgctaccgtatacggcaaccccgcatttgttcccattacggaggaatgccccaagggacagtgcaccaacccttacggctggacgaaatctatgctggagcagatcctgacggatatccagaaggcagatcccgaatggaatgtgatcctgcttcgttacttcaaccctatcggagctcacaagagcggtaccattggcgagaatcccaacggtatccccaacaacctgatgccttatatcacacaggtagcagtcggcaagctgaaagagctgggtgtcttcggtgatgattacgatacccccgacggaaccggtgtacgtgactacatccatgtcgttgatctggcaaagggccacgtaaaggctctgaagaagattgaggagaatgcaggactgaagatctacaatctgggaactggtgtgggctacagtgttctggacatcgtgaagaacttcgaagcagctaccggcgtgaagattccttacgtgatcaaaccccgccgtgcaggcgatatcgccacctgctattccgatgcttctctggcagagaaggaacttggctggaaggctgagaacggcatcaaagagatgtgcgaagactcctggagatggcagaagaacaatccgaatggatatgaagaataataaaacaatattgaaacatacaaagggacatggccggtgggtcatgtccttttgtgattcttaacggtgaaaaatctgaagcgcccggaatacctgctctacggtatccgccatattggtcatggcattgtcggtatgcatagcctcatccagggataccacgttccgcagaatcgggaaaaaggcatcgatgccctctgcgttgcaggcaacggcctctttggccacgcagccggaaaaagcaagtaccggtttttcatattttttggcaatcttggcaacaccgatgggagcttttcccataaccgtctgaccgtcaaggcggccttccccggtgatcacgacatctgcatcccggatatatttttccagatgggtttcttccagaatgatcttaataccggattccagtgtggcattgcagaaggtaagaaaagcaaaccccataccgccagcagcaccggcaccgggatatttggcatcggcatgaggaaactgttctctggccagagcggcataataagccagccatttgtccatctgcaggatcatagtggaagtagcgcccttttgcggtccgtagatggcggaacatccctgctctccgcagagcgggttggagacatcgcaggctatgcggaaagtacattccttgagttcgggaagcacatgatccgtagtgatggattccagatcctccagtcctttggctccgaagcggatctgatttccgtttttatccagaaagccaaagccaagtgcctgcagcattccgacaccgccgtcattggtggcactgccaccgataccgacaataaaatgccggcagccgttctggattgcatctttgatgacttcgcctacaccgtaagtggtggtgttcagaggattcttttcctctccgctgacctgggtaatcccggcggcaccggacatttcaatgattgcggtatgggtctcgtcgacgatgccgtaaggacagacaacggggtgaccggaagggcctgtgacctgcacctgtgtcatacggccgtcacagccgtttaccagagcatcgacggtgccctccccgccgtccgccagaggacggacggtaatatgagcatctttataaacacgtttgatccctgtggcggcgctcaaacccgcctgcatggaggtcatacttcccttgaaggaatcgatagctattactacattcataaggttcctttccgctgccgccggaattcggccgacaactgtcgttttcgtatagattttcggaaaatggcataatttctgaggatattatagcaacaccggaacaaaagaggaatggttcccggagaaaaataaaatttagcgtggtacagtggcaaaaacatcttataagatcattgcatctgagaaaacaatccagtataatgaaaggagtgcacatttagatgcacattacgcataagaagtggaataacaggaggacgagcatgattcagttaacacagggcggcgcttacctggtaaacggtacggacatcgtagcggataccccggaagcagccagtcagatacaggcgaagaccggcattacgatctccaaagaagaagcagcgaaaaacaccatggcatatggtattctgcaggagcataatacctccggcaatatggacaagctgaagatccgtttcgacaagcttaccagccatgatattacctttgtaggtattatccagactgcgagagcatccggactgcagaagttccccatgccctatgtactgaccaactgtcataactctctgtgtgccgtaggcggtaccatcaacgaggatgaccacatgtttggtctgacctgtgcgaaaaaatacggcggagtctatgtaccccctcatcaggcagttatccatcagtttgccagagagatgttagccggcggtggcaagatgatcctgggttccgattcccatacccgttacggtgcactgggtaccatggctatgggcgagggtggtcccgagctggtaaaacagctgttgaaccagacctatgatatcaacatgcccggtgtggtagccgtatacttaaagggtgctcccgtgaagggtgtaggtcctcaggacgtggcactggctatcattggcgcagtattcaagaatggctatgtaaaaaataaagtaatggagttcgtaggtcccggtgtggcttccctgagtgctgatttccgtatcggcattgatgtaatgaccacagagaccacctgtctgtcctccatctggaagaccgatgaccagatccgtgagttctatgggatccacggacgtaccgaagactataaggaactgaatcccggccaggtagcatactacgacggactgatcgaggtggatctggacaagatccgtcctatgatcgccatgccgttccatcccagcaatacttacaccatcgaagagctgaatgcgaacctgatggatattctggatgagacggagaagcgtgcgaaagtaagtctggacggtgccgtagactttattttgaagaataaagtaaagaacggcaagttcattgtagatcagggtatcatcgcaggctgtgccggcggcggattcgagaatatctgtgcggctgccgacattctgaagggcagatacatcggtgcggatgagtttactttaagcgtatatcccgcatccatgcccatatacatggagctgatccgcaacggctgtgcggctaccatcttagagaccggtgcagtgatgaagactgcgttctgtggtccctgcttcggtgccggtgatacgcctgccaataacgcattcagtatccgtcactctaccagaaatttcccgaaccgtgaaggctccaagctgcagaacggccagatcgcttccgtagctctgatggatgcccgttccatcgcagccactgcagccaacaagggtgtgctgactcccgcaacagacttcgatggagatttcggaaaatacaaatatcatttcgatagcaatatttacaagaaccgtgtcttcgattcccacggtgtggcagacgagagcgtagagatccagttcggccccaatatcaaggactggcccgctatgggtgccctgcctgagaatctggtactgcaggtagtatccgagatccacgatcccgtaactactaccgatgagctgattccctccggtgagacctcttcctaccgctccaatcctctgggactggcagagttcactttaagccgtaaggatccgcagtatgtaggacgtgccaaggagatccagaaggcagagaaagagcgtatgaacggcggacatccctgtcaggcagttccggtactgaaggatgttatgggtgaagtaaagaaacggtatcccgatgcaagtcgtgagaacaccggattcggttccactattttcgcagtgaagcccggagacggttctgcccgtgagcaggccgcttcctgccagaaggtattaggcggctgggcaaatattgccaacgagtatgccaccaagcgttatcgttccaacctgatcaactggggcatgcttcctttcctgatccagcccggagacctgcctttcaagaatctggattacctgttcattcccggtattaagaaagccgtggaagacaaggccgaggaaattaaggcatatgtggtaacaaccggagaaggcatgaaggaattcaccctgaagctgggagagctgaccgacgaagaacgtcagatcatcctgaagggatgcctgatcaactataaccgagtgtaactattcagagacatgtgacgaaccagcgcagatgcgtttcgcgaagagaggctgaatagttacaatgagaagtaaggagaaaaaatatggaatttaacaaaccggtatccaaccccatgatggtgggatccattgaattattaaaagcagaggacaccccggaacacagacagatgttcctggatgaactgcagaaagcaaagttcctgtctccggtcgtgatcgatccggtgcctgtgcccgatgaaaacggccgggtgaccatcgcaagagatgccaaagtacagttcccgatgctgtccaccgaggacggtcggaagttcttcatggcgttcactgactggacagagctaaaaaggtggagagatgaggagaatcagcagactttcgccatgaactttgacgattatgcgggaatgctgctgcgcaaagatgcacagggcaatatcagcccggcgctgggattcgtgatcaatcccttcggtggcaacatcgtggtgaccagagaaatggtagccagcatgatctcagcaaagctgaaagcagccggcagaccggtgcctcccgcacccggaacccctggcgctcccactcagcccaaacagcagtaaattaacactaaataaaatgtccatagcggacgatataagtagcagagaggtgacatggccagtcacttcctgctacttattttttacagtttgataatgacaccacggatggtaaccagacagaggcatattatatgtattctgtttctttaccatctttttttagtttaacagttcagccatgcaatatcatatgttctgcgtggatgctggcacacaaagcagaacatatgatattgcatgctgcggtgaactgttaaacgttacaggaagcgcgccctgttggttcgtggtgaggtcggggaaaggagaaaattacagatttgagaattgattccgcaagcataggaatggattccgtcagaagctatcacgcttctaagacaagcgtcagacgatttgagataacggattatcaggcaggtctgacagatgtatccactaagggacagaagacaccgaatggtgaggataccacacagaacacggaggaacaggagaacactgcagagaacaccacgatgacagccaaagactggcagagtcgttttctggtatcttctgccagatgggatatgcgaagcagtgccagtgaacagacattgtctaccatccgggaatatacggtgcgttatatttttgatttattattcccgtccaggaacagcactttgcgggactggatgcaggaaaacggatggagcagcggtaatcagaccggaaacagctggaatacagggaatagcgtaaataatacccagacgaattccggcagcacacagggaaccgcaacacctgcatcagacgtgttcaatctggtcacgtcccgtgtgaaaatattgaactatgtgagcgagacctggaacatagaacaggaggataccagtttttccaccgtgggaagcgtgcggaccaaggatggcagagaaatcaattttaatgtaaatgtaaatatgagccgcagatgcgaggaatactacaaagagcaactcaatgtagcagaattcacgctccatgatccgctggtgatcaacctggatactgatgtggcagaagtgtcggatcagaccttttattttgatctggatgccgatggcaaggaagaagagatctccgtgctgaatggcagcggctatctggcactggacaagaacggtgacggcactatcaacgacggcagtgagctgttcggcacccggaatggggatggctttgcagatctggcgcagtatgatgaggatggcaacggctggatcgatgagaacgattccatctggtcaaaattaaaaatctggtgcaaggatgaaaacggcaacgacgtactgtacaaactttctgacaagggtgtcggtgctatctgtctgcaaaacgtttctacggattttaccctgcagggagaccgtaaggctcaggacggcactaccaatgccaatgcgaccaatgctgtggtccgcaagaccggtattttcttatacgaaaacggaaatgtgggtacggtacagcacgtggatatggctgcctatgccgcacaggcatagaataaatataactattcagttacttcgccctataaatagcatcaaatgttcttacgaatgcaaacattcgacgctatttacatggctctgaatagttccaaataaatgcaaatttcatatcgaagacattctgaataaaacccatgaatcgggcaagactataggataaaccagggaaagtggttgaaacgattgtatagcaggcagttgactcagggaacaggaaggatgcggataggatatgagaagaaataaaaagagcggtattaacaaagaacgtattataatgttagcctcttcagcctttgtactggcagcattgaccatgacaggggtctatatgaaggggcagaatgtggagtccagggatgatggttataccttggacttcactgcgcttcccaacaatgcggatgacaaattacaggagatcacggagaataacgacgaacatcttctgaaggaggacgagaacatccccggactgacggcaaataatacagcgggaaatgagatcgcgggagctcctgtcaccgaggatgatctggattatatgccccaggaggtaggctccggcaacgtagagattccggggctgacggatcaggagacgctgctggaggccgcacagaaagagcagcagaattccgatgccgaccgacaaaaggaagagaccgggggaaagcagacagcaggcggggatgtggtcgttgagaagacactgcactttgcagaaagcgacggattacagcaaccggtgcagagtgatattctgatgcattactctatggacaagagcacttattttgctacactggatcagtataaatacaatcccgccaccattttttccgcggaagaaggtacggcagtgaccgcctgtgcacagggaaaagtgacttcaatcttcgaaaatgaggagatcggcaaggcggtgaccctggatctgggtgacggctatgaggccacttatggacagctgacggagatcacagtgaaagagaattcctatgtgaatcccggcgacgccatcggcagtgtggcagcgcccacgaaatactacagcaccgaaggaagcaacgtatactttgctctgacccacaacggggaaccggtgaacggggaggcattgttccgctga

SEQ ID NO: 267 - DNA, 12598 bp, unidentified
  source 1..12598: mol_type = unassigned DNA
ttacttattgcctccttttttgatttcaccaaggtagaacgcctttgccagactcatcatctgggtaacagggcgctttgccgggcagacgaaagagcagctgccgcagttgaagcagtagtctgcatgcagcttgctcagctcctgcacatcgcgtgcagcgtatgcctgattgacctccacaggctccagacccatggggcagtactccacgcagcggccgcagcggatgcagggattcaccggtgcaggctctgcagcggccttgctcaggaagatcaggccggaggtggtcttggtggtggggtagctcaggttctccacagcggggcccatcatggcaccgccggcaaccactttgcccagctcgcccttgacacccgcaaaatcgatgatgtcctgataggcagtgcccacggggacaacgatgttctggggctttgcgcaggcgtcgccgtccacggtgatggtgcgctcgaccaccggcataccggtagccagatacttgccaagggtggaaacgctggtcacgttcatgacgatggccccggcatctgcgggcagaccgccgtggggcacttcgcggcccagacacttttcaataaggatcagctctgcgccggtgccgtagacactgggcaggggcttgacctcgatggtgctgtcgccattggtctttttgcacagcaggtcgatgcactcgggcttgttgttctcaatgccgatgacgcacttcgggatgccggtgtactgcaacacggccttgatgccgcggatgatatcatcgctgcagttcagcatctcctgcgtatcgctggtcagccacacttcacactcggaagcgttgatcagcagggtatccacctgctgcttgggctgcagctttacgtcggtcgggaagcctgcgccgcccagaccgaccagaccgcactcacgcacagccttgaggaagctggccttatcggtcacttccggtgccttgacagccgggtccacggtctgtttgccatcggtcttgatgacgacagagtcgcacatgcggccattggacagacggaagggctccactgcggcaaccgtgccggagacactggagtggatgtttgcagagacgaagccgccagcctcgccgatctttgtaccaacgaacacctcgtcgccctttttgaccagagcttttgcgggagcgccgatgtgctggctcatgaggatgcgtacctgcgcgggcagaggcatcgggatcggtttgcttgcagcagttgccttgtcatgcggcgtatgcgcgccaagcgccgcacgtttcagcttgttcaacatggaattcaaatcccccattctgcttgaattgccgcccccacgcccatgcaggcgcactggtacagggacagcagctgcttaacatgtttattgtatcattttggcgtgggaagtcaacgacaatggcacaaaaatgatgtgttttcctgaactttcttttcattttttcgtggttatatacaactaaccaccgtatttttcttcctgtatccggtgtttgcctttgcagacgaaatatggtatactattattaacattcacttgcggaacgtcccccgctccgcgcaagacttttccaaggaggcttcaaaccatgaaagttctcaaagtgctgctcgcattgctcaccacgctggccgttgccctgaccgccgccctgctgcttgttcaggataaaaacgcgccccgctatatccagatctacgaaaacgagcagtaacacccgtcttgcacaaaaagcatcccccagcctgagcggcacgccgcccgggctgggggatttgtgttttgcggggcaaaagggcagcaaaaagccccggcacgcggaggggttctccgtgtgccggggtgctgcgccgaagcacttttttcttaaaaggtgttatgccgcgtggttggcataaaggatcacaacgtattccttgccgccgatcttgcccattgccacgccgacgtcaacattgtcgcccagctgctcgatcgttccgatcttcacggctctgttgggtccatcgttcgtcgtataagggttgatggccttcaccatccactgcagctgaatgtactccataagcgctccgctactcttgaactgaacattcggagctgcattgaggatatacgcatcttttgtggtatcaatgccgaccgccttcacgacatcttcggctgtcaggatcgtttttgcatcctcgcccttgtgcgcgtcctgcccggcaaccttgtctgcttcctgcaccagctttgccgccaatgcatccagctccttgctgtgggttgcggtactgccggccacggtcatctgatctattgccagcttcagcagttcatccttcagcgaagcgctgctgccgcagcccaccatcgtcagcgccagaaccgccgccaatgcagcggctgccagtttcttgaacaatttcatggttttgttcctcctttatgctcctatcagcctacgagcatcctgctcttagagcctcggctgtcagttcaccaacacgacaatataatctttgccattgatcttacccatggcaagacccaaattgctcaatttctccagctcgccgctgccgatttgcttaccattcgtcatcagcatctctgcgatcagcactgctttctgtttatttgcggtgttgctgaccagcttatagttttcagcagccgacacaatgtaagtttcctgtgcagcatcgatccccgcagcctttacgaccttttcatcggtgagcagatccagaaccgttttgcctttattatcaggctttgcagcagccttgtctgcctctgccaccagctttgccgccagcgcatccagctcttttgagtatgtgatctcatcgccctgcattgcaatgaaatctgcgaggacatttttgatctgatccgtgaggctgttgcgtccgccacagcctaccatggtcagcgccagaacagctgccagcatagccgctgccagttttttgaagagtttcattttttgttcctcctttgtcagaaaggtatctcacagcccagaccgaacctctccggcctgttttctccattttaccatccccctatagggtctcgtcaattcgtagaaaaaacaaaaaacaagtccgctttttggcacaggtgcgcatggttttttgagccgtgccgtgttttgctgccttaaatggtgctgtgcggtgcggccgcccgcgaaaagaccctgcgacgagtaaaaccccgccggtatttctccggcggggtcgcataaaatattgctctcagtaatccttttcgcagcccagcaggtatttcatgtgctcaaaggtgcggtcgtgcccaaggtcgcgcaccattttcagcagctcttccagcagggcacgggtctccgggtggagcaggtagtgggtcttgctgcgctcgtagtattccaacggggaagcatcggtgtacttgtcgcccagatagatctggcttgcggccacgcggtcgcacaccatttcgcacacatagcgcaggggcatcttcatgccggcaaggcccaccttccgggtgctgtagtcgatccagtattccagatggtgcttgttgcggcccttgtggtgcagccacgcggaggaatagccccgcgccagacgttccgcttcgttggggctgtggtcaccctgataatagatgcagcccggaatgaactcggtagggctgtacttgctcaggtcgtgggcaaggccctgctcatagagcccgcaggcaaagcagtatttcatcaccagcagcttgtgccgggtgatggtctcaaaatggcccttgatgttcatgctgttatttcctccactgcaccgtgatacgtccctctttcagcccgcgcagatcattgctttcggaaaaatcctcccggtccatggtcaggttggggttgtagtaggggtcgtgcaggatgttcgccttgccgtgcacggcatacagccgctgctgctcggcggcaaagcgccgggccttcactgggtctttttcgtcgccgccgcggctcttgctctcgtaatgggtcagctgagcatagggtgtccacgcaatgcggcagcctgcatcccgcacccgcaggcagaaatccacatcgttgaaggccaccgcaaaggcttcgtccagaccgcccacttcgtcccacacgctggtctttaccagcaggcaggcaccggtgacggcggaaaagtcctgcaccgttgcagcgcggaacatgtagccgctgccgcccgccttgcggtatttgtggctgtggcccgcgtagccgccaaggccggtcacaacgcccgcatgctgcaacgtctcgtccgggtaaagcagctctgcgccgcagatggccgcgccgccggggtgagcacactgccgcaaaagctccgtgagccaatccgcattgcgcacctccacgtcgttgttcagcagcagcagataatccccgctggcgtactgtcggccaaagttgttgatgccggaaaagttgaagcccttctgcgggtagttgaccacctgcaggccgtcgtagcgctgccgggcttccttataataggtaaaggtggccgggtcggtggagttgttctcgatgacgataacctcaaagttctcccagctggttttggtccagatgctgtgcaggcacttttccagatcgtcggtgtggtccttattggggatgaggatgcttaccttcgggtcgcccacgatatcccacttcacccggtaggtactggggaacaggccatcctccacggtgccggtgcgtccggtgcgggccagatggtcggccagcgcctttttggctgctgccgccacatagggcttggcatcggtgccgccggaggtggagcctgcgtgcacccgccagtagtacagcacctgcggtacatgggccgcgccgccagtcttttccacaaggcgcaggaacaggtcgtggtcctgactgccgtcgcactccggccgctccccgccgatctcatcccacagcgccttttggaacaccgccaagtggcagatgtagttgcagcacagcaggtagtccggggcgtaatccggcttgaagtgggccaccatgggccgctggatgctcttggaaaagagtgcttcatcgctgtagaggaagccgtccggctcgccctgcgcccgcagctgcagaatggctttgcccatggtgtacagggcgtggggcgcaaggatatcatcgtggtcggcaagggccagatattcccctgtggcaagctctgccgcagcattggtgttggccgcaatgcctttgttttcgatctttttgtatacgatacgttgatattttgtctgatattcctccacgatgcgcttcacatcggcatgttctgcatcggaagcatccgcaaggcagagctgaccgttgggggccgtctggttcacaaaggaatccagaaattcccgcaggtattttcccggtgtattatacagcggggtcaggatgctgatggtgggcaggccgcagtctgccgccgttttgccggccatttcggcccgctgggcttccagcacctttttggcgggcagatagcgggcacgcttgccaaagcagcggcgcttgacaaagcccgcgccccgtttgagcatggtgggcaggccctcgtccctcgtcagctgcaccgcatagcctgccagttctctggcacgtttcagtcgtacattcatatcaggcctcgccgcgctgcgttgccttgtaggccgcgcagaccgttgccgtatcgccattcattttcaggtggccgtggctcagccatgccaccttgctgcacatgcgctcgatctgctcaatggagtgagacaccagaatgaccgtggtgccgcccgccatcagctcctgcatccgcttttcgcacttctgctggaacaggaaatcgcccaccgaaagcacctcgtccgcaatgaggatatcgggcttggtgatggtggcaatggcaaagccgatgcgggccaccatgccggaggagtagttcttgagcggcacatccagaaagttctgcagctcgctgaactccacgatctcatcaaacttttcgtccagatacttgggcgagaagcccagcaccgtgccgttcaggtagatgttctcgcgggcagtcaggtccatatcaaagcccgcgcccagctcgatgagcggggcgatggagccgcggaccgtcaccttgcccttgctgggcttgtacacgcccgcaatggtcttgagcagggtggacttgcccgagccgttcaggcccacaaggccatagaaatcgccgggcatgatgtccagactcacgtccttcagggcgtagaattcatcgtactgcaggcggccctgcaccatggcaaggaagtattccttcaggctctcatgcttttccttggagaggttgaagcacatggaaacattgtccactttgatgatcggttccattgttcttcctccttaaatatgcagcacaaagcggtcctgcgttttgcggaacacccacacgcccaccagcatggagagcacggcgcagcagccgcacaccgcgaacatgttgaaatccagcgggatgccccacatcacggtacggcggaagcctgtgatgtaccagtacatggggttcagcttgatgatctgctgcatgttgaacccgccaatggaaaaggtcatctgggtggggtcgtagaagatggcggaaaaatacagcaatgcggtgatgaacacgctccagatgtgcatgatatcccggaagaacacggtagccgctgccagaagcaggcccacgcccagactgaagaagaacagcgtcaccagcgggtagaccgcctcgatgagggtcaggtggaagggtgcaccggtaaagatcatgaccagcagcagcgccacaaagctgaacacgcagttcaccatggcaaagcagcacttttccagcgggaagatatacttggggatatacacctttttgagcaggggcgcagcgcccagcacactgctcatgccggtggaggtggcctcgttgaagaagttgaacagcagctggccgcacatcaggaacacggcaaagttgtcgatgccgctgccgcgcatgtccatcagactgctgaacacggcccagtacacaaggcacatgagcagcgggttcagaacgctccacaccacgcccagcacgctgcggcggtatttgagcttgaagtcacggctgaccagattccacagcaggtagcggtagcaccagaagccgttccacattgctttgaattttgccacaggcgatcaccacttttcaaaatattcaaacttctgtgcagcaaagggctcgtgcagcttgtcctttgcgctggtcttgtgctcgcagccgcagtccggccactgcacgttcacggtggggtcatcgtaggggatgccgccctcgctggtggggtcgtacacatcggtgcacttgtagcagaactctgccacatcgctcagcaccagaaaaccgtgtgcgaagccctccgggatatagaacatcttcttgttctcctcggaaagggtcacgcccacccacttaccgaaggtggcgctgtgggggcggcaatccacggccacatcaaacacctcgcccttggtcacgcgcaccagcttgccctgcgtgtgctccttctggaagtgcaggccgcgcagcacgccgcgggtggagcggctctggttgtcctgcacgaattccttatcgatgccggcttcggcaaactgatccttctgataggtctccataaaataaccgcggtcgtcgccgaacacctgcggctcaatgaccacaacaccgggaatctcggtctgagtaaacgtaaacttgcccatattttgtacctctctttttgtgaagcatgtttgttttatctggaaaagtctgttcgacgcaggcttttgcgcttatttgccgcggcgggtctgtccctgttccgtgcgcgttctgcggcgtttcttccgccaagtgatgaaccgcaccaccagaaaagtcaccagcgctgccgctgcggtggaccccagcgagatgcccagcagccagaatgcatggctttggggctttaccgccttggccgcttccaactcctgaccggtgctgttctccagcagttcaggcaggccggaaatttccgcatccacacgcacgctggtgctctcctgcttttcgccgccgtggacggtgtacacagcgtacacctccgggtcggagccaaggacatagctttccggcagttccagcgtcacctccacatcgtcggcagtcaggccgttggccagcagcagccgcacgccggggtcggagacggtcacggtgccaaggctcccgccgccgcccaccacgctcagcggtgctgtgatgccctgcgcgggcaggtcggtgtagccggtaaaggtgctgaacgcataatccagcagggtgcgcatatcgttgtatttatcagtgctcagctcgctctgcatggtcacgcagatgagccggacgccgttctgctccgccagacaggcgtagctgtagcgggccgtgttggtatagccgagcttggaacccagaatggacgagatgtagtaccggctggagccaatgcgcattttgtcctgctgggaaaagtagcgggtcacgggctggatgttggtggggtccatggtgtacatctcattgcgggtgaacacctgctcaaagcccggctgctccagtgcccagcgcaggatctgcgccatatcgtagcagctggtgtagtggtcctcgtcgctgatgccgtgagggtttgcaaagtgggtgtgcgcaaggcccagctcttctacccgcgcattcatctttgccacgccgtccgcgatggtgccctctcccacatattcggccaacaggttcgcgccgtcgttggcactggccatctgggtggcgtacagtgcatcggtcaggggcacttcttcgccctcgcgcagggcaatgtgactggaatcggtgcccgccagcgagtaaacatcctcgtgggtcacggtgagctttatatcatcccagttcccctgcgccttttcgcaggcaaggcccagcgtcatcaccttggtgatggatgccgggtgcagctcttcgttcatattctgctgtgccagcacaaggccggtgtctgcatcgatgatgcagtaagcgcgggtggaaccaagggcagggccagccgccgctgcccccggcacgaacacgcagatcataagcagcacaacgcacagcgccgctgtcagttttttcatctggtttttctccattgagcgtttttctgcccgtcgtactgcaccggcaaagcatcagataatagtataccacactttaccccggctgaaaagccattcagacgttgttttgcagcagaacgggctgcagctgccgcccggtcagcgcagcgtccagtgcagcgggcagacgggcaaagtccgctttcaggctgttgggcttgtgggtggggtcatcctgcccgtagggcacaaaataatagtgcttgcgctggtagagccgggccatgttctcccacgatgcgcccaggccgtcgtttgtggaaacgcccaccagaaccgggcaccccacccgcagcaggctctttgccgccagcgtcaccggcgtatcggaaagccccgccgcaagccgtgccagcgtggccccggtgcagggcgcgatcaccagtgcactgaccagctttttagggccaagcggctccacggcctgcaatgtgtccagcactgcatggctggtaagggcttccagccgttcctgccaaaactgcccggtgccaaagcgggtatcctgctttgcggcaaagctcataatgggcagcagctcccagccctgttctgtcagctgctgcgctgccgcaagcgccgcttccagtgtgcagaagctgccgcacaccgcaaatgcaatgcgtccttttttctgcgtgctcatgtgtgttcctcccgctcccgcaaaatggtcagcacggtgcgtgccaccgcttccccagccgtgtccggtgcacaggcggcgggcaggctgagcgcatggatggccttgcagcccagccgctgcgccgcagcaaagtcggtgccgccgggctttgatgccagatctacgatcaggctgccgggccgcagagccgccagcaccggctcggtcagcaccggggccgggatggtgttcaccaccgtatcaaaggccggagccagcgcggccagccgggcaagctctgcaccccgcagaccaaggctctcggccagcgcacgctgttcggcgcgccgggcacaaacagtcacatttacccccagtgccgccagccgcgcccccagcgcctgccccaccgggccaaagcccagcagcagaaggtttgtgccccacagggtacgggtgcgctcggccagcaggatgccaatgcagccctccgccgtagggatggcattgtacaccgtcagctccggtcgggcaaagtaatccaccagctccacgccagcttcctgtgcgatggtctttgcctgaactgagagcctgccgcccagtgccaccgcgccgggttttgcagcccgcagcagctctgccagcggggtgcgggccgcatccagcggcagaggcagtaggatataatctgccagtgcaacctgttcggctccgcccaccgcataacctgcccgttccagcacccggcctgccgccgcctgccgggcatcggtgcccaccaccgcaaacagctttttcgcttccatgccgcatccccctttgcctgctcgtgggccatcctatgcaggagaaatatttgttgtgaaaaaactcctccagctttcgccggaggagttttttatcatgattatagaatgcgccgccctgacatccggcacatcttttattttacgaactttgccacagcacgggctacgatgccgcccagaatgccggagacaaggaactcggccacgccctgcacgccgaccagcagcaccacgaacatgaaggggttcgcagcacccttgacggacacgaggttctgcacgtagtcacagccgtagaaggccagcacgatccagcccatgaagaacaccgtgttcaggaacggggcgctcatggcgctgacgatgtagctccatgtgccgggcttgtcaaagcgcttcaggctgctgaagatcaggccgcagcacaggcccatcagcacgcgcatacccacgcacaggataaaggtgttcacagggcttacctgaaacagcgcacccgtcatagcggaagcaccggtgatggcatcgtagaagctcactgcgccgaacacaccgcccagcaatgcgcccacagcggggcccatggtgatggcacccactgcaatgggaagggtcaggaagctcatgtacagcgggcccacaggcacactgcccagacccaccatcttcatgaccagctcaatggcaaccagcagcgccacacgggtaagagttttcgtatttttcatattcagttttcctcctgctgccgttccgccctatacgtcggatacggcgcaaacctgcccgctctatgcgggttttaaagtaaatattcaaaccatttggagcgcgtttttgtcagggcgtgttccaatgggaaaagctttttcagtggtcgcacgggaagcggatgcccgcattgcggcgggccaccgtgagcacacggctcaccgcgatggtggtatcctgcatccggccgcacagctcctgatctccgctctccagcgcacgggcaaaggcttcaaactctgccgcctgccggggcctgccgccattcaggttatagtgctcttccttgccctcgttagggtggaaggtgatgccgccgcagcagttggcggtggacttctgcaggatatagcccttcgtgccctgaatgatgtaccgggccggggccgcgcagtccttggcggcgatgctcacggccttgaagccgctgtaatccatggtcaggatgccgctggtgtcgatgccgcgctccatgttggcggtatacttggcctgattcggctccccgaacaggcccacgatgtaacttacattatatacgccaagatccatcagggcaccgccggcacaggccgggtcaaaggcaggctgtacatcgcctgcacagaaggcatcgtaccggctggaatactggctgaaattgcactgtaccagcttcacggtgccaatgcggggcagcagctcccggatctttgcgtagttttcaaggtactgggtggtgatggcttcaaacaggaacacctttttgtgccgtgccagatttaccagttcttcagtctgggccgccgtgggtgccagcggcttttccacaataacatgtttgcctgcttccagcgccacgcgggcatagcgcacatgctgcaggttcggcactgcaatgtacaccacatccacccactgcaacagttccagaaaattggtggtgtgctgcggcacgccgtactggccgcaaaggctctgagccagctcggcactgcgctcggtgctgcagatggcctgcaccgtaaaaggcgtgtgctctgcaagccatggcaaaaattcccgcacgatcttgcccgtgccaagaatgcctaatttcat

SEQ ID NO: 268 - DNA, 9573 bp, unidentified
  source 1..9573: mol_type = unassigned DNA
atgaaagagtgttgggtcaccgagccgctccactttgagatgcgcgagactgagatccctgaaccgaaggacaacgaagtccagatcaagatgatggctgctggtgtctgcggcagcgacatccatatttataagggcgagaaccccaactcccgctacccgctgatccccggccacgagaatgttggtctggtcaccaaggttggcgcagactgcaaaaacatcaaggtgggcgaccacgtcgtgattgactacgtgattcgctgcggcgagtgctaccagtgcaagcatggccgcggcaatgtctgcgagcacgttctggtgcgcggcagcggcaccaacggcggctggcgtgaatactggtgcgtcgaagagccttacgtctacaagatcgacgacagcattccctggaaagatgccgctctgatcgagccgctgaccatcggcgagcacagcaccagccgtgcaggcgtgtgcgaggacgatgtggtgttcattctgggcaccggcaccatcggcaccatcattgcacaggcctgcaagctcaagggtgctaaaaccgtcatctgctgcgacatcagcgacagtagtctggagcgcagcaagcagttcggtgccgattacaccgtgaacagcaaaacgcaggacatcgttgccgaagtgcagaagatcaccaacggccacggctgcaccgtcgcattcgactccgcctgcttccccggcagcctgaccatgatcatgcagcccggcatcgtgtgcaacgcaggccgtgtggtccccatgggcttctgcaccgtgcccgaaaagatcactcagcagatgatcaatggccgtgagctgaccatctgcggcacccgcatgagcctgaaccagtgggtccccactgcacagaagatggccgagggcaagtaccacatggaaggtcttgcaaccaccttcgtcaagttcagcgagatcgaaaaggtcttcgacaacatcgttcatccggacccggccgtcaagaagaccgttatcctgttcgacggcgcagaggactgaccctctggccctgatataaacacgtacattataaaatagaaggagatcattattatggctgctcttactaagtttgatattgccggcaagcatgcgatcgttaccggcggcgcacagggtctgtcccgcggcatggccgaaggtctgctggaggcaggctgcaaggtcgtcatcatcgatgtccagaaggaaaaagtggaaaaggtctgcgaggagtaccgcgccaagggtctggaagcctactctgtcatcggcaatctggctgaccgtgaggacctgaaccgcgccttcgacgaagcactgcagattttggacggtcgtctggacgttctggtccccgctgcaggcatccagcgccgctatctgcccgaggagttccccgcagagcagtgggatctggtcatgaagatcaatctggaccacgtctggttcatgatccagcgttctctgcaggtcatgctcaagcagcccactggcggcaagatcatcaccatcggctccatggcttcctacttcggctgcaccactgtgcctgcctacaccgcaaccaagggcgctgttgctcagctgaccaagagcgttgctgttgactgcgccggccgcggcatcaacatcaactgcatctgcccgggctacatggacaccgagatgtgcgccaacatgacgcaggagcgcaaggacgagtgcaccaagcgcatccccgctggccgctggggcctgcccgaggatatgaagggtcccgtcgtcttcctggcttccgctgcatccgactacctgaacggtgccctgatccccgttgacggcggctatctggtcaagtaatcaacacataaaaagggaggaaccctgtcatggcccctaccatacgcgatattaaagtgatctgcaccgcccccgagggcatcaatctggtggtggtgaaggtggagaccagcgagccgggcctgtacggtctgggctgcgccaccttcgcttaccgccacctgaccgtgcagcatctcattgagacctatctgcgtccgctgctgatcggcaaggatgtgcgcaacatctccgacctgtggcagctgatgcaccagaacgcctactggcgctgcggccccatcgtcaacaatgccatctccggtgtggatatggccctgtgggacatcaagggcaaaatggccaacatgcctgtgtacgacctgttcggcggcaaaatgcgcgccggtgttccggtgtaccgccatgtggacggtgccaatgtggacgagatctgcgagaacatcgagaagtatcgttccatcggtgtcaagcacatccgctgccagtgcggcggctacggcggcggcggctttggccctgctccggagtgggcagccaagggcgcagagccgggcgtgtatctggacagcaagaagtatatgcgcgacaccctgaagctgttcgacggcatccgtgccaaggaaggcttcgacattgatctggtgcacgatgtgcacgagcgcatccaccccaccgaggctgtcacctttgtcaaggagatggagccttacaagctgttcttcatggaggacgttgtgcctctggagcaggtggaatggctggataagatcaagcagaccagcgtgaccccgctgagccagggcgagctgttcaacaaccctgccgagtacaagaagctggtgcagaaccgcagcatcgactacatgcgcgtgcatctgagccaggtgggcggcatcaccccggcccgcaagctgcagatgttctgcgagcagtatggtgtgcgcatctgctggcacggccccggcgacatgagcccgctggcccatgcagccaacatccacatcgatctggccgctcagaatctgggcctgcaggagtggagcggcatcgaaccgcccaacttcgtcatccagaagctgaaggataaccacggcgctctgctggaagtgttccccggtatgcccgagtacggcaacgacggctttgtttacgccaacgacaagcccggtctcggcgtagacctgaatgagaaggaggccgcaaagtatccctgtgagaatactgtgaccacctggacccagacccgcaaccgcgacggcagcctgcagactccgtaatttgcaataatctttgacactgtacgatccctgacggagaaacacggctggaatcgtacagtgttttttgttctcaaaggagcattgctatgaagatcacaaaacttcagacatggctggtgcgtccccgctgggcttttattgagatcagcaccgatgcaggcatttccggctggggcgagccggtgctggaaggccgcgccgccaccgtatgcgagtgcatccatgagatggagccgtacctcattggtgccgaccccatgaagatcgaagacctgtggactgtgctgttccgcggcggcttctaccgcggcggcggcatcctgatgagcgccatctccggcatcgatcaggccctgtgggatatcaagggcaaatactgcaatgtgccggtctggcagctgatgggcggcagctgccgcgataagatgcgggtgtacagctgggtgggcggcgaccgcccagccgatgtgggccgcgctgcgctggaaaagaaacagcagggcttcaccgccatcaagatgaacggcaccgacgagctgcagtttctggacagctacgccaagatcgatgccctgctggagcgcgtagccagcgtgcgtgagagctgcggcaaggattttggcattgccattgattttcacggccgggtgcacaagcccatggcaaagatcgtggccaaaaagctggaagagttcgaccccatgttcattgaggaacccgttctctgcgataacatggagtatttccccgagattgcggcggcctgcaacatccccattgctaccggtgaacgcctgttcaccaagtacgatttcaagcatctgctggccattggcggcgtggacatcgtgcagccggacctttcccatgccggtggcctgaccgagtgcaagaagatcgccgccatggccgaagcccacgatgtggcccttgctccccactgcccgcttggcccggtggcccttgccagctgcctgaatctggatgccacctgctacaacgcggccattcaggagcaaagcatcggcatccactacaacgagggccgcagcgtgctggactatgcgctgaaccccgaggatttcaagttcgtgaacggctttgtcagcctgccccagaagcccggccttggcgtagaggtgaacaaggctctggtggaggaagagggccaaaccccgcatagctggaagaacccggtttggaggcatgaggacgggagcgtggcagaatggtaaacatgatgaaagcactggtgttcaccgcaccgcatacctttgaataccaggatgttccccgccctgaaccggcaccggacgaggtgctggtggaggtaaaggcctgcgccatctgtggcagcgatgtgcacggcagcagcggtgagaacgggcggcgcatcccgccgctggtcatgggccacgaagccagcggcaccattgcgcagctgggcgaagccgtgcagagctgggccgtgggcgaccgcgtcacctttgattccaccgaatactgcggctgctgctggttctgcacccacgggatgcacaacctctgcgcacagcgccgcatcgtaggcgttgcctgcaccgagtaccgcaaaaatggtgccatggcccagtacatcgccgtaaaggcccgcactttgtatgccctgccgcccaccgtcagctttgaacagggctgccttgtggaaccgtttgccgtgggaatgcacgccgtgctgcgcagcggccttgccgccgggcagaccgctgccgtgatcggtgacggcaccattggcctgatgaccctgattgccgcaaaaagtcagggcgcacaggtctgcataagcggccaccacgcccggcccatgcagctggccgcacagctgggtgcactggactgcgctcagctgccgcagctcaccgcagagcgcggtgccgatgtggtgtacgatgccgtcggttcccaaagctcctttacacaggccatggagctggtgcgcaagggcggacgcatcatggtcattggcaaccacgcccggaccatcgacttcccgctgcagcgctgcatcaccgagcagatcgatgtgcagttcagctattcctccgccggggagtacccggtctgcctgcaggccattgccgagggccgcgccggcctgaccggcctgtggcagagctttccgctggccgagggtgcgcaggtgttcgaccgccttgtgcaccgggacgaaagcctgaccaaagccgtcctgatcccgtgagcagttgtctgcatacaagtttttttctgccagttttcgctgattttgatttacttttgcaacatcctatgatatagttagaaaaagttgtaatacaaagaggtgttccactatggccgataagggcagcgtcaccggaaagattgcccactatatccgcaaaaatatccgcaacggcaactggaccgtgggcgagaagattcccagtgaaaaccagctgtgcgaagagctgggggtcagccgtgtgtccgtgcgcagcgccctgcagcagttcattgcgctgggcattctggaaagcgtgcacggcaagggcaccttcctgatctcggacgatctttcggccttctattccaatgtggaggaaccggctcccaccatcgatgctaccgagaccatgaagcagatcttggagttccgcagcatcgtggaaccggcagtctgcgcacaggtggcccagaccgcctcgccggagctgattgccaaactggagggccacctcaaggccatgaaggcctctgtgggcaagtgcgaagagttcatcaacgcggacgtggcgttccatatggagatcatcaacgcctgcggcaacgattacaccattgccattatgaacgagaccttccagcgccgtgctagtctgggtaagatgctcattctttccaacggttactacggcggcatctactaccacggcattctgttggacgctttccgcaagcatgacgccaagcgtgcccgggtcatgatggaagagcatctgcagcacggcctgtacgatctggaatccgataatctggggcaggagaaaaacgacctctgagccgctttttcctgtctgatacgcaaaaaagatcccgttcacccagaagtggacgggatcttttattgcttatggggctttactgcagccgatcaggctttgacgaaggcagctgcttactttacagccagatatttgcccagttcgcggcccagcgtcaggcacataccaatgctcacaccggggatcggggtgatatactcgggaccaaagcgcataccgcaggtgttgccggaagcgtacaggccctcgatgggctgataatcctcgttcagcacctgctggtcattggtggtcacaaagccgccggtggtcaccagtgcaaagcccagactcggggtggtgacatgggcgtagaagggagcctttgcaactgcattcaggaagtgcgggtccttggcaaagtcgctgtcgcagccctcggcgcaaaccttattgtattgctccacagtagcggaaagggctgcaggctccacaccgatgtactcagccagctgttcgatggtgccggcgccggcaacagccgtgacatagcggagttgttgaagggtcacggcagtttcctttcggcgtgttttttctatcctaccgcagagccgccaaaaacgcaacgtattttcttctttgaaataccaaacgaacattgccggcatatccaagatacgttttacccgccctgcaatttcccttataatagcaccgcagtcttgaaacagctgcaacattcccatatcacaaaggaggctttccggtatgggacaacggcaaagtgagatcatcaaaaatcacatggaagtttactggcacgactatgcgtcggccagcaagggcgttcccattaccgaggcggggcttgtggaaaaagcctccgtcattggacgcaccgggctgatgctgctggaatgcggcaccggcgcatggcgtgtccgaagctccatgaacaccctttcgcgggagctgggagtcacaacaacagcggacatcggcctgttgtccattgagttcacctgctttgacggtgaccagtgttatacccagtcactctgtctgacaaatacgggcgtgaatacctcccgactgaaccgactggagcatttcgtcaacgacttcgaccgggaaggaaaatttatgaccggcgaagaactgcacagccacctcgatgagatcgagcgcatccacggcttgtattcgcccatcgcactaggctttgcagctgcactggcctgcggctgcttcacctttctgctgggcggcggcattgtggaaatgctgtgtgccttctgcggtgcaggcatcggcaactttgtacggtgcaagctgacaaagcaccatttcaccctgtttctgggcattacggcgtcggtctgttcagcaagcctcgtgtatgccatcctgctgaagctggcagaggtgctgtttgccgtatcggcgcagcacgaggcggggtatatctgctccatgctcttcatcattccgggctttccgttcattaccagcggcatcgaccttgccaagctggatatgcgctccgggctggaacgtctggcctacgccgtcctcatcattctggtggcaaccatgacggcttggatcatggcactgctgctgcatttgcagccggtgcagttccctgccctgagcctgacactcccggaagagatcgtgttccggctgctggcaagttttggcggtgtgttcggcttttcgctcatgttcaacagtccccggaacctggcagtctgcgccgcccttatcggtgcggtaacgaacacgttccgcctggagctggtgagccttgcgggctttccgcccgctgttgcagcgtttctgggcgcactgctgtccggactgctggcctcctgcctgaagagcgccgccggttatccccgcatctccgtcaccgtgccgtccatcgttatcatggtaccgggactgtatttctaccgtgccatctataatctgggcatcctgtctctgatgaactctgccacatggtttgcagatgccattctcatcatcgtagcactgccgttagggctgatcttcgcccgtgttgtcactgacaagactttccgttattgcacctgatgtgcagcatttccattctcccatataaggcaaaacgcagcgaatcttttaacggttcgctgcgttttgttttgctgtgatgcacttataaagggagttcgtttacagggcgtttactcgccgtaaacgatcttggtagcagtttccacatggcgttccagccggtcggaaaagtgttccagcggcagaaaaacgccaagttcatcgtagcgggtttcaccgtccttgagcgtatcctgtccatagtagaccactgaacggggcagtgcgtgctgcagcttcatctggatatcccagacggtggagtaggcctccgcttccgttaccttctgcttcacggtgtccggcagttcgtagatcagcagcagccccaaatgctggttgtagtggtactccaccacatccatcgatccttcgtcgtagccgtgatacttgcagtagccgctggcaaggtacatttttaccttttcctgcttctggaacacccggatgaaccggtcgtatactttgctgctcacggcaaatttgttgttcggcaaaagaacgccgacatcatccgtcaggatcaccgggttcggctgaccatcggcgttgaatttgaacgggatcagggcagcgttccgtagcagatcaaacatactgtgctggcagatcgccatcaaaaaggcagacagatccttgttctcgtaggcattgaacagtgctgcggcaaactgctgtgcactcacggccggcgcatccagtacgtctgccatgtccagcgagtcgttgaaggtatccatcaggcgtcggcaggcttctggatttttcaggatctccccgaacagtgcctctgccttttcttctcttggaaatatcgttgccatcaaaaagaccctctttctgtttatttccagctacctattatagattcataatgccccgctgtgaaatactgctttcatattgctgctatatacagaacactttttacacattttccaagtgcccggataatggacactgcaatcatgaaattgcacgagggaaatcgaaaaatatataagttggtttgaacgaaggcagttcctatgtctgaagtcaaaaaggtcgtgctggcatattccggcggtctggacacatcgattatcatcccgtggctgaaagagcactataacaactgcgaagtcattgccgtgtgcggcaatgtggggcagaagggtgagctggaaggcttggaagagcgtgccaaggcaagcggcgcattgtctactttttacggaccggttcagccttttggctaa

SEQ ID NO: 269 - DNA, 10060 bp, unidentified
  source 1..10060: mol_type = unassigned DNA
aaagagatggctcagcagttaagagttctcgcacagaagtctgtcggtgccagcgacagttctctatctatccaggtaactcacacaattcaacaaatagagttactcgatagccaattagaaagagttgaagctgaaatgacggaaatcatgaaattcaatgattctgtcattatgaccattcctggtatcggatatatcaatggaggaatgatacttggcgaaatcggtgacatccaccgtttctccagccccaacaagctgcttgcatatgccggtttggatccttctgtctatcagtctggaaactttcaggctaagaagaccagaatgtcaaaacgtggatctaaagtcctcagatatgcacttgttaatgcagctcacaatgttgtaaaaaacaacaccaccttcaaggcttactatgacgccaagatggctgaaggccgaacccactataatgcccttgggcactgtgccggcaagcttgtcagaattatctggaaaatgatgactgacaacctggaatttaacctcgattaagaggtctggatacccacatcatagatttgtttaaaagcgcccaccagggagccttattaaggttacccatttttaccacgaaaaggatttattaatttccagctaatttaagcttgacttttcatagctggtctcgttgacaaatatgatggagtatctatatcttttatgttgattttacacttgcaataaatttttactcattctcatgcaaactattattaatcttggtattcagtaattccataagctctttcagcataaattccattaactttccaacattcttggttgccatccttatttcacaatattgtttaggagtacctcccggaatatcatccttgaacgtaacatagtcttctccatctttagtaaaatactcgcattttgaatgggctattgaatttctaatatgacgatagtaatttatattttcttctccacaatatgtagatgtattataagtaacatatttctttgcttcattgttaaaggctacgttaatacaacattctttacctaacaattctttaggcacaacaagaagtgcatacataaacatttgtaacattgctggatttcctattccagatgcatccaaaatagtattaatattttttttatttgattcagagcatgaccatttcatttccctataataattgctacccagaaatttgttattttcaagctcgaccaatagcgaaacatttgcaattatttgacaaaagatactttcatttttttctaaatttattttcatagtatagcctctgttgtgttcaagcatatccgtactgacgagattaacacttagaactccagtcctgatcacattttgcttggttttcttagtccaaaacttactaataattagcaaataattattacttttttcgtttgtaatgctaacccatgtaataggggcaaaattgtatgttccatcatcattatttgtaccaaaataaaatcaggttgcacacacattgaaaaatgagtgccttccgattttcgttttattgtcttcatttgtttcatctccgcctattcaatcctatctattcgacttattcaagttttttcaactgttatacatattagtatttaataatccatatgtgctctgcagaacttctgtattatatttagtacttggctatcataataagttgcaccaccatgagcgtcattgccttccagttcataataatccgcttgatgtccagcagctaccaaagtatcatacagcactctgctattctctactgaaactattgggtctaattcgctatgcaaaagcaacactgctggcaaatttatttcttttgttatatacatttcacaagaagctttcttagccagttcctcattcccctcaattttatccacaccaagtaacgccgctgaaggtcgcacttgcatccatggtggcaatggagcttttgaacaaataagtatatctgttgatgcactttccaaaattacaccagaaattttcgtgattttttcacataatccatgttcgctaaataatgtggtcatcatagcaatatgtccaccagaggaatttcccataagaaaaatccgctctgcatcaatatgaaaattctcagcaatagtcggaataaatttaagtgcattgcaaacatcatctacctgtgcagggaataaagcaatgtctgattcacgatactgcattacagctacaacatatccacatttagctaatgttgcatattgcggaatatcgttatacatctcttgtttatgccatgctgaacccggaataaataaaataagcggatacttttcttccttcttcatctcacgcttatatggaaagataatttgtaaataccttttacaattaccataatcatgatattcccaatcttgcgaatataaccactgtacttcattacttccagtaaatactttaatatgttctttcattagttccattcctaagctaagatttattaacctattgtcacctacaaataccgagttgttaaactctttctaatctccatcttcctgcctctcggacaagaatcatccctcgctctaagagctcggtcaattcaaatttaccttctaaaataatgtatctaaatgtatttcatcccaaacatcaattaacttatgtccttttatttcggcagattgaagtaattcctccattgaatcaaatgagctttcctgcctgtttatccatattgatactttgtttttcgatttatcggtagaaataaaaattgcttcattttgataagccgcctccaattcacgcccttgtgaaatcaaccatataagtgctgataccgacttcttatgaaacaactcatcagctatcatgtcatgcaattccatgttcataacctccacatactgcatttatttctgtcccgaaaacacaaacatatccaatgtaaaaatataataatcctgtcatgctctaacgccacaaaacccaaagctgcaataaccacctgcttgcatagttttttaataacatatcttataatgctgataatgattaaaacaacaaacaaaatagtacaaaaaatggcaaggataccagcacatattgttttatttatttagtcaataaatacatcctattaatctgtccgtattcttcataatatatttctacatagtcacttatcgaatatctcgccccaaggatatcctcccattcttcattagtattgttccaaagaatcattccgtcatctaatagattaccactaatctttttaatcccatattcctcaatctgttcatcagaaatgaatgggtttaactttacgagaagttttccgttctttttcaggatacgcttgatttcttctaaaacactgattgcatcgtccggatacaggttatcaataatattagataaaatggcagaatccatagactcatcctgtattccctttaatgcctcaattcctccgcataaaaactgaaaattcccgttttcaatcattttacttttctctatagcactctttatcgcttgcgatgacaaatctatcccaatatgtgtatcggtaccatacttattacacaaaaacagtgctgtgccacttccacatccaaaatcaagcaccgataaagcgttatctgtcaaccatgctaatcctttatcaaactccacatttccggattcttttttcttaggaagtacagattcttgttttgaaaaaatgtcgtcccacaattcaatgcatttgtcatatttattcattagtttctcctacacatgcctaaaagccggcgtaaagcggacattcgcaatccgctttcgctacttgctcatgaacgcagtcgctttgcgaactgtcagtgggagcttttaactcccactgacataagcatcccccttacccccgcttagtgctctacacacttgaagcggggaattgcttattctgcgttcaattatttcttttgcacgatgtaaaataggcaattccctgtttgcaatgagctttcctaagcttgtattcgctctatcctcatactccctgaccgcttcctcatatgacaatttcaatgttgatagatgaaatctttctatctcatcctgcgttaaattcttttctccaaacgattctattttacataaaaaataattattaatattatgtctgtgaatcagattgtaataatcacttactaccccaattttgcaaaccacttctacctgtacgcctaactcttctttgagttccctccgaatggcagttatcaaatcttcaccatcctcgacaccaccgccggcagtttcgattgttattgcttttccaaaatcatcatcccgctcagctcttacaaaatagaattgtccactttcatcataaacgattgctctggcaatatttctatcatgatcaacatactcaaattgccattgggtatcctgcaaatttatatttaattctgtattcatcatgcatttctccatgtcatcgtcttatattttctgtccattcatatccaatataacacttatgggcagagaaaatccttctaaaattctatttttgtgaattttctctgcccatgtgctcatacactgcctgccttggactgatttttcacagtcttacagtgtttttctctgcctaacagacactataatgtcatccatggactgatatgccttataacatcaatcaatttttctgcccaagaggttaatttcacagcttttaggcagatactcgccatatatctgcagattgaacgcagaataagcagtcccccgcttcaagtgtgtagtgcactaagcgagggtaaggggatgcttatgtcagtgggagcttttaactcccactgacagttcgcaaagcgactgcgttcatgagcaagtagcgaaagcggattgcgaatgtccgctttactaccttatgtgccatcagcggcaacagcctactccaccagcaccggattctcacacacaacccaaggaagtccgtacttgttaagggcatccatgaatggatccgggtcgaactcctcaaccgtgaacacacccggcttattccatatgccctttacaaccatcatcgcaccaatcatagccggaacgcctgttgtgtaggagattgcctgtgaaccaacctcgcggtaacactcctgatggtcgcatacattgtagatgtagagcgtcttttccttgccatccttgattcctgtatagatgcagccgatattggtcttgccgaccgttcttggtccaagtgaagcagggtcaggaagaagtgcctttaaaaactggattggaacgatttccttgccatcaaagttaatcggtgttgtcgatagcattccgacattctcaaggcacttcatatgtgtgagatagctctgtccgaaggtcatgaagaaacggattctctttacacccggaatgttagcggcaagtgactcaatctcctcatggtgaaggaggtacatgtccttcattcctacctcagggaaatcgtactctctcttaatctccataggcttagtctcaatccactttccgttctcccagtatgagcccggtgcggatacctcgcgaagattaatctcaggattgaagttggttgcgaacggataaccatggtcgccgccgttgcagtccaatatatctattgtgtggatttcgtcaaaataatgcttgagggcataagctgtgaacacgctcgtaacacccgggtcaaaaccgcttcctaaaagtcccgtgattcctgcctccttgaaacgctctctgtacgcccactgccaggaatagtcaaaataagccgtgaagccaagtctcttgcagcgctcctcgtacacctttctccactccgggtcatccgtgttctcacactcataatttgctgtatcaatgtaggaaaccttggttgcaaggcaggcatccataattgtcaaatcctgatacggaagtgctacattgagtactgcatccggcttgtagctgttgataagggcgattatctcgtcaacatggtccgcatcaagctgtgccgttgttatctttgtactcgtctttgtctctaactccttctttaacgcatcacacttacttttggttctgctcgctatacacagctccgtgaacacctcactaagctgacagcacttatgaattgccactgaagcaactccaccacatccaattaccaataaacgactcatcttttttcctcctcttctaacaattcctcaacatatttcggaagcataaacgctccggtgtgcagattacaggtatagtattccgtaggtatctgcagctttttccactcctccggcttaaaatcagccagtgggtgatattttttcgacgcaaagccaaaaagccagtagcccgaagggctggtcggtatatgcgcctgatataccctgcttatcgggaaggtgttgaacaccttcttgtgcatccgcctgcatgcctgctcgtcctcatcatagaaagggcttccatgctgatagacaagtattccgtcatccttgagtgccttgtaacagttgccgtaaaactcccttgtaaagaagccctccgacgcaccgaacgggtctgtggcatcatttataataaggtcatacacatccgactgggagcgtaaaaaacgcagcgcatcggtgttgtagacgtgcactctctcatcgtccagcccctttgccgtctctggaaagaactccttgcatgcctcaatgaacatggcgtcctgctcaacgatatctatgcattttactgtatcgtagttgataagctctttggcaactcctccgtcacctccaccgataataagcaccttctcgacatgcgggtgcaccgacatcggcacatgcaccaccatctcattgtaaataaaacaatcctgctcggaaaaaataacacttccgtcaagtgtaagaaacttcccgaactcaggcgaagcaaagacatctattctctgatattcgctctcagccgaatagagctgtctctccacgcggatatcaaaacgcacatgcggcgaatgattttccgaaaaccaaatttccataaccgatacactcctgataattattactgataactattgcttataactatgccgcataacttatatttagcggaataataaaaatatgcattttttagttataaaaccccaaaaaaatttatacgttcacaaatcactgtaaactatttatattcacaaaacaaacttcctgcaatatatgttttacaaatatctgctttttccataacatcctaaaacaccagcacattaagatacttaacctccgggtcctccataccctgcatggagcagcccttctctattgaatagagtatgtaatcaataatgtcctccgttatctcctcacccggcgcaacgataggtattcccggcggatatgccatcacaaattcgcctgaaattcttcctgccgcctcccttatcggaaccttttccttattcgcatagaaagcctcctgcggcgaagcaagcacccttggtagaagcatctccctgtcgacctcgaagcgcttctcctccttcttgtagaggcggcttatgtcggcaagcgcccccatgagacgctcgatatcctgtattctgtcacctattgagatgtacgccagtatatttcctatatcgccgaactcaatctgtatatcgtactcatcgcggagaatgtcatagacctcgattccgtcaagccctatatctctggtgaacacgcacagcttcgtcacgtcaaaatcatacaccgagctgccgtttatcagctcctttccgtaggcgtaatatccgcctatggagttaatttcctccctcgcatactcagcccactccatcaccttctggaatgactgccttccgcggagtgcaagatttctcctcgatatgtcaaggcttgccatcagaagatacgatgcgctcgtggtctgcgtgagatttataatcgttctcacatagtctgcattcattccgttgttggtgagaagaattgaactctgtgtgagcgaaccgcccgacttgtgcatggacacagccgccatatcagcccccgccgcaatgcccgatatcggaagattatttccaaagtacagatgtgttccgtgagcctcgtcagcaagcaccttaagcccataggaatgtgccagctcacagattcccttgatatccgaacagattccatagtaggtcggattgttaaccaacacggcaacagcacgcgggtgtgcaagtatcgcctcctcaacctgctccttggtgataccgagcattatacctattctggtatttacctcggcatttatatacaccggaattgcgccgcagagtatcatcacattgattacactcttatggacgtttcgcggcacgataatctcatcgcccgccttgcacacggacagcaccatgttctgaaccgccgaggtagtccctccgaccatgaaaaaggcatgctcagcgccaaatgcatcggcggcaagctcctcagcctccttaatcaccgacaccggatgacacagattatcaagcggcttcatggagttgacatctatcccgacgcacctctcgccaagcaggtcaaccagctccggattacctcttcctctcttatgccccggaacatcgaacggaacaattcttgcttttctaaacctctcaagcgcctcataaagcggcgcagaggcttgtctctttaaatccatggcaacctccgcacatacatttttagttagtcatgtcctgaccgcgcctgattttagacattttcacacaaaaaacaggcgtgaatattcacgcctgtgcaaaaaatcattatccctatatgataaaaactatctcagagtttatcctggcagagtaccgttaccgctcttattgactgtttcacaagatgatgtgcatacgcatgatattcagtaaatcaacttataaaattcgggcttctaacccaatcaataatgtgtgccctagtcacacttcggcaaccgacccgcctgtccgcatggcttaaccagaccggatatatgtctctcatcacataaaaatatgagccacatcatgtattcatccgctgaatacatgtcctaaatccgtccggtggtctgcatctgttatttatccaaatactatctgaactataatatatcagtgaaaaaatgtcaataaatttttcactctatcttataaagtaacaataataccttcaaatcccgtataacaaataatcctccatgagaaattagtataattttaaatttcctctataaagaattataacactgctgttcaactttttctaccggctgataaattcgatagtttctatgatacattacgcatttttatgacgatttcgccgaaccacggcactcttgaatacttccataagtgcaggtgacagctccgggcaatcttcatcaaattcgataggatatttcttcgcttcctctacttcctttaactgttccaaggtgggttcctgacccttagtaactgctaatctctttatcataataaagcctcctctctgcctcagtcgccagtctcgccgatattatgcgaatgatctcgcctctctccgtaaatacaacaaacaatatatctccaactctccctattgcaatatatctatcctcatcactgctatggtgaactacccattgtctaaagccaatgggcttcctgcttcgcagacctcgtaacctactatctccacaggcgttaattcgggcagtccctgccctatattgttatttttatgctatttgtcttaatccttcttccagtatattttttgctgcgttgatatccctgtcatgatttgttccacagacaggacatgtccattcccttactgatagattttttgtctctgtattttggtatccacagacggaacacagctgactactggcatagaatctatctattttgacatatttcctgccattccactttgccttatattctaactgtcttgtcagctcataccatga

SEQ ID NO: 270 - DNA, 9903 bp, unidentified
  source 1..9903: mol_type = unassigned DNA
gtggaaaataagaagaaaacattgcgtgaacatggtgtggaatatacatatgatgagcggttcctcccactcacgcagaaggaaatgcaattaaagggctgggaacagccggactttgtctatgtgatcggagatgcctatgtggatcatccatcttttggaccggcgatcatcagccgtgtgttagaggcacatggatataaagtggcaatcatttcacagccagactggaaggatgaaaattcgattgcgatttatggcaggccgaagcttgcctttttggtgtgcgccggaaatatggattcaatggtgaaccattatactgtttccaagaaaagacggcatacagatgcctacaccccgggtggcgagatgggaaaacgacctgattatgcgacaatcgtttactgcaatctgatccggaagaaatacaaggatgcggcaattgtggcaggcggtatcgaagcaagtctgcgccggctggcacattatgattactggtccaataagttgaaacattcgattctcgttgatgcacaggcggatattgtgatctatggtatgggtgagcatgccattgtggagatcgcggatgcgctgcaaagcggcattgacatcaaagacttaagttttattcatggaacggtctacaaagcaagaaatctggaacatctgtatgaagactatattgagcttccgtcgtatgacgcgttgcaggaagacaaattaaattacgcgcgaagctttaaaatccaatatgataacacagatcatatcaccgcgaagattctggtagaaaaatataaggattatcaatatatgatccagaatccaccggcggaaccattgacggagcaggagatggacgaggtgtatgcgcttccatatacgaagacctatcatccgatttatgaggcacagggtggaatccctgcgatatcggagatcaaattctcgctggtcagcaaccgggggtgctttggcgggtgcagcttctgtgcgcttacatttcatcaggggcggacattgcagacacgcagtcatgcttcgattatagaagaagcgaaagagatgacgaaggatccggattttaagggctatattcatgatgtgggcggcccgacggcgaatttccggcagcgcgcctgcaagaaacaggagaaatacggcgtctgtgcgaaccgtcagtgtctgttcccaaagccatgtccgaatctgattgtggatcattccgattatctgaaattactgcgggagctccgaagtctgccgaaggtgaagaaggtatttatccgttcgggtatccggtttgattatctgatggcggacaaggatgatacattctttcgggaactttgcaaataccatgtcagcgggcagctgaaggtggcgccggaacatatctctgacaaggtactgatgaagcttggtaagccggaaaatgcagtctttcaggcattttgcaagaaatacaaacggatcaatgaggaacttggattgaagcagtatatggtaccatatctcatgtcgtcacatccgggttccactctgaaagaagcggtggaactggcggaatatctgcgggatctgggttatatgccagaacaggtgcaggatttctatccgacaccttcgacgatatcaacctgcatgtattacactggcgtggatccgcggacgatggagaaggtatatgtgccaaattctccacatgaaaaggcgatgcagcgtgcactgatccagtaccggaatccggataattacgatctggtgcatgaggcacttgtgaaagcaggacggacggatctgatcgggttcgataagaactgtctgatcaaaccgcggaagatgaagaatgctgcaaatgagaaaaaatctcaatatggcgcatcgaataaacaatctggaaatcgttcgaatgtgcaacataaaaattctgcacagaagcaggggcaaaaccagaagcagcaaatgaatacaaaaaacaaaaaaagtatacgcaatgtacataaaaagaaacaaaagtaaaggtttcttttattgcgaaaccacagaaattatgatattatctatctaggcgtgtcgacatatgcatgatcggcacagatagaaacaataaaacgaaatggaggaaattttcaacatggcaaagaaagtagttttagctggcgcatgtcgtacagcaatcggtactatgggtggtgcactttcgacaacaccggcaccagtgttaggttctatcgtaatcaaggaggctctgaacagagcaggcgttcctgccgatcaggtcgatcatgtatatatgggttgcgttatccaggcaggccttggacagaacgtagctcgtcaggcatctctgaaggctggtcttccaatcgagacacctgctgttacagtaaacgtagtttgtggttccggtttgaactgtgttaacatggcagctcagatgattcaggctggcgatgctgacatcgttgtagcaggtggtatggagaacatgtctatggctccttatgcagccatgaacgctcgttttggttacagaatgaacaacggcaagcttgttgatacaatggtaaacgatgctctttgggatgcattcaacgattaccacatgatcaagacagctgataacatctgtgagcagtggggactgactcgtgaagagcttgatgtatttgcagcaaacagccagcagaaggcagcagcagctcaggagtctggtgcatttgacgcagagatcgttccagttatggttaagaagaagaaagagacaatcgagttcaagaaggatgagggccctcgtcctggaacaactgttgagactctggctaagcttcgtacaatcaacccaggcggattcgttacagctggtaacgcttccggtatcaacgacggtgcagcagcaatcgttgttatgtctgaggagaaggcgaaggagcttggtgttaagcctatggctacattcgttgcaggtgcacttgcaggtgttgatccttcaatcatgggtatcggacctgttgctgcaacaaagaaggttatggctaagacaggcatgaagatcgaagatttcgatatcatcgaggcaaatgaggcattcgctgcacagtcagtcgcagttggtaaggatcttggtattgatacagagaagcagcttaatccaaacggtggtgcaatcgcacttggtcatccggttggagcttccggatgccgtatccttgttacattgcttcatgagatgcaggcaagaggcgctaagacaggtcttgctacactgtgtatcggtggtggtatgggctgctctacaatcgttaagattgaggactaattgagccgcgtaacatacttggatagagtttaaggagattaagatggaatttattacttatgagcaggaaggctttgtaggcgttgtaacgatcaacagaccaaaggctttgaatgcgttgaatagtcaggtgttggatgagcttgaggctacattcgatgcaatcgatctggatacaacaagagccgtagttcttacaggcgccggcgagaagtcatttgttgcaggtgctgatatcggagagatgtctacacttacaaaggctgagggcgaagcattcggtaagaagggaaatgatgtattccgtaagatcgagacattcccaatcccggtaatcgctgcaatcaacggatttgcacttggcggtggctgtgagatttctatgagctgtgacatccgtatctgttctgagaatgcggtattcggtcagccggaggcaggtcttggtatcacacctggatttggtggaacacagagactcgctcgtctggtaggtgctggtatggcaaagcagatgatctacacagcaagaaatattaaggctgatgaggcatacagaatcggtcttgtaaacgctgtatatccattggaagagcttcttccggcagcgaagaagatggcagcaggcatcgcagcaaatgctccgatcgctgtcagaaactgcaagaaggcaatcaatgatggtcttcaggtagatatggatacagcaattgtaatcgaagagaagctcttcggtgactgcttcgagacagaagaccagaaggctggcatgggcaacttccttgagaaagacaaggagaagaagttaaaggttgttccattccagaacaaataataaaagtaattaaaattttaaggaggaaataaacatgaaggttggcattattggtgctggtaccatgggacagggcattgcaaaggcatttgctatggttgatggctacgaagttgcactttgcgacatcaagcaggagtgggctgaaggcggaaaggataagatcgcgaaaggctacgctagacttgtagaaaaaggaaagatgacacaggagaaggtagatgcgattcttgcaagcatcacacctggtctgaaggaaaatctctgtgcagactgcgatctgatcgtagaagctgcatttgaggatatgggagttaagaagacaacatttgctgagcttgacaagattgcaaagccagagtgtatcttcgcttctaatacatcttcactttctatcacagagattggaaatggtcttacacgtcctatgatcggtatgcatttcttcaatcctgctgacagaatgaaacttgttgaggttatcgctggtgtaaatactccacaggagacagttgataagatcatcaagatctctgaagagatcggcaagacacctgttcaggtaaatgaggctgccggtttcgttgtaaaccgtatccttatcccgatgatcaacgaagcagctttcatcaagatggaaggtgtttctgatatcgccggtatcgatgcagctatgaagcttggtgcaaaccacccaatgggaccacttgagttaggtgatttcgtgggcctggatatctgccttgcaatcatggatgttctgtacaaggaaacaggcgacagcaagtatcgtgcatgtccattgcttcgtaagatggtacgtggtggaaacctcggctgtaagacaggcaagggcttctatgtatacaacgcagatcgcacaaagacacctgttgacgctcagtaataagcgtacaatccccgcacgtggcttttcagccatgtgcggatgtaataatcaatctattatggaggatagaaagaatggatttcactttagacaagaagtatgaaatggcgcagactctgttcaaggattttgcgcagaacgaagtaaagcctcttgcgcaggaaattgatgagcagcacagatttccaagagagactgtagacaagatggcaaagtatggtttcttaggaattcctgtttctaaggaattaggcggacagggctgtgatattctcacatatgttatgtgtgtagaagagctttctaaggtttgtggtacaacaggtgttatcgtatctgcacatacatctctgtgtgtagacccgatcgtaacatttggtacaccagagcagaaggcaaagtatgttccggatcttgcatctggtaagaagctcggtgcgttcggcctgacagagccaggtgccggtacagatgcacagggacagcagacaaaggcagttcttgatggtgacgagtgggtactgaatggttctaagtgcttcattacaaatggtaaggaagctgacgtatatatcgttatcgctgttacaggtatcatcgagaagcgtggcagaaagatgaaagagatttctgcatttatcgtagagaagggaacacctggatttacatttggtacaaaggaaaacaagatgggtatctgtggttcttctacatatgagttgatcttcacagactgccgtatccctaaggatgcacttcttggacagaagggcaagggcttcaatatcgctatgcacacacttgatggtggtcgtatcggtatcgctgctcaggcacttggtatcgctgagggcgctcttgagacaactgtaaactatgtaaaggaaagaaagcagtttggtagatccattgcccagttccagaatacacagtttgtacttgctgatcttgctacaaagatcgaggctgctaagcttcttgtatacaaggctgcaagaaagaaagatgagtatcagagtggcgctaaggtttcttactctgtagaggctgctatggctaagctttatgctgctgaggttgctatggaagtaacaacaaagtgtgtacagcttcatggtggttatggttacatcaaggagtatgacgttgagcgtatgatgagagatgctaagatcacagagatctacgaaggtacttcagaagtacagcgtatggttatctcagcaaacttgttaaagtaaggaggtacttatcgtgaaaattatcgtatgtattaagcaggtacctgatacaaagggtggcgtacagttcaacccagatggtacattgaatagaggagcaatgctcacaattatgaacccagatgataaggctggtcttgaggcagctcttagactgaaggatcagtatggcgctgaggttacagttcttacaatgggacttccaaaggctgcagatgttcttcaggaagcaatcgctatgggcgctgacaagggtgttcttgtaacagaccgtgtacttggtggtgctgatacttgggcaacatctacaacaatcgctggtgcgatcagaaagcttgactatgatctgatcatcacaggccgtcaggctatcgatggtgatacagctcaggttggtcctcagatcgctgagcatcttggacttccagttatctcttatgcacaggagatcaaggtagatggagacagcgtaatcgttaagcgtcagtatgatgacggttaccatatggtaaaggctcagatgccatgtcttatcacagcactttctgaattaaatgatccaagatatatgacaccaggtggaatcttcgatgcagtcaatgcagagatcacaactcttggtagagcagatcttgtagatgttgatgattcaaacatcggtttgaatggttctccaacaaagattgccagagcttctgacaaggttaagaagggtcagggagagatggctccagaagacgcagatccagtaagctatattgttggtaaactgaaggataagcacgtaatttaattaaaaaggaaaagtggtgaataaaatgggagcaatgaatgcagaagaattagcaaagtacaagggcgtattcgtctttgcacagcaggtagataatgtattaagcggaatctctttcgagcttgttggcgaaggaaagagacttgcagagaagttaggcacagaagtaacagcagtattggttggttctgatgtttcaggacttgtagacgagcttgctgcttacggtgcagataaggtaatcgtagtagacgatccagagttgaagaattacagaactgagccatatgcacacgcacttgcttcagttatcaatgagttcaagccagaaatcatgttggttggtgcaacagcaatcggtcgtgatcttggtcctacagtttcagcaagagttcagacaggtcttacagctgactgtacattacttgagatcggtgatttccctgttaacccaatccctggaaaagagcagaagcacaatcagcttcttatgactcgtccagcatttggtggtaacacaatcgctacaatcgcatgtccagacaaccgtcctcagatggctactgtacgtccaggcgttatgcagaagcttgacaaggttgagggtgcaaaggctgaggttatcaactacaacccaggtttcacaccaaataacagatatgtagagatccttgagatttctaaggctgtttcagacatcaaggatatcatggatgcaaagattcttgtatctggtggtcgtggtgttggttctgctgagaacttcaagcttttggaggatcttgcagacgtacttggcggacaggtttcatgctcacgtgccgttgtagattcaggctggaagccaaaggagcttcaggttggtcagacaggtaagactgtacgtccacagctctacttcgcaatcggtatctcaggagcaatccagcatgtagctggtatggaagagtctgatatcattattgcaatcaataaggacccagacgctccaatctttgatgtagctgattatggtgttgttggtgatctgaacaagatcgttccagcactgacagaggctatcaaggctgagcttgctgcaaagtaatttgattacttgcaaaagtaaatagtaaataagagtttagaaccaccgtgtatcgtaagatatgcggtggttttttgttatagcgacgaggaaaatgcacgcatttatgcggtgcatttgacgaccgctaatcagagacaagatgtgcagagcgccatcttgtctctgtgcaagcttgttgactcaaagtgggcgtggagagaaattggcaagcggaaaaacccacgatgtgggcgtagaaaaagaaaagcaagctagaaaacccactctggaagcttgtcgctaggttatggaggaaaaagtgggcgcggagagaagcaggcaagcggaaaaacccacgacgtgggtgtaggaagagagaagtaagccgaaaagcccaccccggaagcttattgtaaggttgcggagagaaaagtgggcgcggagagaaattggcgggcggaaaaacctacggtgtgggcgcgggaagagaaaaacaagcaggaaaacccatcatggaagcttatcgtaaggttgcggagagaaaagtgggcgcggagagaaattggcaggcggaaaaacccacgacgtgggcgcgggaagagaaaaaaaagcaggaaaacctgtgggaagggagacaggaatgctgataatgctgttggtttatttatgagagatttatcggtattttctgaatcgacccaagtacttcaatttaagttaaaagggagtttattcgtgtttgacaggagtttcgttatagattgtttattactatgatttttactaattgttataaataccatattgtgaatatattcacaatgtggtataatttacataaagaaagatattatatcttcaggtaatgacagaaaggaggaataataatttagttaggaagattataataatctttataaatacggacgattaggagaaaattatgtataacgatatgaatcaaaatcaatatccaaatcagggtcaatttcaaaatcaataccaatatcaatatccgcagcaaccaccggagtcaccggggtttggagttgcatctatggtattaggaattatatcattgtgcttatcttgttgtgcatattttatttcaataccatgcgcaatagttggaattatattggggttgataggcctgaaaaaacaggcaggtcggggaatggcgacggcaggtcttgtatgtagtattatatcatttattcccgcgattattcttatatcaactggagcatcaatagtttcgtcgttaaaaaatttttgatgtaacatttatggagtatagttgtattgtttaatcaaataaaatgaaaatatcaattaagaactatttgttatttgctctatttttatgcgtagtgattgcgactctgcttattaagatatatgatattgatttggtgaaaatcataccagcacattgtatattatatgataattatgggttttattgtactgggtgtggaggaacgcgtgcatgtatggctctgatccatggtaattatatagagagtattcgttattaccctgcaattatttatttagtgggattatttatctattattttgttatgaatataatttgtctagctaaaaacatgcataaaatgattgtgaagcctatacatttttatattttaattgctataatattaatacaatggattgttaaaaattttctattaataattcttaactatcgtattatttaa

SEQ ID NO: 271 - DNA, 13042 bp, unidentified
  source 1..13042: mol_type = unassigned DNA
atgactttaaaaaagaacgatattgtaaaccttacaataacttcggcaactgccgagggcagcggagtcggaagaacagatgatggcattgccgtttttgtacagggttctgcaatcggtgacgaactcaatgtgcgtatattaaaggttaagaaaacctacgctttcggcaaaatcgaagaaattctcgttccgtccaaggcgagaattactcccgactgcgaaaactttatgaagtgcggcggttgcacatggcgacatatttcttatgaagaagaatgcaaaataaaacagcaaagagttgaggatgccgtaacacgcatcggcggtcttgataatgttgttttcaagccgataatttcgtcggataatatcacaagataccgcaacaaggcgcagtatcctgtcggtcttgaccgtgacggaaatgttgtgactggtttttattcattccacagccaccgcataatcaattgcaccgactgtattttacagcccgaaatttttgcaagggtaattgaaatcacaaaagattttatcgcaaaaactaacacggaaatttatgatgaaacaacaggcaagggaagacttcgccacatttatatcagaattggcgaggtttcgggcgagcttatggtgtgctatgttgtcaacgcaaacggtcttaaacaggaagatttactcgtgaaaatgctcaaatccgaacttccgcagttaaaaagtgtgattattaattctaacagagaaaaaaccaatgttgttctcggcagaaaaaacagaacaatctacggaagtgaccatattaccgacacactttgcggattgcagtttaaaatttcaccgttttcgttctggcagatcaacagaaaacaggctgaaaagctttacggcaaagccaaagaatatgcaaatcttaaatctgacgaaattctgcttgatttatactgcggaacgggtacaataggtcttacaatggctgattcctgtaaacagcttatcggtgcggagattgttgaagatgccgtgaaggatgcaaatgaaaatgcaaaagcaaacggcattgaaaatgcacgattcatctgcggagatgcctcagatgccgcatttcagcttgaaaaagaaggcttaaaacccgactgcgtaattcttgacccaccgagaaaaggctgcggtgaagagcttgtaaagacaatttcaagaatgtcaccgagccgtgtagtctatgtatcatgtgaccccgcaaccctcgcaagagatttaaaattcttcacagaaaacggctacacccccaaagaaatcaccccctgcgatatgttctccggaacctcccatgtagagagcgtggctctgttgactaaagtacaggagtaaaggtgtgaaaattattaaatttgaagaaatctatcgtgatgatatgatttttacggttttacaggcaaaagatgctttgggtagaaaacctactataaatcctgaccttcttgatattaaggcaaactatcttgattgcaatgatatgttttggcttgcaatagatgaaaatgacagggtagtcggatgtattggatgttcaagaattactgatacagatcaggcatttttgcataggctttatataaaaccgtcattaaaacgaaagggaatcggttcaaagttacttaatacggcagagttatggatgcgtgaaaacggcattgctgtttcaaaagtacatttggggacaccaaaggagcagtggtttgaatcttatgttttttatccgaaacacggatatatagaatatgaaccaaggtatatgatgaaggttctgtaattaatgaaagtcaaaagtaacatatttattatgattattgagtagtgcaacaaattaaaatgaaatatgattggggtttggggtacgatattgaattgacttatttaaaaagaaaaagtgaaaccgatggtgatgctttttgatggaggtgcacaaaatggcaaagaagaaaaatgaaataagtattcgctcaagtgctgcggaatatctcacatatgttgcttctgtgggaaatcaggcagatagctttgaaatgcgttatgaggacgaaaatatatggctcacacagaaaatgatggcaacgctgtatgatgtttctgtgcctgcgatcaatcaacatctaaaaaaaatctttgaagacggcgaattagtcgagaattcagttattaagaaatacttaacaactgccgacgacgggaagaattatcaaacaaaacattataatcttcaggcaattattgcagttggatttaaagttaataatgaacgagcagttcgattccgtaaatgggcaggtcaaattgtaaaagattataccattcagggctggacaatggatgtagaccgtctgaagaagggcacgatgttcacagatgaatattttgaccgtcagttagaatacattcgtgaaattcgcctgtctgagcgaaaattctaccaaaaggttacagacctttatgcaacagctttcgactatgataaagatgcaaaaaccacaagactctttttcaaaactgtgcagaacaaaatgcactatgctacgcacagacatactgctgcggaactgattgttgaacgagcggatgcggaaaaggaacatatgggactaacctcttgggaaaatgctcctgatggtaaaatagtgaaaagcgatgtatctgtagcaaaaaactatcttactgaaaaagaattgtcttttttggaacgtattgtatcgctgtatctcgattatgcagagttacaagccgaacgtcatattcctatgagcatggaggattgggcgaaaagacttgacggtttcctcgaatttaacggtactgaaattctcacaggagcaggaaagataagtgcagagcaggcaaaacttcacgcagaaacggaatttgagaaatatcgcatcattcaggacagattgtttatgtctgactatgacagatatttacttgaactggaagaaaagatgaaagaagagtaaatggaaattttaatgttttgcgagaaattataaaagcgtctcattgcatgagtctgtttattgagatatgattggcttggaggtgatacattatggcaaatgaagataaaaaggattttaatgctatgcttatggatagcaaggatatgcctaaatttcaaataatcacagatgaaaagagtattaaaaaatatggtggagataaaatgtattttgcaccgccaatcgactatgacaaagtaatgaaaaaaattccgtatggtaaagtgattactctcggaaaaatacgagaatactttgcagagttaagcagtgccgattttacagagcctatcacagccggaatttttgtttcaatagttgcatgggcgagttatcagcgcacagaggataaaaccccttattggagaacattaaaagcgaatggagaattaaatgcaaagtatcccggaggaattgaggcacaaaagaaaatgcttgaaactgagggacatactgtagtgcaaaaaggaaaaactaatatcaagtattatgttaaggattatgaaaaagcattatttacattgaaatagataatgcgaaaacttcagtttcacggacatatccccacaaacggcagaaccacgaaaaaggctgtggatgtattcccttgaacccaaaatcagccaagaaattcatcgtattcagatgagccatgtggaaagcgtggcattgattgaaagaaattaacaaaataatatagaaaaggattaaaaatgcaaaatacacttaaaataaaacgaacaaaaacagctttggcatttaatcttgcgattatcgcttgtgagattgccgcaataattatcgtgtttttcaaaataggctgctatccgcttgtatattacactgaggacagcaacctgtttgcacttgttgcctgtgcggttatggcaggctttcaggtgcgatatctcaaaagcggaaaagaaattccgcactcggttcagatgtttaaatatatggcggcggctgtgctttcggtaacatttattgtagttcttgccgtactttccccgatgcgaggagagggcgtaaacggttggctctatatgctttttaacaaagacttcacctttttacatactttgtgtccgattcttacaattttatcgtttgtgctttttgaaaaagaacctcaccttaacacaaaatcagctttcacggctacaatccctacattaatatatgcgattgttcttattatacttaacatagttggtgcatttgacggtccatacccgtttttgcgtgtgatgaatcaaccgttgtatatgtcatttgtttggttcatcgttatagtaggcggtgcatttttccttgcacttctgcttcaaaaacttaattcaacaggaagaaaaagaaaataatagataataagacagtaaacagatgaaaatttcagattggagtgatttttatgaaataccgcaagttggtggagaatgctaaaaagccaagcggcttttggggcaaaatgatgattaaggctatgaataaaggacattcaagcctcacctcatggggacttgaacatatgaatatcgaacgcaccgcaactgtacttgacataggctgcggcggtggaaaaaccgttgaccgactttgctcaattgttgccaacggcaaggtttacggaatcgactattccgaactctcggtaaaatcctccgaaaaactcaactcaaaaaatatactctgcaacaaagcgaaaattcttcaggcatcagtatccgatatgccttttgatgacaatacattcgataatatcacggcagttgaaacctactacttctggcctgataaggagaatgatgtaaaagaagttttccgtgttctcaaacagggcggaacggttatgctgctttttgaaatgctcagaacagacgatgatccgttcaagtgggaaaaggttgaaaatatgctgaatatcaagtcggtaactccgcaggaaatcagagccgtacttgaatcggcaggctttgaaaacataaacacatacactaaggaaggtacaacatggctttgtgccacagcacaaaaaccgaaggatgatgaaaactaatgaaggctttgattacaggcgcaagttcgggcataggtaaagaaatcgcccgatatcttgcagaactcggttatgaccttattcttgtatcacgctcaaccgataagcttaacaagctgaaagaggaactttcaaatgtgaatgtcagggtaattacgcttgatttttcacgagaaagtgacagcctggatttgtatgagcatattaagaatgaaaatgaacagattgattttcttgtcaacaatgccggattcggtgcatacggaaaatttttggatgttccgcttgaaagagagcttgaactcattcacacaaatgtttcaacggttcacattctcacaaagctttttcttaaagatatggcggagagaaacagcggatatattctcaatgtaggttcagccgcaggatttcttgcaggaccgacatttgcaagctactatgcatcaaagaattatgttgtccgtcttactcaggcaattcatgaggaaatgcgtagggataataaaaatgtcaaggtttccgtactttgcccgggtcccgtaaaaaccaacttcaataatgttgcggatgtaaaattctgcataagaggacttgacccgaagtttgtcgcaaggtatgccgttgacatgaccatgaagggcaaaatgattatcacacccggctttgaaatgaaagcggtgtcgtttttcagacattttgcacccgaaaaacttctcacgagaatttcttataatgtgcagatgaagaaaaacggtataaaataattatcatatatatcatatagaaataggggaggtgacacattgaggataaaattcgttgacaaggcgataaaactttacaaaagaataacaggcagatttgaaccgataacaagcaaatgcgttcacgataatatttttgcaattgccggacagtcggcattctttattatattatcggctgtgccgctctcaatgttctttgtgtcacttttgcagaacctgcacattccgattgattttgtttatcacggactcagcagtgtgttttcgtcaaaaattgccgatgatttaacatactttctgacctctgcctatgaaagtgctgtgggaatttctcttgtaacgcttgtagtcactctgtggtcggcggcacagggaatccacgcaatcacaaacggtcttaacagaatttatgatgcttacgaaaacagaaactggttctttttaagaataagggcgatgttctacacaattgcattgtttgtaattttgcttgcgtcacttgtacttattgtcctcggttcaacaattaacgattttctttcaccgcatctaaaatcgttgcctgacataatcggaataatctatcatctcagatatatacttatctttttgtttctgacggtattgtttgcgctgatttacaggaactttccgaacatctcacgcagtgagcataaggaatacggctttaagtcacagttgcccggtgcgtttctctgcacggtttcgtggtatgttctttcgttcggtatttcggtttatgtgtcggatttcaacggattctccgtgtacggaggtcttacaagaattgccgttattatgatttggttttactttcttatggtttgtcttatggtttgtgcggaaatcaattatgtctatcatgacaggataaaagcgtttaccgttgcaaaatttaaaagaaaggtaaaaaccaaaggttcagagcttaatcagataagaaaagaaagaaaaaataataagtcaaataaaagtaaataaatcaaaataaaacacttccgttcggtgatactaccaatggaggtgttttttatgaaaagaaaattttctaaaaaggtgatttcaatattgctcgtatttgcaatgctcatcggcggagcgtgcttttcatgcacaagtgcagcggcgtttgaccttgactatatcagcgaggacggaatgaagctcggctacagtataatcaagggctattccaaaatgtcgatgaaaaaaggtcagtacaaggacgggaaaattgccgtttactgcggacttgatgtgaataatctatatgttatgggttcgctcggttggttctatatgacaaacggtgttgatctcgagcgtgcaatgacggataacgattacgcaatggagatgattgcaaagcttgattcacatcttcaaggtgcaggcataacaaatgacagggcaaaagaaaagaaagccgagattttaaaggatgcaaagtatgtttatcaatgctttgacacattgggactttacattgttgatgttgacaaaaacagagccgatgaactcatgaacgacagcggtattgattttgtacttgacggcggttgcgttcccaaaaatatgaaagacctcaacattgacggaaaaacagatgaaaaggacgctgagcttattcagaagtatcttatcaaagacctgacctttgacgattatgacgaaaatcagtatgctctttttgtttgtgatattaacggtgataaaacccccgatatccgtgatgcgacagaaatcctaaaaaagtgacaattgtcataatttgtgcaaagtgaatatgattttaactgcgacagctgtaattttagctgtcgcttttgatttgtgacagcaatgtgaaactttgaataattatttgtaatttctcttgacattcaaaatgaaggtgctataattactgatacaaattgttttgtatcgaactattctatatagaacaatatctcataagtgtgatttcggaggtgaaataatgtgtgatgacaaaagcgtaaaaagctgtaagtgcaacaaacgctttaatgattcaatcggtcacgaaatcaaggtgcttaatcaggttttgcagagaaagttaatctattccgccaaggataagggtgtggataagctgactcttatgcacggctggattattgcatatctctatgatcatcgtgatgaagatgtttatcaaaaagatattgaaaacgcattttcaattgcccgttcaaccgttacaagtattcttaaacttatggaaaagaaaaattacataacgagggagagcgttgaaagtgatgcaaggctcaaaaaacttgtcttgaccgaaacaggtattgaacttcattacaaaatcgaaaatatgataaccaaaaacgaaactttgcttgacagtctgctgacaaaagaagaaaagaaacaatttctttttcttataaataaaattctcagcggacttgaaaatgcaaattaaaacggaaggagataagtatgataaaaactttggcaaaaaatatcaaaggtttcgtcaaagaatccgttctgactccgttctttatgatactcgaagtaattgttgaaacaattattccgtttcttatgtcatcaatgattgacgacggtatcaacaagggcgatatgcagcacatattcataacgggcggttatatgggtgcacttgcactcacgggcttgtttgcaggtatgatgggcggtatctacggtgcaaaagcttcggcaggctttgcaagaaacctcagacgctcaatgtttgcaaatatccagtcattctcgtttgccaacattgaccgttactcaaccgcaggacttgttacacgtatgacaacggatgtaacaaatcttcagaatgcatatcagatgcttttaagaatgtgtttcagagcgcctgtatcgctcatctgtgcaatggcaatgacattcatcatcaatgcaaggcttgcctgtatttatctcattgcaacaattttactttctgttgttcttgcctttattatgaaggcaacatacaagtatttcagtcaggtttttgaaaagtacgatgaactcaacgcaagcgttcaggaaaatgtaacttcaatcagagttgtaaaggctttcgttcgtgaaaaacacgaagttggcaagttccgcaaggcagccgacaatgtttacagactttttgttaaggctgaaaatgccatggtaacagtatcaccgattatgatggttacttcatacgcatcaatcatccttgtaagctggtttggcgcaaatatgatcgtaagcagtgagcttacaacaggtgaacttacaagtatgctcacatattgtatgaacattcttatgaatcttcttatggtggcaatggtgtttgtaatgctcacaatgagcattgcaagcggtaagcgtgttgcaggtgtgcttaatgaaaaatcaacgcttgcaaatcccgaaaaccctgtttacgaggttaaggacggaagcattgagtttgacaatgtttcattctcatacaacacaaaagccgaaaaaccgattctcaacgatatcaacctaaaaatcaaatcaggcgaaacaatcggtattatcggcggtacgggttcttcaaaaacaagccttgtaaaccttattgcaagactttatgatgtaaccgaaggttctgttaaggtcggtggaaaagatgttcgtgactatgatatcgaaactctgcgtgacaaggtttcggttgtgctccagtcgaatgttcttttcagcggtacaatccttgacaacctcagatggggcaacgaaaatgctacagaggaagaatgcgtcaatgcctgcaagctggcgtgtgcagatgcgtttatcgaaagcttccctgataagtacaacacaaaaatcgaacagggcggtactaatgtttcgggcggtcagaaacagcgtctttgcattgcaagagctttgctgaaaaatccgaaaattcttattcttgatgattcgacaagtgcagttgataccgccacagacgcaagtatccgcaaggcattcagcgagaatatccccgatactacaaagctgattatttcacagcgtgtatcaagcgtttcacacgcagacaagattattgtaatggatgacggtgagataagcgcagtgggtactcacgaagaacttatcaaaaacagtccgatttacaatgaaatttatgttgcccagacaagcggcaacggtgattttgatgcgaaaggagagctgtaattatgccgggaccaatgggaagaagaaaccgaggacctgcacaaaaggttgaaaattcaggtcaggttcttaaaagactattcggtattatcttcaaaaaatataaatttcagatgattattgttttcgtctgcatcctcatcagcgtacttgcaaatgttcagggttcattgtttattcagaatcttattgacgattacatcactccgatgattcagagcggcagccgtgacttcggaccgatgctcggagcaattttaagagttgcaattttctatgcgatcggtgcggcgtcggcatttatctacgccaaaattatggtttatgtaacacagggtacaatgcgtgatttgcgttgtcagatatttgaacatatggaaagccttccgataaaatactttgacacacaccctcacggcgatatcatgagtgtttacacaaatgatattgacactctccgtcagatgatcagccagagtattcctcagcttttcaacagcggaattacaatcatagccgttcttgtaagtatgtttacactcagtattcctcttacaattcttacacttgtaatggttggtgtaatgctttttgtaacaaaacagcttgcgtcacgaagcggaaggttttttgcaaaacagcaggcagacctcggtgcgactaacggttacattgaggaaatgatgaacggtcagaaggttgtaaaagtatttaaccatgagaaaaagagcattgaagaattcaatgagcttaatgacaggcttttcaacagttcatacaacgcaaacaagtttgcaaatatccttatgccgattaacgcacaaatcggtaacatcagctatgtgctttgtgcaatcgtaggttgtatctttgctctcaacaacttcctcggatttacaatcggcaaactcgtaagcttcctcacatttaacaagagctttacccagcctatcaatcaggtcagccagcagtttaactcaattgttatggctcttgcaggtgcagaccgtatctttaaacttcttgacgaagagcctgaggttgatgacggatatgtaacacttgttaatgtacgcaaagagggcgaaaagcttgttgaaacagaggaaaaaacaggtatgtgggcatggaagcatacccacagtgaaacaggcaaaacagagtaccgtgaactcgagggcgcgcttgttatggacgatgttgacttcggttatacagatgataaaatcgttcttcacaatattgatttgtacgcagaacccggtcagaagattgcgtttgtcggttcaacaggtgcaggcaaaacaacaatcacaaaccttattaaccgattctatgatattcaggacggtaaaatccgttatgacggaatcaatatcaacaaaatcaaaaaaggcgatcttcgccgttcacttggtatagttttacaggatacacacctgttcacggataccgttatggaaaatatccgttatggcagacttgacgcaacagacgaagaggttatcgcagcggcaaagcttgccaatgcagacagctttatcagaaaacttcctgacggctacaacaccctgctcaaaggtgacggcggcaatctcagtcagggacagcgccagatgcttgcgattgcaagagccgctgttgcagatccgcccgcacttatccttgatgaggctacaagttcaattgatacccgtaccgaaaagatggttcaggacagcatggataagcttatgcacggcagaacaacctttgttattgcccacagactttctacaatcaagaattcagactgtattatggttcttgaaaagggcagaatcatcgagcgtggttcacacgaacggcttcttgaacaaaagggcagatactatcagctttatacaggcaaaaccgcataatgataatcgaaaggggagagttgcaaaggctctcctttttctgttcttgaaatattgacttgtttattgtacaataagactcagaattgtgaggtgttaaaaattaaaattaattcaaaattgattttaaagcttactgcattgtttgcggtaatctgtcttgcactctgttcgtgttcaatcaatatcaatgtgaacggttccgattcggaaagcaaaacaactgtttcagaaatcggaacattatcggttcattaccttgatgtcggacagggtgacagcatatttattgaactgccgaatcaaaagtgtatgctgattgatgcaggcgaaaatatgtacggcaaaagtattaccgaatatatcaataatctcggatacacaaatattgattatctcgttgcaactcaccctcatgccgaccatatcggttcaatggcttatgttgtaaagcataataatatcggcgaaatctatatgcctaaggttacaaccacaaccaagacctatgagaatctgctcacggcaattgcagacaagggacttaaagtcaagtcagccaaagcgggtatgaatattattgatgacaacgatttcagcataaatattcttgctcccgtaacgattgacgaggataatctgaacaattgctcgataattctaaaaataacttacaaaaacgatagctttctgttcctcggagatgccgaaaagaaagagcttgaaaccgttacggcagatatgagtgcagaagttcttaaagtaggtcatcacggaagcagaacatcaacaacaaaagcgttgcttgaaaaggtaaatcctaaatatgcggttatttcactcggcaaggacaatagctacggacatccgcacaaaagcacattaaagttgcttgatgaattcggagttgaaacatacagaaccgatgaaaacggaacagttgtcatttcaaccgagggttcaggtgtgacaatcaaaacgggacaaacttcaatgaaaagggatgaataa

SEQ ID NO: 272 - DNA, 14278 bp, unidentified
  source 1..14278: mol_type = unassigned DNA
atggataagtcagaaagaattaaagatcttgtagaattattgaataaagctaacaaggcatattatcaggaagccaatgagataatgactaactttgaatatgataagttgtatgatgaattggttggcttagagaaagaaacaggcatggtgttgtctaacagccctacagttaacgtaggttatcaggttgtcagtcagttgccaaaggagcaacacaacagccctatgctttcccttgataagactaaagaagttggagcattggcagattttgcaggagacagaaagtgtcttttgtcttggaaaatggacggcttgacagttgttcttacttatgaaaatggagaacttgtaaaggctgtaacacgtggcaacggattggttggagaagtaataacaaacaatgccaaaacatttaagaatataccgatttcaataccttataagggcagacttactcttagaggggaagcaataattaaatattctgactttgaacagattaacagagagattgaagatgcagattctaagtacaagaatcctagaaatttgtgctcaggttcagtgcgccagttaaatagtcaggttacggcagagcgaaatgttaattttgtagcgtttgcacttattaatgcagatgatgtggactttggcaattcaattgagcaacagtacaaatggatggaaagtcagggatttcaagttgttgagtacagggttgtaacaagaaattcaatggaggatgcagtaaaatattttgctggaaaaattcagacttacgattatccttctgacggattggttcttatgtttgatgatattgaatatggtttgtcacttggaactacagccaagtttccacgaaacggaattgcttttaaatgggaagatgaacaggcagaaactacgcttaaatatattgaatggagtccaagtcgaacaggacttattaatcctgtagcagtttttgaaccggttgaacttgaaggaacaacagtaagcagggcaagtgtacataatattagtattatggaagaattagaacttggctccggtgacagaattaaagtttacaaggctaatatgattattccacagatttcagagaatctaacaaagagcggaatagatgatttgcctaaggaatgccctgtatgtggttatgcaactgaagtgaaggcagagaatggaataaagacactttattgccctaacagccagtgtccggctaaacacgttaagttatttactttgtttgtgtcaagaaacggaatgaacattgacggattatcagaggaaactttggagaagtttattgacgcgggctacattaaggaatttgcagatattttccatttggacagatattatgaagaaatagttgcaacaccgggatttggacagaaatcatatgataatcttatggattcagtggaaaaagccagaaatgttgaactttcagcgttgatttatagcttgggtattccaaatattggttcagccaatgccaagcttatttgcaaggcgtttaacaataacattgaaaaaataagaaatgcaagtgttgaagagttgattgaaatagatggtataggtgaaataatggcagagaagttctgtcagtattttgcagacgaagacaatatcaaaaaacttgataatcttcttaaagaagtaaatattgcagaaccggaagaaaatacaactcctcagaacatggatggtttgacttttgtaataacaggttcagtggaacattttgctaaccgtaatgaactaaagtcgtatattgaaaagcatggcggaaaggttacaggctcagtttcagctaggactaattatcttataaacaatgatgcaatgtcagcatcttctaaaaacaaaaaagccaaacaattaggtgtggaaattgttacggaagaagtttttttagaaagatggtgtaaagatattgaacagtaggtcataatatggtaaatatgatacaaggataaaagttggcagaataatcagatataaagtcagatgaaaaataatataaataaaacaaaacaaacctgacagaaaacagatatgaaagttatatttttatcctatgtatgaacagtattaaatttctaaataagtatttcaggaggagttagttatgagaaatgatatagtagaaattttatgcgacatcaatccactgttagacccggacgatgaagacatgagcatagcagaatttttagaatcaaaacaattaatggagttaatagcaagacttgaagaccacttcgacatcgatattccatatgacgatagaaatgaagacaacttctacagtgttgacacaataatcgaattgctagaagggttgcagtagaacttcaaagaattaagaaattaaaaaatcgctcataaaagttttaagacaaacatatagctatcaaacttttatgggagatttgcaataaatgaggagtatgaccaattggtagtactccttatttttgtgcaaaatttcaaaagtcatatttgcgggggacacacatctaaaatccaactgattttgtacaatatatgattgaatttgtggtagatgtaccccgatattttaaaaacttcgttttttgaggtacgcgtcctaatttctagtagtattcacttgactttttttcctgttgcagatactataataattgtattagttgtagtagtacaattatagtgaaggggaaagaatatgcttactgttaattttcaatcaagaacgccggtatatcagcaactttacgatgatgttgtaagactggcatctcttggagtgttaaaaagcaataccaaattaccacctgtgcgtgttttggcaacagagcttggaattaatcctaacacagtgtcgaaagcatataagatgcttgaagctgatgggtatatatattctacagttggacgtggaagttttgtatcagataagttgtgtcaggatgaggctgaaaaaattgccgcaaggcaggaactgaaaagaaccttgaagaaagcgtataaaaaaggtgtcacaaaagaagaaatagtgaatatgatagaacagataatagagggagtagacatagaatgatagaaattaagaatttgactaaaaaatttgattcaaatgtagccctaaatagaatgaattgttctattagtgaaggcacaatttttggattggcaggtagtaatggaagtggaaagagtacgttattaaggacattatcaggtgtttatgaaccagatgagggccaggttataatagatggagagcctgcattcgataatcataaaataaaagagcgttgttattatattgcggattatccgtttttctttaacgacagcacagttgagaatatggggaaattgttgaaaaatatttattccacatgggaccagcagagatttgaagaattatgtgaaatgttcccaattgaaagaaaaaagaaaattataaatatgagtaaaggaatgcagcgacaggcatcacttattcttgcttttgcggcaaaacctaaatatttgttcttagatgaaatttttgacggtttggatccacttataagaaaaacgcttaagacacttattattcaagatgtgacagacagaaatatgacatgtattattgcatctcataatttaagagagattgatgacatatgtgaccgaattgtaatgttgcacgatggttcacttttgactaatgaggaaacagatagccttaaaaataaaatacataaaattcagatggcttttaagaatagtccaagtgtaaaaacacttacagaaatgaatgttcagattataagtcaggttggaaactactttagcgtaatggcacgaggagatatagatgaaattatggaaaaacttaattctttaaaccctgtgtttatagaaactatgccttccacattagaggaagtatttattaatgaaatggagggcgcaggatatggaaaataatagtttaagtaataaatctaaggcaatagcattatttaaatggactaatagaaaatatctttcagtttccatagcatattggattttgttatttctagcctatcctttggcagaaatatttataatgattaccagcatatctgcagatgggaagtataattattatgtagacagaatgcagacttatggagtgcttataccgtccactttgtttgcggcaattgcaataggatattcaattgtaatatccttaattgcattttcgtacatgcataataagagatgtgttgacttatttggcagctttccggtaagcagaagaacattgttcttttcaaggtttgcctcagttatattttcaacattgatgcctgttatagttattggtttaataggtatgattttatcgtttgaacataaagcttttatagccggagcttcaacaataggcttattgtgcttagtattaattggcaacatatgttttatagcaatcatctctctttgttgtggaacaactattgatgttataatttgttatggggcaattaacgtgtgctatcctatagccgtatttttatgtagctattatccaggagaaattttaccgggagttggacaaaaagacctgccgtcatcactttatacgttactttgtccaattatggcattctttacatctgcttttggagacggtttggcattacatacaatatggtggattggatttataatagttgtcacaatcgtttgttatcatttgtgcaaaaagagaaaagctgaaacagctcagaacggatttgcattcgcaattgttgaaataattataaagtttttaacatgctttacatgtggacttgccattggctttataatgtcacagcttggaaatatttacagcagtgttttggcatcttatatttggcttgttgttggaattattattggaatatttgcttctaatattttacttcatttggcatttcacagaggattgtcaatgtttaaaagtagcttagtggaaagtctggttgtttttgttacaacagggatttttatagtgattattgcaaccggaggtcttggatatgacactacaattcctaaagagtcagaagttgagagtgttattgtaaaggaagcagacagagagtattttattattaacggcaaagatattgttaattcatatcaaggcgacgcgaaaagaattaagaagactcttgaattgcataaagaaattattaacaagtgcaaggctaaaaaacaccatggtttttatgcactgacacgacagtctgatgatgattatggttctgtttcggatgaagatgaatatgagtatacaattagtcctacgggaataattatcaaatataagcttaaaagcggaaaaataatcacaagacagtatagaagaggtgaagtgccggttagtcaggaagagaatgttaagaatttggtagtaaatgatttgactatgattacaaagataccggttaaatatttgtcaagttgttatattctggatatgcaaaaaggcggatatagcagtacagataaagatttaaacaaaaaactggtagcggcacttattaaagaccttaataatgtgaaaaagataaaaaaagacgaatatgattatagtatagatcttaactatactgatagtggagacaactataattatagaaatggaacagagataagtgtaaatatttacagcgaatataaaaatacacttaaggttcttaatgacagcggagtacttgcgaagctggaagaatagtagtatattagagaaagcgaccgagtgaaggacgaaaagcctattattcgatatgctggctaaaaaaatatcacacggaggatagaattatggacaagaaaaatattgattgggccaatataggttttggttatgttcagacagataagagatttgtgtctaactttaaagatggtaaatgggatgacggtcagttaactgacgatgcaacagttgttatcagtgaatgtgcaggtgtattacagtatgcacagacatgttttgaaggaatgaaagcttacacaacagaagatggacgtgtagtagtgttcagacctgacttaaatgcaaagagaatggaagattcagctaagagacttgaaatgccggtcttccctcaggatagatttgtaaaagcaatcgaagaaacagtaaaagctaacttagcttatgtaccaccatatggttcaggtgctacattatatattagaccttacatgtttggtagttcatcagttataggtgtaaagccggctgaagaatatcagtttagagtatttacaacacctgtaggaccttactttaagggtggcgctaagcctatcacaattaaggtaagtgattttgatagagcagcacctcacggaacaggtcatattaaagcaggtcttaactatgcaatgagtttacatgcaatcgttacagctcacgcagaaggttttgatgaaaatatgtacttagatgcagcaacaagaactaaggtagaagaaacaggtggagctaactttatttttgttacaaaagataatacagtagttacacctaagtcaaacagtattcttccatcaattacaagacgttcattaatgtatgttgcagaacattatttaggacttaaagttgaagaaagagaagtttactttgatgaagttaaagacttcgcagaatgtggcctttgcggtacagcagcagtaatctcacctgtaggaaagattaatgaccatggcaaagaaatttgcttcccaagtggaatggaagaaatgggacctataacaaagaaactttacgatacattaacaggaattcagatgggtagaattgaagctcctgaaggatggatttacgaaattaaataattaaagataggatagagtatgtggaatagagcagatttaaaagcaaatgctaaaaagatttttttcgggaactattggaaagcagttttagtaacgcttattttgacaattattcttggtggtgcaacaaacacaataacaagaagaatttcaaataatcagtcaacagattggtcaattgatcaggatttttccggtgtttcaagttatgatgaatggtcaaatgatgaaatattgaacattggaaacagttcattgtatggttcagaatatcagacatatcttagaatttacaaccgactgaagaatatacccggatcagtatgggcaatgttgggaattgctgtagcagtaggaatagttgttggtcttttaatttccattttcttagtagcacctttacaggttggatgttacagatggtatatcttaaacagaacatctaatccaccaatgggagaattattaaattcatttagaaatggatattttaacactgctaagattatgttttgcatgggtttgtacacaacactttggagtttgttgtttataataccgggaattatcaaggcgtatgaatatagtatgattccatatttgttggctgagaatcctaatatgtcaaaacaggaagcttttgcaataagcaaggaattaatggatggaaataagtttaatgcatttgtactggacttatcgttcatactttggaattttgtaggtgcattagcatttggtttacctggaatattctttgttaatccttatgttcagttaactaatgttgaactttatgtaaaattatgtcagattagagcagaaagacataattcaacatataatcaggattacaaccagaattttaatcagaatgatttttcaggttatacacaagtataaaattaagtaaaagtaatgaaatgactaataaaataaaaaaaatggcggttttcgccatttttttttatattgtactagacaaagatattataatttgttaaaattataacaatcttaataatattattactagaagtgggaattttacaaaattgtaacagaaaagtcatctgttttttcttgcggtgaaatagtaaaaatggtattatgagagtgtgtgagcaagcaggtgaaattatacataaaacctgttaacatatcaaaaaaatcacggaggatttatattatgtcaaagaaagtagttatcgcaggcgcatgccgtacagctattggaaaaatgggtggagcattaagcacaactccagcaccagttttaggatctattgttattaaggaagctcttaacagagcaggcgttccagctgatcaggttgatcacgtatatatgggatgtgttatccaggcaggacttggacagaacgtagcacgtcaggcagcacttaaggcaggacttccaattgaaacaccagcagttacagttaacgttgtatgtggttcaggtcttaactgtgtaaacatggctgcacagatgattcaggcaggagatgctgatatcgttgttgcaggtggtatggaaaacatgtcaatggctccatatgctttaccacaggctagatttggttacagaatgaacaatggtacacttgttgatacaatggttaacgatgcattaacagatgcattcaatcactaccacatgatgattacagctgaaaacgtagctgaacagtggggaattacaagagaagaattagatgctttctcagctaactcacagcagaaatgtgaaaaggctatggctgaaggtaagttcaaagatgaaatcgttcctgtagaagtaaaacagagaaaacagacagttatcgtagatacagatgaaggcccaagagctggaacaacagctgaatcacttagcaagttaagatgttgttcaggtaagcctgatggtgttgttacagcaggtaatgcatcaggtatcaatgatggtgcagcagcagttgtagttatgagcgaagaaaaagctaaagaattaggtgttaagccaatggctacattcgtaacaggggcacttggtggtgttgatccatcaatcatgggtgttggacctgtagcttcaactaagaaagcattagcaaaagctaacatgacaattgatgatatggacttaatcgaagctaacgaagctttcgcagctcagtcagtagcagtagctagagacttaaagttcgatatgagcaaagtaaacgtaaacggtggtgctattgctcttggtcatccagtaggtgcatcaggttgtcgtattcttgtaacattacttcacgaaatgcagaagagagacgctaagaagggtcttgctactttatgtatcggtggcggaatgggatgtactacaatcgttgaacgtgactaattttaaatataaccagggctggtagtaaaactgccagcttttatggtgttaataaacactttttataattaagtttcaatacttaaaaagttatttttattaaggagaaaaaacaatggaattcattacatatgaacaggaaggattcgttggaattcttacaatcaatcgtccaaaggctcttaacgcattaaacagccaggttcttgatgaattaaatgaaacaattgattcaattgatattaatgaaacaagagcacttattttaacaggtgccggagacaaatcttttgttgcaggcgctgatatcggagaaatgtcaacacttacaaaggcagaaggtgaagcttttggtaagaaaggtaatgatgttttcagaaagcttgaaacattagaaattccagtaatcgcagcagttaacggattcgctttaggtggcggatgcgaaatctcaatgagttgtgatattagaatttgttcagaaaacgctattttcggacagcctgaagcaggtcttggaattacaccaggtttcggtggaacacagagacttgcaagaatcgttggacctggaatggctaagcagatgatttatacagcaagaaatattaaggctgacgaagcttacagaatcggtcttgtaaatgcagtatatccacaggaagaacttatggatgctgcaaagaagttagcagcaggtattgcaaagaatgcacctatcgctgttagagcttgcaagaaggcaattaatgatggacttgatgcagttatggatgatgctatcgttatcgaagaaaaattattcggaagctgcttcgaaacagaagatcagaaagccggaatgggtaacttccttgaaaaggataaagaaaagaaacttaaagttgttccatttaagaactgctaatggtttgtaattgtgctttggcacagctaatattgttttaaataccggattttccggttttaaccgtgggaagaatttcttcacacatatttaaggtaatggtttaatccattacagaataaataagcgacaagttcgcaaaagtatttttggaggaaaaaagatgaaggtaggagtaattggtgccggaacaatgggccagggaatcgctaaggctttcgctcaggttgatggatacacagtagcattatgtgacatcaagcaggaatgggctgaaggtggaaaagacaagattgctaaaggttatgcaagacttgtacagaaagaaaaaatgacacaggagcaggttgatggtattcttgcaagaatcacaccaggtcttaaagaagacttatgtgctgactgcgatttaatcgtagaagctgcttttgaaaatatggaagttaagaaaacaacatttggcgaattagataaaatttgtaagcctgaatgtatctttgcttcaaacacatcatctctttcaattacagagattggaaatggtcttacacgtcctatgattggtatgcatttcttcaatcctgcagatagaatgaaattagtagaagttatcgcaggcgttaacacacctgacgaaacagtagaagaaatcattaagatttcaaaagaaatcggcaagacacctgtacaggtaaatgaagctgccggatttgtagttaacagaatcttaatcccaatgattaacgaagctgctttcattaagatggaaggtgtttcagacatcgctggtattgatgcagcaatgaaacttggtgcaaatcacccaatgggacctcttgaattaggagatttcgttggtttagatatctgccttgcaattatggatgttctttacaatgaaacaggagacagcaaatatcgtgcatgtccattaatccgtaagatggttagaggtggaaaccttggtgttaaatcaggtaagggattctacgtttataacgcagatcgtacaaaaacaccagttgatgctcagtaattagggcaaacaataaatatggaggaaagataaatggattttactttaagcaaaaaacatgaaatggcaagaactcttttcaaagaattcgctgaaaatgaagttaaacctcttgcacaggaaacagatgaaaatgaacagttccctgttgagacagttgaaaagatggcaaaatatggtttccttggtattccagttcctaaggaatatggcggacagggatgtgatcctttaacatatgctatgtgtgttgaagaattatcaaaagtatgtggtacaacaggtgttatcgtatcagctcatacatcactttgtatcgatcctattatgacattcggtacagaagaacagaaaaagaaatatgtagttccacttgcaaagggtgaaaagttaggtgctttcggtcttacagaaccaggtgcaggtacagatgctcagggacagcagacaaaggctgtttttgatgaagctacaaatgaatgggtattaaacggttctaagtgctttattacaaatggtaagtacgcagatgtttatatcgtaatcgccgtaacaggtaaagttgaaaaacgtggtagaatgatgaaagaaatttcagcatttatcgttgaaaaaggaactcctggatttacattcggaacaaaagaaaagaaaatgggtatccgtggttcagcaacatatgaattaatttttgaagattgccgtatcccagctgaaaacttacttggtaagaagggtaaaggtttcaacattgcaatgcatacacttgatggtggacgtattggtatcgctgcacaggctcttggtcttgcagaaggcgctttagaaacaactatcgaatatgtaaaggaaagaaaacagttcggaagatcaatcggacagttccagaatacacagttccagttagcagatatggctactaaggtagaagctgctaagttgcttgtttacaaagcagcaatggctaaggctacacagaagacatactcttttgaagctgctcaggctaaattatgcgcagcagaagttgcaatggaagttacaactaaggctgttcagttacatggtggttatggttatatcagagaatatgacgttgaaagaatgatgagagatgctaagattacagaaatctacgaaggtacttcagaagttcagcgtatggtaatctctgcaaacttattaaaataataggaggtactaatcgtgaaaattatcgtttgtgtaaaacaggtacctgatacaaagggtggagttaaatttaacccagatggtacattagatagaggtgcaatgcttacaattatgaaccctgatgataaagcaggtcttgaagctgcacttagattaaaagatcagtacggcgctgaagttacagttcttacaatgggtcttccaaaggctgaagatgttcttcgtgaagctatagctatgggtgctgacaatggaatcttagtaacagatagagttttaggtggtgctgatacttgggctacatctactacaatcgctggtgcaattagaaatattaaagattacgacatcattattacaggacgtcaggctatcgatggtgatacagctcaggttggaccacagatcgctgaacatcttggaatccctgtaatttcatatgctgaaggtattgaagttgaaggagatagcgtaattgttaagagacagtatgaagatagacatcatatgcttaaagcaaaaatgcctgtattaattacagctctttcagaattaaacgagccacgttacatgactccaggtggaatttttgatgcatgtgatgctgaaatcacaacttggggaagagcaaatcttgttgacgtagaagatggagaccttggattaaagggttcacctacaaagattgctaaggcttctgacaaagttcgtaagggtgctggagaaaaggttactcctgattcacctgatgaagcagttgattacatcatggacaaattattaacaaagcacgttatttagtagagaggagattataattatgcagaacattaatttagaagattataaaggcgtatatgtcttcgctcagcaggtagataacgaattaagcggtatcgcattcgagttacttggagaagcaggaagacttgcaaaaccattaaatacagaagtaacagcagtacttcttggatcaaacgttggaaatttagttgatcagttagctgaatatggcgctgataaggttatcgttgttgataatcctgaacttgaaacatatagaactgaaccatatgctcaggctttaacagcagttattaatgaattcaagcctgaaattatgttagttggtgctacagcaatcggtagagatttaggtcctacagtttcagctagagtagcaacaggtcttacagctgactgtacagttcttgaaattggtgatttcccaatcaacccaattccaggtagagaacagaaacacaatcagcttcttatgactcgtcctgcattcggtggtaacacaattgctactattgcatgtccagatcatagaccacagatggctacagttcgtgccggtgttatgcagaaggcagaaccaaagccaggcgcaaaggcagaagttattaactttgacgctaaattagaaaagaacagcaaatatgttgaaattcaggaagtaattaagtcagttgctgaaacagtagatatcatggacgctaagattttagtatcaggtggacgtggtgttggttcagctgaaaacttcaagcttcttgaagatcttgcagaagctctcggtggagaagtttcatgttcaagagctgttacagataacggttggttaccagtagacagacaggttggacagacaggtaaaacagttcgtccacaggtttactttgcaattggtatttcaggagcaatccagcatgtagctggtatggaagaatcagatcttatcatcgcaatcaacaaagatgaagatgctccaatctttgacgtagctgattatggtatcgttggagacttaaacaagatcgttccacagcttacagcagctatcaaagcagcagaagctaacaaataa

SEQ ID NO: 273 - DNA, 12256 bp, unidentified
  source 1..12256: mol_type = unassigned DNA
ttgaaagactatattgaagaacgagctatagggatagccaactatatcatcgaccacaacgccacggtgcggcagactgccaaggccttcggcattagcaaaagcacagtacataaggacgtgacggagcggctgatccaggtgaatccggcgttggcaaagcaggcgcggaaggtattggatgtgaataaatccgagcgtcatatccgcggcggactggctaccagagagaagtatctgcaccagcactagatattcgatgaggcaaatcattctatacgggaaagtgtcttgaaataccgggtaccaacttatataatggatacatagctatatgggacaaagtagttgggacataagatacaaaagatatcaggacctttgcgcggcaggatcacttatgaggagagaaaaaacgaaatggcaacagagtttctgaatgatgcacggaaagagatcgagggacggacagaagacttctgtggggaattaaaagcattctatcagggcaacggggaagcggaacagaacctgatggagcagacaacccagcctttctggcaaagtctgcgcctgagcagaaaaagactgcggcagcgggaactgacggtggatatggagatgcaggagccggcacgactggcggactatgatggtccctggaaggatggttatgattatagctgccgccgtacccagccggtaaaaatgagacggacttattaccgcaagggaaaaaagattgcgttcctaaagacaccggagattgcagcggcaagctttttgaaagcggatgtgcagggagatatggttatctgccctaactgtggacatgagggaaaactgaccagctatatcgatggctgtgatgcctgcggggcaaagtttctcgtcagtgattttgaaacaaaggtatccggattttctctggaggaggacgcaagacagaaaagtatttccaactttatgaaagccggtgttgtggtgggaattacagcgatttctcttgcggtactggccatctgtgcgggcggcattatgtttttgctgttggcgttgggcaggaacggatacaatgcggtaaaggcagccgcagccatgatgctgggaattggtctggctccggtatttttccggtcgttgttttacatgctcattatatttattgtaatgttgatcgtgatggagactcgcagaaagccgagaattcaagacgaatcgaaagtaaaggccgcaatcccggaattctccacgggtaattttcttcagaatctggaataccagctgcgaatgatccatctggcggatacggcagagcaggtacgctttttcgcatcctgtgatctggatacggtggtggcacggtatcagaatgtggtggactgttgcatttgcggtgtgcgttttctggaggcggagacacggggagagtcttacagaatcagcgtggaagtgaggacccgattgacactggatacaggaaagaagatccggaaccgttatgaggagatccggctggaactggaaggcagacaggatgtggtaacgcagcacagcagggcactccgggaatataaatgccccaactgcggaggcagtgtggacattttgggcggcggagtctgcgaatactgtaataccgcggtggactaccgaaattttggctggctcatcacttcttatacaaatctggggcagccagagaatccttttgcgaaaatactggcgggagcactgggaagttatctgctcattttgcttttgagtctggtactcatggcgcattccgaggatggaaaagatacttttgagatcttacagagtgtccggatgtcaacggaatatctgaaagcggtgcagcaggacattatctatcccgatgctgtgatttcagattgtacggagacagacagcgaagagggaacttttgcttcaataaaggtgtactcctgtggggaccgggatgcagtaaaagaagcctacaaaactgcactgctggaaaagggatttctggagatgcagcagtacccggagggattttctgtctttttgccggaggatccgtcagaatatgccgtggattcagaagaaggaatgttctatcttgtgatccgcgcagaaaatgcatcggaaggaattgcggtgactgcgacactggtggatgagaactgggatccggtacaggaataaaaatagaataagaaaatgcgacaaggagcccggaggagaaattttccgggcccttttagagggaaagtgttcgttgtaagcttattgtgtaagaggaattctgtgtaccaccctgcgatagagtttccacaggatcacggcagggaaactgactgccagataagctgtagataaaagtccggtagcaccgcctacaattgcaatgatcataattccgatattcatattggattcctcgactttctgttgttctgtgaagtattgcacattccaactccacatgccatattatagtaaacaggatctttttggtgaatagttttgccagacccttaacactattttgtcgggttatttacagaatctttgcagcacatttacagaatcttaacagggcgggaacgatcccgggagtaaggtttgcaatcacaggaaatatcaagtataatagagaaaattgactgttacccgggatggaatagtcggagaaaataaaacggaggtaggaatatgagtatgacactggaacaggctaaggagaagcttgccaagtatggtcaggaacatgttctgaagtattacggggagctcaacgaggaagagaagcaggggattctggatcagatcgaaactacggatatgagcattctggaagcttgcaagcataaagaagatctggcaaaaaaaggagtgatcacaccgttggctgccatgcagttagacgaaatcgaagcaaacagggaggaatttaccgcaaccggtatcgaagcgatccgacagggcaaggtagcagcggtccttctggccggtggtatgggcaccagactgggatctgacaatcccaagggaatgtacaatgtgggactgactcatgaactgtatatttttgaatgcctgatcaataatctgatggaagtcgtacatcaggcagacagctggatccatctgttcgtaatgaccagtgataagaacaacgatgcgaccatagcctttttaaaggagcatgatttcttcggatataatgcggaatatgtgcatttctttaaacaggagatggctgcggctaccgattatgaaggtaagatctatctggaggaaaagggcaagctgtccacttcccccaatggtaacggcggctggttcatttccatgaaaaacaatggcatgctggacattgtacacagagaaggcattgagtggatcaatgtatttgccgtggataatgtattgcagcgaatcgcagatccctgcttcatcggagctactattcagaaaaattgtgtggtaggctccaaggtggtccgcaagaatgcaccggatgagaaggtaggcgttatgtgcttagaggatggcagaccttctatcgtagaatattatgaactgaccgatgaactgatgaatgctaaggatgagaagggagaacccgcgtataattatggtgtgatcctgaattatctgttcaaggtacaggatctggaaaagatcatggcagagaagatgcccctgcatatcgtagagaagaagatcccgtatctggatgagaacggagaaccggtgaagccggaggctcccaacggctacaaattcgagagtctggtactggatatgatccaccagatggacagctgtctgcccttcgaggtagtcagaagaaaagaatttgcgccgatcaagaacaagaccggtgtggactctgtggaaagtgccagagaactgctcaccgagaatggtgtggtgctgtaaacatttcgacagattttcacaacataaggttattgaggaatcgatagaattacagtaatctgatactgtaagaaacgaagaaaaaatttcatccggctctgacagatgagagattgtgcagccgccatagtgaacaaatagtattgtcctatgcacggcggataggagagagtgtatgagaattttggtaacaggtggtgccggattcatcggcagtcataccgtagtggaattacagcaggcaggctatgatgtagtcgtattggataatctctgcaatgcaagtgagaaagtgatccccagagtagaagccatcacaggcaagaaggttcctttctataaggcagacattctggaccgtgaagctctggaagagatcttcagcaaggaacagattgacgcagtcattcattttgcaggactgaaggcagtcggtgagtccgtacagaagccctgggaatattatgagaacaatattgccggtaccctgaccctggtagatgtcatgagaaaacatggtgtgaagagcattatcttctcttccagcgctaccgtatacggcaaccccgcatttgttcccattacggaggaatgccccaagggacagtgcaccaacccttacggctggacgaaatctatgctggagcagatcctgacggacatccagaaggcagatcccgaatggaatgtgatcctgcttcgttacttcaacccgatcggagctcacaagagcggtaccattggcgagaatcccaacggtatccccaacaacctgatgccttatatcacacaggtagcagtcggcaagctgaaagagctgggtgtcttcggtgatgattacgatacccccgacggaaccggtgtacgtgactacatccatgtcgttgatctggcaaagggccacgtaaaggctctgaagaagattgaggagaatgcaggactgaagatctacaatctgggaactggtgtgggctacagtgttctggacatcgtgaagaacttcgaagcagctaccggcgtgaagattccttacgtgatcaaaccccgccgtgcaggcgatatcgccacctgctattccgatgcttctctggcagagaaggaacttggctggaaggctgagaacggcatcaaagagatgtgcgaagactcctggagatggcagaagaacaatccgaatggatatgaagaataataaaacaatattgaaacatacaaagggacatggccggtgggtcatgtccttttgtgattcttaacggtgaaaaatctgaagcgcccggaatacctgctctacggtatctgccatattggtcatggcattgtcggtatgcatagcctcatccagggataccacgttccgcagaatcgggaaaaaggcatcaatgccctctgcgttgcaggcaacggcctctttggccacgcagccggaaaaagcaagtaccggtttttcatattttttggcaatcttggcaacaccgatgggagcttttcccataaccgtctgaccgtcaaggcggccttccccggtgatcacgacatctgcatcccggatatatttttccagatgggtttcttccagaatgatcttaataccggattccagtgtggcattgcagaaggtaagaaaagcaaatcccataccgccggcagcaccggcaccgggatatttggcatcggcatgaggaaactgttctctggccagagcggcataataagccagccatttgtccatctgcaggatcatagtggaagtagcacccttttgcggtccgtagatggcggaacatccctgctctccgcagagcgggttggagacatcgcaggctatgcggaaagtacattccttgagttcgggaagcacatgatccgcagtgatggattccagatcctccagtcctttggctccgaagcggatctgatttccgtttttatccagaaagccaaagccaagtgcctgcagcattccgacaccgccgtcattggtggcactgccaccgatgccgacaataaaatgccggcagccgttctggatcgcatctttgatgacttcgcctacaccgtaagtggtggtgttcagaggattcttttcctctccgctgacctgggtaatcccggcggcaccggacatttcgatgatcgcggtatgggtctcgtcgataatgccgtaagggcagacaacggggcggccggcagggcctgtgacctgcacctgtgtcatacggccgtcacagccacttaccagagcatcgacggtgccctccccgccgtccgccagaggacggacggtaatatgtgcatctttataaacacgtttgatccccgtggcggcgctcaaacccgcctgcatggaggtcatacttcccttgaaggaatcgatagctattactacattcataaggttcctttccgctgccgccggaattcggccgacaactgtcgttttcgtatagatttttggaaaacggcataatttctgaggatattatagcaacaccggaacaaaagaggaatggttcccggagaaaaataaaatttagcgtggtacagtggcaaaaacatcctataagatcattgcatctgagaaaacaatccagtataatgaaagaagtgcacatttagatgcacattacgcataagaagtggaataacaggaggacgagcatgattcagttaacacagggcggcgcttacctggtaaacggtacggacatcgtagcggataccccggaagcagccagtcagatacaggcgaagaccggcattacgatctccaaagaagaagcagcgaaaaacaccatggcatatggtattctgcaggagcataatacctccggcaatatggacaagctgaagatccgtttcgacaagcttaccagccatgatattacctttgtaggtattatccagaccgcgagagcatccggactgcagaagttccccatgccctatgtactgaccaactgccataactctctgtgtgccgtaggcggtaccatcaacgaggatgaccacatgtttggtctgacctgtgcgaaaaaatacggcggagtctatgtaccccctcatcaggcagttatccatcagtttgccagagagatgttagccggcggtggcaagatgatcctgggttccgattcccatacccgttacggtgcactgggtaccatggctatgggcgagggtggtcccgagctggtaaaacagctgttgaaccagacctatgatatcaacatgcccggcgtggtagccgtatacttaaagggtgctcccgtgaagggtgtaggtcctcaggacgtggcactggctatcattggcgcagtattcaagaacggctatgtaaaaaataaagtaatggagttcgtaggccccggtgtggcttccctgagtgctgatttccgtatcggcattgatgtaatgaccacagagaccacctgtctgtcctccatctggaagaccgatgaccagatccgtgagttctatgagatccacggacgtaccgaagactataaggaactgaatcccggccaggtggcatactatgatggattgatcgaggtggatctggacaagatccgtcctatgatcgccatgccgttccatcccagcaatacttacaccatcgaagagctgaatgcgaacctgatggatattctggatgagacggaaaagcgtgcgaaagtaagtctggacggtgctgtagacttcactctgaaaaataaagtaaagaacggcaagttcattgtagatcagggtatcatcgcaggctgtgccggcggcggattcgagaatatctgtgcggctgccgacattctgaagggcagatacatcggtgcggatgagtttactttaagcgtatatcccgcatccatgcccgtatacatggagctgatccgcaacggttgtgctgcgaccatcttagagaccggtgcagtgatgaagactgcgttctgtggtccctgtttcggtgccggtgacacacctgccaataacgcattcagtatccgtcactctaccagaaatttcccgaaccgtgaaggctccaagctgcagaacggccagatcgcttccgtagctctgatggatgcaagatctatcgcagccaccgcagccaacaagggtgtgctgactcccgcaacggacttcgatggagatttcggaaaatacaaatatcatttcgatagcaatatttacaagaaccgtgtcttcgattcccacggtgtggcagacgagagcgtagagatccagttcggccccaatatcaaggactggcccgctatgggtgccctgcctgagaatctggtactgcaggtagtatccgagatccacgatcccgtaactactaccgatgagctgattccatccggtgagacctcttcctaccgctccaatcctctgggactggcagagttcactttaagccgtaaggatccgcagtatgtaggacgtgccaaggagatccagaaggcagagaaagagcgtatgaacggcggacatccctgtcaggcagttccggtactgaaggatgttatgggtgaagtaaagaaacagtatcccgatgcaagtcgtgagaacaccggattcggttccactattttcgcagtgaagcccggagacggttctgcccgtgagcaggctgcttcctgccagaaggtattaggcggctgggcaaatattgccaacgagtatgccaccaagcgttatcgttccaacctgatcaactggggcatgcttcctttcctgatccagcccggagacctgcctttcaagaatctggattacctgttcattcccggcatcaagaaagccgtggaagacaaggccgaggaaattaaggcatatgtggtaacaaccggagaaggcatgaaggaattcaccctgaagctgggagagctgaccgatgaagagcgtcagatcatcctgaagggatgcctgatcaactataaccgagtgtaactattcagagacatgtgacgaaccatcgcagatgcgtttcgcgaagagaggctgaatagttacaatgagaagtaaggagaaaaaatatggaatttaacaaaccggtatccaaccccatgatggtgggatccattgaattattaaaagcagaggacaccccggaacacagacagatgttcctggatgaactgcagaaagcaaagttcctgtctccggtcgtgatcgatccggtgcctgtgccagatgaaaacggccgggtgaccatcgcaagagatgccaaagtacagttcccgatgctgtccaccgaggacggtcggaagttcttcatggcgttcactgactggacagagctaaaaaagtggagagatgaggagaaccagcagactttcgccatgaactttgacgattatgcgggaatgctgctgcgcaaagatgcacagggcaatatcagtccggcgctgggattcgtgatcaatcccttcggtggcaacatcgtggtgaccagagaaatggtagccagcatgatcgcagcaaagctgaaagcagccggcagaccggtgcctcccgcacccggaacccctggcgctcccactcagcccaaacagcagtaaattaacactaaataaaatgtccatagcggacgatataagtagcagagaggtgacatggccagtcacttcctgctacttattttttacagtttgataatgacaccacggatggtaatcagacagaggcatattatatgtattctgtttctttaccatcttttttagtttaacagttcagccatgcaatatcatatgttctgcgtgggtgctggcacacaaagcagaacatatgatattgcatgagtggagcgccgcatgtatgaaataaaagatgagccgcttagcggcgtcgactgcggagcaggcgcttttatgaatacatgcagcggtgaactgttaagcgttacaggaagcgcgccctgttggttcgtggtgaggtcggggaaaggagaaaattacagatttgagaattgattccgcaagcataggaatggattccgccagaagctatcacgcttctaagacaagcgtcagacgatttgagataacggattatcaggcaggtctgacagatgtatccactaagggacagaagacaccgaatggtgaggataccacacagaacacggaggaacaggagaacactgcagagaacaccacgatgacagccaaagactggcagagtcgtttgctggtatcttctgccagatgggatatgcgaagcagtgccagtgaacagacattgtctaccatccgggaatatacggtgcgttatatttttgatttattattcccgtccaggaacagcactttgcgggactggatgcaggaaaacggatggagcagcggtaatcagaccggaaacagctggaatacagggaatagcgtaaataatacccagacgaattccggcagcacacagggaaccgcaacacctgcgtcagacgtgttcaatctggtcacgtcccgtgtgaaaatattgaactatgtgagcgagacctggaacatagaacaggaggataccagtttttccaccgtgggaagcgtacggaccaaggatggcagagagatcaattttaatgtaaatgtaaatatgagccgcagatgcgaggaatactacaaagagcaactcaatgtagcagaattcacgctccatgatccgctggtgatcaacctggatactgatgtggcagaagtgtcggatcagaccttttattttgatctggatgccgatggcaaggaagaagagatctccgtgctgaatggcagcggctatctggcactggacaagaacggtgacggcactatcaacgacggcagtgagctgttcggcacccggaatggggatggctttgcagatctggcgcagtatgatgaggatggcaatggctggatcgatgagaacgattccatctggtcaaaattaaaaatctggtgcaaggatgaaaacggcaacgacgtactgtacaaactttctgacaagggtgtcggtgctatctgtctgcaaaacgcttctacggattttaccctgcagggagaccgtaaggctcaggacggcactaccaatgccaatgcgaccaatgctgtggtccgcaagaccggtattttcttatacgaaaacggaaatgtgggtacggtacagcacgtggatatggctgcctatgccgcacaggcatagaataaatataactattcagttacttcgccctataaatagcatcaaatgttcttacgaatgcaaacattcgacgctatttacatggctctgaatagttccaaataaatgcaaatttcatatcgaagacattctgaataaaacccatgaatcgggcaagactataggataaaccagggaaagtggttgaaacgattgtatagcaggcagttgactcagggaacaggaaggatgcggataggatatgagaagaaataaaaagagcggtattaacaaagaacgtattataatgttagcctcttcagcctttgtactggcagcattgaccatgacaggggtctatatgaaggggcagaatgtggagtccagggatgatggttataccttggacttcactgcgcttcccaacaatgcggatgacaaattacaggagatcacggagaatagcgacgaacatcttctgaaggaggacgagaacatccccggactgacggcaaataatacagcgggaaatgagatcgcgggagctcctgtcaccgaggatgatctggactatatgccccaggaggtaggctccggcaacgtagagattccggggctgacggatcaggagaccctgctggaggccgcacagaaagagcagcagaattccgatgccgaccgacaaaaggaagagaccgggggaaagcagacagcaggcggggatgtggtcgttgagaagacactgcactttgcagaaagcgacggattacagcaaccggtgcagagtgatattctgatgcattactctatggacaagagcacttattttgctacactggatcagtataaatacaatcccgccaccattttttccgcggaagaaggtacggcagtgacctcctgtgcgcagggaaaagtgacttcgatcttcgaaaatgaggagatcggcaaggcggtgaccctggatctgggtgacggctatgaggccacttatggacagctgacggagatcacagtgaaagagaattcctatgtgaatcccggcgacaccatcggcagtgtggcagcgcccacgaaatactacagcaccgaaggaagcaacgtatactttgctctgacccacaacggggaaccggtgaacggggaggcattgttccgctga

SEQ ID NO: 274 - DNA, 13696 bp, unidentified
  source 1..13696: mol_type = unassigned DNA
atgagacccttgaaaaccatcgtcgccggaactctggccctgctggcggcagttcccctgtcagcccaaaccagggccgcggaaaataagaaaccgaacatcctctttatcattacggacgaccacgcctaccagacgctgggcaccggcaaagacgattcccccgtcgccctgcccaacttcaacaaactgggacgccagggcatggtttttgaccgcagctactgcgccaactccctgtgcggcccctcccgcgcctgtatcctgaccggcaggcattcccacatgaacggctttgtcttcaacggccagaaaccgctggacggctcccagcccacctacccgaaaatgctgcagaaagccggataccagacgggccttttcggcaaatggcacctggaatcaaatcccaccgggttcgacacgtgggaaatcttccccggccagggcagctactacaatccggactttatcagcctcaagccggacggcaaacgccagacaaagcgttttcccggatatgccacggacgtggtcacggacaaatccatccagtggctggaaaaccgggacaagaacaagcctttcctgctcgttgtgggccacaaggctccccaccgcgcctggtgccctgctctgcgccacctgggcaaggtggacacttccagcatgacgccgcccgccaacttccatgacgactatgccaaccgtccggaattcctgaagaaaaaccagcagacagtcgccaatcacatggcgatttattccgacctcaaagtgcttaaggaccaggttccggaagaaatgcgcaaaagcatcgtttcccccggttacggctgggacctgggcgagttgaaccgcatgactccggaagaaaagaaaacctggacggactattacgccaagcgcaccaaatccctggtggacggcatgaaatccggaaaactgaaggacccgaaagcgtttgcggaatggaagtggcatgcctacatggaggattatctgggatgccttctgtccgtggacgacagcatcggccgccttatggaatatctggacaaagaggggattgcgaaagacacgctggtcatctactgcggagaccaggggttctacatgggagaacacggcatgtacgacaagcgctggatttttgaagaatccctccgcatgcccctcatcatgagatggcccggcaaaattcccgcgggcatccgcaacaacaccatggtgcagaatatcgactacgctcctaccatcgtttctgcggcaggggcggacaccccggaaaacatgaataccttccagggcgtatccctgcttcccaccgctttcacgggcaaaactcccgacaactggagggatgccatttactactgtttttacgaaaatcccggcgaacacaacgccccgcgccacgacggcatccggatggaccgctacacgctttcctacatctggaccagcggcgaatggatgctctttgacatgaaaaaggatcccatgcaaatgaaaaacgtcattgacgatcctgcctacaagactacggtggaacagctcaagaagcgttaccacgaactgcgcaaaacctataaagttccggaaaacagccccggaggcaaaggaacgcctatccccaaattcgacgcttcctggtaaaagccacacgggaaattgcctttccaagcgccggtttttccggcgcttttttattttcgtccatagcaggccggagaaatccgtcacggaggccgaaacaggcaaactccccttccgcacacaaccgtccatcaaccgtaaaacccgcggaggggtctcaagcccgccagcttcatcaatttattcatggctttttcatacaggaaaaacgcctgttgcatgcagcaaagcacgggcattaagggatgctccgctttctttgcgccaagctcttccaaaaaccagtccgggtctttgtcgtcaaaaccgggatgccgctcaaacgcccggcggccttccagatgaatgacgcccttcccggaatacaggcagtccagatgatgttgcgccgccacgagagacagcagcgtctgatcgtgcgtatgagctacaaaattatcgcggcaacggctctcttcttccgtagtggcagaagacaccaatttgaactgacggcacaaatccatccattcacggagaattcggaggctttgttccgattttttcaagaaaaggaaggagccctgaatcaggggagcctgttcaaaagacccgctatccagcttcaattcatcaaaaacgctctgcttgcaccaccgcgtaaggcctcccgtataataggaaatattcacgcccggcatcatatcctgccccttctcccggagccattggacaaacggctccaaggaatgatggaaaagcctccccggcgggcgccccgcatccgtataaagcaggtaatccccttcctccaaatgttccagctccttaagaatgatgaagggtttccatacccaaaacccggcaccctgtaaattcgggtcaaaccatggaatagcctccctgattccttccctttccaggcgattaagattccaacaggacaactccactgaggaatccgccagcctcaggctcatcatctgcatccattgccgcaaatgatagccgcgggtcgcgaaagaacaataacggatagccatactcccagattccggtggaaaccatgtccctaaaaacgggaacacatcttctgcgtccgcacctataacgagttgtaaatccgctgtcaatggaaaactttaacggagaatcatctccgtgcatggaaccacggattgaaacaggatttttttaattaccaaaaaaccattcaacacgataagttatttatagttatttttttataactatatccaaacttttttaaagacaggcggatttacaatcccccgttcaaatacaccacaatgtccagaatttgacttatccccgtgtcatctgctccgcagccagccttttatccaaatcaagggccgcccccatggccgcatccatattgtagtattcccactccgcaaaacggcctaatagataaatgcctttcggttccaggcactcctttagttcccgtatgagggttcggctggaaacatcctgaacgggataggtatattcttcccagtgatgggccagatacacaggggaaaagggaataagctccagctggcgactgatttccccttccgtcatttgctcggaaaattcaatagtcgcggtggtgatgtccccgttattattatttctggaaaaattccccgtgcaaatgatccggtgagaacggtgggatggagagggcatgtaaatccagctgtaatcattgggggaaatccggcaaagcacggaagtggttccgtgagagcgcaattctgaaatccgggggaaaaacgggcgcaattcatccatgcagggaaaacaatccccaagctgcctgacattccccgtaaagacaactctgtcaaacaattctccctgtacgagccatttcccgtccttcgggaggatatttacagcttcctgccgatacctgaccttgaggccgcgagccagcgtatccgccagaaactgggaaccgccgtttttcgcataaaagaaagaactgtgcaccatggcgctttcattgatgtgcccaatattgttcaacaggatttccgccacgctcggcatgggaagcttgtcttccagccaatccatggcaatttggctgatatcctgcctccacactttgttattgtacggcgtaaaataaaggctgttcagggtttttccgaaacggttcagaaaaaactcacccagggagcggggctccgcgggaggattcctgtaaagttccagcagctcatggacgatggaggaacggacggcctcaggaaactggtcgaggtggttctcaatgggataatccaccacagccccgccctccagggaaataacagcccgtctccgggcggaaacaaaatcgcgctccctgtcaaaccgggaccaaaaccagtccagcacttcctgccgccgggaattgaacacatggcctcccacacgatgatacaggttcccctgtacttccgtgcatttaatcaggccgccgggccgggagtccctctcataaacgactacctcatgccctttcttcagcaacattccggccatggacaatccggaaaccccggctccgatcacagcatatttcatcatgggataaaaaaacaatttatggacgccactatctggcgaaacgggacaatttcacgggatggagatacaggtattcctccggaaaggaggcaagcagcttgccgaggtctcctccggaagaggacacgagcccgtcaatgacggcattcatggcttcaaagtgttccggatcctggggaaaccagacgtttcccgacttgtactgcgtgtcctccagcgtagacagctttgttccgggaagaagctgcaacaccgtgggaatagccagctccacaaacatgttccatgcggagaacacttcaaggatacggcagaaatcgtctaatttccctttcggaatgcagacaatgtccgaatatccgaaaacgacaggataggaataccggtattttttaatccggtgcttccagtaattcagcaaatgccataccctgcccttcaacactttccaattcgcatgaatccccccggggctccatttgggcagaaacatgcgtacgcgcgacaattcatcatgccgcatgaggttcctggattttaaaatccgcctggcctcctcataggacggaacgttcctgttgacgctttccgcatcaataccgggaggggttatggaaaaatggtgggcttccgccgttccccggtaacacaccggcagagaaacgtccacaaaaccgtcaaggtaacacgtatcctccccatggattcccagcagggacggcgttgaaaattcgtcaaacctgggatttaaaagaagatcgtctccgatgataagaaaataatcgccctccaactgcctgattctttccctggactgcaaaatataattatagaactggaaagaattcccgaagacggaacatacgtcaggggcatctcccttgtagtagggcattaattgaagcaacccggaaaagcgtcttgaataaagctctctgattaccggaatgttacgttcatactgatggttgaacaatacaacaagagacgttttccgggaagaagtatccatggccgtttgatgttgagaaacaaaccgtacccttcaacataaattattgaaaaaaaggaatttgctctctgagtgcacgcacagtaaaaagagtgcggggcatattacacggattccaaatccggagtcaaggttaaattttgaaagaaaggaacttctgaaaataagcttccccaataaccggaatcttccgtcttcatgattccatccgggtaaccccatcaattcccattccggcagaaacatccatacctgccggaaagtccgtatttcaaagaaaattattgatcatcagttttatttcctttctgcgaagaggctctcctgtcatgcagaaacaaccgcacgcaatctctttttaattacagcggatttggaattccccaatcgaatttggaattcgttatttttagacagtttaaaaaaacttaaactgtttattcgatttcatgatttcagccattcttctttgttacaatcagaaacgttttatcaaggaacagttccgggctattttaaaacaggattatccaggagaatgggaaataattatttcggacgatttttctcaggacggttcttttgaatgcctggaagaaatggtggaaaaagagggagaaggacggcgtattattctccaccgtaacgaaagcaaccggggaattgcagggaatttgcaatgtgccgttcatttgtcccggggggaatggattatcaagtttgacggcgatgacatcgcacgagaagacaggatctcctcgttggcatctctggcggaaaaatatcccggtcatctggtttactgccattcttataatgaaatcgatgaagatggacaacccgcttatggacgcatgttgccagattcagattccgtcgtcgtcaaaccctacagggaatgtatttttgacatttcccatgtttacagctgttttggcggaaatgccatgtaccacaggtctttgttcagcgacttcgaatatttgccttcaggccccggcattgcggacgatacaatgctgtccatgcgcgcctatttgaaaaaatcaggcatggtcgcatccggcaaacggtgttcgtactatcggagacacaacagtaatatctgcaattttaagagcgggaaccccaggacaatcctgatcaagagatcggaattcctgataacaacctggataatgatcatgaaagaggtatacggaaagcataagtccggggaaataacataccaggccgccgatcgcctgatgaggctgattcaggcggaacagagaaggctcctgctcttcccctatgcttcattcgataacagccttcttaccaaactcaaatggttttggaacattctgcaatgcaggccgaggctctggctggtcagcattccaagattgctcccgttttgcctgctgcaaaggtatttgaacattaaagaccggataaaaagtcttcctttttttcactaacagcagggaacctgcataaaaaacaggaaaaaaaataaacgtaccgttatcctgcttccctccatcatcgggaaaacaaaaaagccgttccgccggacaggcctgcgcggaacggccaggaaaagaaaaccttgacaaggttaatacctgtaaaagtccggcttgtaaggaccttccaccggaacgccgatgtagtccgcctgctccggacgcaggacagtcagcttgcaccctatcttggcgaggtgcagccgcgccacttcctcatccagcaccttgggcagcacttccacgcccacggaacggtctttacgggtattccacagttccagctgggccagcacctggttggcgaagctgttggacatcacgaagctgggatgacccgtagcgcagcccaggttgaccaggcggccttccgccagaagatacaggctgttgccggacgggaacgtgtagcggtccacctgcggcttgatgttaagatgcctgatgccgggatacgtctggagcttgtgtacctggatttcattgtcgaagtggccgatgttgcagacaatggcctggtccttcattttttccatgtgttcgatgcggatgatgttgcagtttcccgtagtggtcacgtaaatatccgcccagcccagcgtgtcttccaccgtcagtacgcggtaaccttccatggctgcctgaagagcgcagatggggtctatttccgtcacgaccacctgggctcccatgccgcgcagggactgggcgcagcctttgcctacgtccccgtagccgcagacgacggccaccttcccggcaaccatcacgtccgtggcccgcttgatgccgtccacaagggactcacggcagccgtacaggttgtcaaacttggacttggttacggaatcgtttacgttgatggccggaatcagcagacggcctgcatctggtacaggcggtgcacgccggtggtcgtttcctcggaaacgcccttcagctcgggaagccagcgatggaaaatgcccggagtcgccgcggcaatttttttcaacagggccttgacgacttcctcttcttccgattccgacggggtatccacccagtcggagccttcctccatttcatacccgcggtggataagcagggtggcgtctccgccgtcgtccacaatcagctgcggccccagcccgtccggaaagttcatggccttccacgtgcagtcccagtattcccgcagcgtttcccccttccaggcgaagacgggggtgccggatttggcgatggcggcggcggcgtggtcctgggtggagaaaatgttgcagctcgcccagcggacggaagcgcccagagccgtcagcgtttctatcagcacggccgtctgcaccgtcatgtgcagggagcccatgatgcgcacgccctccaggggcctggctgcagcgtacttttcacgcacggccatcaggccgggcatctcatgctccgcaatatccagttccctgcgtccgaaatccgccaggccgatatcgcgcaccttgtattgttccgtttctgaaaacatgtctgtaagcgttgtcgtaggaattaatgaagaagttgtttcagggaggccaggcgcgtttcgtccagctgttcccagggcagctccggattggtgaaatgcccgtagtgcgtcgtcttccggtaaataggccgaagcaggttcagctgttccaccatatccgcaggcttgaaggaaaagatgttttccagcgcatgttcaatggatatttcctccaccttcccggtaccgaacgtatccacccggatggaaaccggagcggggtagccgatggcgtaagccacctgcaattcacatttatccgccagtccggcagccacaatgtgcttggcaacccagcggcacatatacgcggcggaacggtccaccttggacgggtcttttccggaaaaggctccgccgccgtggcgccccatgccgccgtacgtgtccacaataattttgcggcccgtcaggccggaatccccgtggggaccgcccacgacgaatttcccggtggggttgatgaaatattccgtcctctcatccagaagctccgcaggaagcacatttttaatgagtttgacgcaatatgagtaaatcgtgtcatggtccacgtcttccgtgtgctgggtggaaataactacgttttcaatatgcgcgggacgcccgtcttcgtcataggccacagccacctgggacttgcagtccggacgcagccagtccacatgcccgcgtttgcgcctcctggccagctcaatgagcagtttgtgcgcaaacacgatgggggccggaagcagctccggcgtctcattcgttgcgaagccgaacataatgccctggtctccggcgccctgctccgcatggcccttgccctccgcctcccgggcgtccaccccctgggcaatatccggggactgttccgtgagcagattcgtgaaaaagacggtatccgcatggaaaacgtcgtcgtcctgcctgttgcagtacccgatctcccgaatggcctggcgggcgattttttccggatcgatcaccgccttggtcgtcagctctccggcaatgatgaccatattgctcttcaccaacgtttcacatgcaacgcggctagttttgtcttgagccaggcaggcgtctaaaatagagtcggaaatgtagtcggccaccttgtccggatggccttctccaacggattccgacgtaaagatgtgaggggtgtttctgctcatatcgataaatctcgatgtgttgatatattattccgctatgaagtcaaccctaaaaacgctcaaactcctggcagatcccacccgcctgcgcatcatcaacgttctgaatgaagaatccctgagcgtcgcggaacttcaggaaattctcggcatggggcaaagccgcatctccacccagctggcccagctccggcaggaaggggtggtggaggacgcccgttccggcaaaaacgtcttttacactctttccctggcaggcgatctgcacaacgtagccctgaaagcctgcgaggaattgccggaggcggaaacggacaaaaaagcccttcaggttatcctggacaagcgcaaaaaccgcacccaggcctattttgacgaagtagtgtgccgtctgggcaagaactacgcgccaggccgttcctggaaagcgctggccggagctctcctccgcattctgaactatgacgtagtggcggacctgggagccggggaaggtttcgtttcccagctcatctcccccagcgccaaacaggtgatcgccgtggataactcccccagcatggtggagctggggcaggagctggcgcgcaaacacgggctggacaatctggaataccgcctgggcgatatcgaagcgccgcccattaaacccggcacggtggatctggccctgctcagccaggccctgcaccatgcgcaaaaaccgtccagagcgctggaagctgcgtgggatatcctgaaatccggcggttgcctggtggtgctggatctgctccagcatggacaggaggaagcccgtgaactttacgcggaccgctggctgggcttcacgcccgccgccctggaaagcatgctgaaggaagcgggattccggaacatccacacggatattgtggacagggagccggacccgccccatttccagactctgatggccgccgcctggaaaccctgacgtacagccgtcttaatccattttccttccggaatagccggagcggacttccggcatgcctccacaagattcctcacggtaccggcatgccatccatgaaaagccgctacatcccggaaaccctgtcttccggaggcctttccgctggaaaggggcggcttccggattgcagggcttcccgcattccccggacaatatccatcatctgtcctgcagacagctcctccttcccctcaatttcctcatccaccatcgctttcatttcctccagcagatgctccggttccagacggtaagtaagcaacacccggaacagttcccttccggcagcctgcaaagggaccgcaggaaaatccgcgacacttttcaaatctttttcttcaaaggaattcaggagctttgcataccgcaggaaagcgcgcctgaattcctccgggcatccgtccatatccactgaagccaaataccggcggaaggaaatctccgccgccagatgcacggcctcatcccccgtggattccgccagccacgtttccttttgcttcagatgcacaagcaggaggaccttcctcatggcctccctctgtctgcccttggggccacttttcagtttgaccaggtccaaatccagatccgcggcatcggggctcgccacatcctgggcgggagacacacccagggaagccgccattatgacaaacggcagccacctcctcatgcattcccgaatatggaccattgcggtcagccattacatgaaaaacgccggaaaatcaacccaaatccagcgcctccggcatgaagaaaatccatgccggaatgttgtgcccgcccagaggaacacccggaaccgcagatcattccgacataagcgccatcccaccgttttccaagcgttccgggcgggaaaagaaggaaaaaacgatgtccgcatccgcacccggctgttggccgggaaggacggcttcatgccagccggagagattgacggacacacgggcatatgagaaaaagccgtctatgctattcgcagtagtgattttcctttccgtggtcgtgctcggtgtcattgccgcgctgcgtttcaccaaaggcatcattcccctgcgcacctacgaatcccgggaactgcccggtttccccggcccggcgggattaatccaccgcctggacggtgcggaaaaacgccagcggaaactggagaaagcccggtttcccggagtggatgaaaacggattcatcagccttcctccggcatgggaaggcaaggtgaccgcaggccggctggcctgcgtagcccatacctgggccatgagcagcctggtccgggaagacccggaggcggcaaaagcccgcaaaaccgcctctgcgcgcgccacgatgattccctttttcacagctcttatcctgctgggaatgctggcgaccggactgttgaaattccagatcgcgctggccatcgggctggcctgctgggcctttttcactttctccgcccttcccacccagttccgcgaatggaaagcggcggaaatagccaaatcagggctgaaggaagccgggctgtggcccgtgctgccttcggacgccatggctgtggaacaatgcctgaaagcgctgtcatggtgccacgtggcaggcttccggcgtatcttgcccagatagagggggtttcctggcggtgaagcgcatttttccggtcaaaccggccttcgggagaaaaaaatcttgaaacggggatgcgtgtaacccactctttcaccgtcgtcaacttttccttaccgcttccatctctccatgaatgagtccgcaaaccccatcctcaaatatttttcggaattcaaaatcctgaaaaccgtatccaaggatttctggcttaccaacgtcgtccagttcttcgacggaatggcctatttttccatgattacggtattcgtcctctacctgacggactattgcagcttcaacgatgcggacgccgccctctgggtaggcctgtacacccttttcatctccgccttcgtcttcgcggtgggttccatctgcgacatcatcggcatacggcgcacttacctgatcggcttcatcatcctcattgccgggcgccttatcatgggcttcggtccggacctcagcccgaccgtggactccggaaggctggccgtcatggtgggcattctgattatgtccttcggcacggcgttcatgtcccccgtcatccagacttccatccggcgcttcaccccgctgaaagcgcgttccacgggcttcaatatctactacctgctgatgaacatttctgccgtcattgcgaacgtgttcctgattgaatttttccgcaagcacttcggcgccgtggacggcgggtactggatcatcaacttcggaacgctgatggtgctgctgggctgcatcaccacccgttttattaatgaagacaactacgcggaacccagcgaacgggaggcgaacatcaatgcccccctccgcagacctctccagctcttcatggaggtatggaaggaatccgccttccgcaaacttatcctcttcctggtgctgaccatgggcgtgcgcatcgttttcacgctgcaattcctggtgatgcccaaatactacgtgcggacgctatatgacgatttcgccataggctccatcaatgccgtcaacccggccatcatcgtctccggcctcatcctgctcattccggtgctgggccgcttctctaccgttggcctcatgattgcgggcatgtccatctccgctttctctctcgttttcatggccattcccattgaatggtactacctggtgcccggcatcgaaacgcgctcccaggcgtatctggtagccattgtggcgcagatcctggtattcgcattcggggaactgctcttctctccccgcttctccgaatatgtggcgcgggtagctccgaaagacaaagtggcttcctacatgtctctggcggcgcttcccatgttcatcgccaaacccatcaatggcatcatcggcggcctgctcgtcgcctacctctgctatgacggcatctgcgccaagatggataccgggcacatcggcttctgggactccccggaattcatgtggaccatttacctggccatggccgtaatcagccccatcgccattatcatgacccgcaggaccatcacctcggaccatcccgaggaagacgcggcatcgccacccatcagcgccattgaagcggaaacggatcccgccctgacggcggaagaacttacggaagccaactcctga

SEQ ID NO: 275 - DNA, 11531 bp, unidentified
  source 1..11531: mol_type = unassigned DNA
gtgtcagattttggtgcgagaagagcccacaatatggatgcagctgtctatggtgccagagcggcagtgatcggtggagcaacgtcgaccgctacagtattggcaggtcagatgtttgatattccggtcagcggaacgatggcacatagttgggtcatgttttataaggatgaatttacggcgtttgaaaagtatgccagattatatccggatgcaacggttctgttggtagatacgtatgatgtccttcacagtggcgtaccgaatgcgatccgtgtggcgaaagaagtattagagcctatgggaaaacgattaaagggaattcgtttggatagtggtgatcttgcatatttatccaaaagggcgcgtaaaatgttagatgatgcaggattgaaagattgccggatcgttgcatctaacagtttggatgagtttaccattcaatcccttgtcagacaaggagcctgcattgacagttttggtgttggagaacgtcttattacatcgaaatcggaaccggtttttggcgcagtttataaaattgcggcagtagaagaggatggtatctttgatcctcgcattaagatttcggagaatgtggaaaaaattaccaatccgggttggaaacagatatatcgtgtgtatgatgaaaatcataaggcgattgccgatctgttagcgggaagagacgaagagattgaaacttctggggaagtagagtatgtcgatccgaacaagccttggaaacacagagtatttaccggatgtacatttgttccgttgcagcagccggtatttattgacgggcgttttgtaggaacgaccccaagtgtaaaagagatcgcaaaatatgtggaacgtcagctttcggaagaaatttgggaggaagagcagcgctttgaaaacccgcataaacattatgttgatatgacaccatcttattataaaatgaagaatgaattattgtcttctgccagatttgaaggctgataagttgtagaaagtgaggatgattatgaaattaaaggtgagaattgccttgtttgttatttttgcagcagtgatcggtgggttttattatgcctatttcccggcgatcaatatacatttggagattttttggacaacattgatcgttgtttttttgtcgttggcgatcattctgggagcaaaatcatccatttctcagatggttggaagattgtctaagaaaccgtcgatcaaggaattttcgtggtttgcgaagctttgcagtgtattggttatcgtatgtgttggtgtgctgatcgttggttcggcgttaggcgctacgctatttcgttcacgtgcctatgcaaatctgcttccggtagataaacgggaatttacggaggatatagagcagtctgatcaagttacagacattgcattgatggatacggagagtgccaggatatttggtaatcgtaagattggttctttgtcggatgtggtcagccagtacgagatcgaaccggattatacgcagatcagcattaaaggacagccgatgaaagtttcgggattgaagtacgcgagtttcttcaaatggtggaataatcgaaacagtggtgtgccgggatatgtacaggttaatccggtgaattcagaggctaagtatgtgaaattaacaaagccgatgaaatatgttccctcggcatattttaattataatctgcagcgtcatgtgcagcttacttatccaaccaagatcattagcggatataaatttgaggtggatgatgatggaaatccatattatatttgtccgacaatgacagcaagagttggattgtttggcggcatagatgtgaatggtgtgatcatttgtgatccaatcgatggtgagtgcaaatattatgcgattggagattgtccatcttgggtggatagtgtatatgatggacatctgcttacgaaaaagtataattggcatggtatgctgtctggtggatatattaacagtattatcgggcagaaaggctgtaagcaggcaacggatgattttggatataagatcattggcgatgatgtgtgggtatataccggtgtcacatcggcaaatggggatcagtctaatattggatttgtgatgatgaatcagcgtacctcggaggcgagatattatcaggtgtccggtgcggaagaacattctgctatgtctgctgcagagggagaggtgcaggaaaaaggctataaggcatcttttccaagcctgatcaatgtgtcgggtactccaacgtatattatggttcttaaggacgccggtggattggttaaattgtatgcgatggttaatgtggagcagtacaatattgttgcaacagcgacatctcagacaaaagtgtttgaagagtataagacgctcctagcttccgatggaaagctggaaaccgaggaaaatgatctgaaagaggatacgatcactgtgcagagtgtggagtatattgattcggatgatggaactatggtatatatcaaagatacgaatcatcaggtatataaacaggcgttcaaagaagatgaatcgttgatacgtattagtgccggagatgtactgcacgtgaagtatcagccgatggataatgaaattcatttgttgcaggagttttccttcgaaacgaagtgacggagttttatagaattttaagaatattttataattagagctattgaattatttatacgatcctttagacttataagtggttttaagattcgcaattaagaatcgcaggacggcttatcgtcaaatattctatgaatttctgcgctgtgtatgcaggacaggatttattggatatagaagatggaggatacaagatgagattaaaagaacgcatcagaagatttatgcaagggcgttatggcatagtggatcaatattcagagtttctgtttattgtagctattccgatgtatattatcggaaatataatatcaattcgggtagttagtgcgctgttgatgggtgttgcattatttttagtgttctacgtcgattaccgtataatgtcacgaaattgcacaaagcggtaccgcgaaaatgaacaatatttgatgtttgcgggtatattccgtaagcgttggcagaagttttgttctcgcatcaaggatcggcgcgagaatcgtatttacaaatgtccatcctgtaagcagcggattcgtgtgccgagaggaaaaggaaagattgcgatcacgtgtccgcaatgtcggacagaatttatacgtaagagttaaaaggaggaagtggtatgcgggagatgacgtttaagatggaacgtcccggtctggtgaaagcaggggatgcagtgcatgtcagtgaaaaaaagacagcactgaattattcctatatcatagagcctgctgttgctatgtccggctgttttaaggtaaatgagaggatacagagcagagatggtattgtaaaggacgtaacccacaatgaccgcggttattatgtagtcgtggaatttgaaaactagcatcgaaacgcgattttgctgtgctgtcggaatgtccgatgtaagataaatggtaatgcattgacaaatgaaattttggcacagggcagtcgacaatatagtgaggatagagtacattaaacagaaagagaggatacaatgttagaaaaaggaatcaagggaaccggacgtcaggtagtgacggagaaacttacggcaaaagagatgggaagcggtgagcttgctgtttatgcaacgcctgcgatgatcgcattgatggaagagtctgcttacaaaagtgttacagcagaattagaggatggcatgggaacggtaggaacattaatgaatgtgaaacacgtttccgcttcaccggttggtatggagatcacatgcgagacagaattgacagaggtagatggaagaagactggtatttacagtaaaggcttatgatacaaaagggctgatcggcgaaggcgtacatgagcgctttgtgatcgttaatgaaaaatttcaggcaaaaactgacagcaaaaaagaagcttaataattctgacagcaaaaaaagaagcttaaggatttagccataaaaaacgcttaaacattacggtttaagcgtttttttgttaggagagtattttgcggtcctttttgttcaggtattttgatttcacttttaaaaataagatggataacgtccgttttttgtagggacgttatccatcttcggctgttttttataaatgttccgcttagcgtttattgctctgtttccaaattttcatctgttctgcctctgcgatcaactggtcgcggaaatcaggatgagccacggaaataatggcttctgctttctgccaggaggaaagtcctttgagattaacaataccatattcggttacgaagtaatgaacattggcacgtgtatctgttacaatagaaccattcgccaaagtaggacggattctggaatttacggtgccatccttagcagtgaaagtagaagacatgcaaatgaaggatttaccaccgttggaaaggtaagcgcctaatacaaagtctaactgtccgcctgcaccgctgatctgtttggttcctgcactctcagcgttgatctgtccgtacaagtcaatatccactgcattattaatggaaatgaaattatccaatgcggaaatggagcggatgtcattggtataattgaccggggcactcatgcactgagggttttcgtctaagtagtcatataatttttgtgttccggcaccgaaagcatatacctgacggcctttatcaatgctcttgttcatgccggtgatcttgccggctttcgcaatatccacaaaggcatctacatacatttctgtgtgtacaccaagatccttaaggtcggacttagcaatgagagaaccgactgcatttggcatgccgccgataccgagctgcaggcaggcaccgtctggaatttcatctacgatatattttgcaacagcttcatctacttctgtagcaggagcagcagcgcccattgcatcaatagccggattggagccttctacgatcatggccacctgactgatatggattccctcttcaaatccacctaagcagcgaggcatattttcattaacttccacgataataatctctgcgcgctcacagacagcagccatatgagaggcgtttggtccaaaattgaaatagccgtgtttgtccattggagctacctgaaacattgctacacgggaaggggtagcggagtcgcggtaataacgcggcagctcggagtaacggatcggattataaaatgagaaattttgtgcgattgctttacgttcgatgccgcccatatgccaagaattccaagtcatatgctgtgcaggagagtcaattttgaaaatctccggaacgtgcattaaaataccgcctctgaagtttacatcagtcaattccggaagacgttttgccatagcagcatccaaggctaccggcgtacccgtgcaccatccgtaatcaacccagtcgccggaattgacgactttgaccgcatcttctgcggaagttagcttttcgttgtacattgtttgaaagttcatattctttctcctccatatctgttttgaattggggatccgaaagtgtagaaaaaatttcagatcctatgtaaaactcttatctaataaaatagcacgaaatcattttattcgcaacaaatcgcagagaaatctttgctgacaaattttgtcggaattccacaaacaatgaaagaaaaatgcttgctaattatttcaatttgatatatcatagaggcaaagagtgcatatggaacgctatatattgtatggattgttctgcacatatcaaataaggaggatttagttatggcaaagaaagttgttttggcaggcgcatgtcgtactgcaatcggtaaaatgggtggaggattgagcaagactccggcaccagtgttaggttctatcgttatcgaagaagctcttaagagagcaggagttccaaaggaagaagttgatcatgtatatatgggttgtgtaatccaggcaggtcttggacagaacgtagcacgccaggcatctattaaggcaggtcttcctattgagacaccggcagttacagtaaatgtcgtatgtggttctggtttgaactgtgtaaatatggcagctcagatgatcgaagcaggagatgctgacatcgttgttgctggtggtatggagaatatgtcgatggcaccatatgctatgatgcagggccgtttcggataccgtatgaacaacggtaagttagtagataccatggtaaatgatgcactttgggatgcattcaatcagtatcatatgatgatcacagctgagaatgttgctgatcagtggaatcttactcgtgaagagttagatgagtttgctgcaagcagtcagcagaaatgtgaagctgcaattgctgcaggcggatttgatgcagagatcgtacctgttcagacaggtgtagatagaaagacaaaagagccaatcatcttctctaaggatgagggacctcgtgctggaacaacagcagagagccttagcaagctgaaatgctgctccggtaaagagggcggtgtcgttacagctggtaacgcttccggtatcaatgatggtgctgcagcaatcgttgtaatgagcgaagagaaagcaaaagaacttggtgttactccaatggcaacatttattggcggtgcattgggcggtgttgatccatctatcatgggtgttggaccggttgcatctacgaacaagcttttgaagaaaacaggtcttacaattgatgatatggatattatcgaggcaaatgaggcatttgcagcacagtctgtagcagttgctaaggatcttaagttcgatatgtctaaagttaataagaaaggtggagcaattgcacttggtcatccggttggagcatcaggctgccgtatccttgttacacttctgcatcagatggagaaaggtcagaagggtcttgcaacactttgtatcggtggtggaatgggttgctcaacaatcgttgagaaagagtaattcacagatcgcggttgataaagtaatcacataaaggagacataatcatggattttattttatatgaagtagatggtgcagtaggaaccattacaatcaatcgtccaaaggcattgaatgctttgaacagccaggtgttggacgagctgaatgctacattagatgcagttgatctggatacagttcgctgcttgatccttaccggagcaggtgagaaatcatttgttgcaggtgctgacatcggagagatgagtacactcacaaaggccgagggtgaggcgtttggtaagaagggaaatgatgtattccttaagttagagcatttcccaatccctgtgatcgctgcagtaaacggattcgcacttggtggcggatgcgagatctctatgagctgcgatattcgtatctgctctgagaatgctgtatttggacagcctgaagctggtcttggtattacacctggatttggtggaacacagagactggctcgtttggtaagtcctggaatggctaagcagttgatctatacagcaagaaatattaaggctgacgaggcatatcgcattggtcttgtaaatgcggtatatccattagaggagcttctcccggcagcacagaagatggctgcaggtattgcaaaacaggctccgatcgctgttcgtaattgcaagaaagcaatcaacgaaggtcttcaggtatctatcgacaaagctgttgagattgaagaaaagttatttggtgactgctttgagacagaagatcagaaagctggaatgggcaatttcttagctccaaaggatcagaaagttaaagttgttcctttcaaaaactgttaaaatcgaattggtgggtgtcatgggatgagtgatcatcccttggcactttactatagtcaaagcggattttcatccgtttccccaaaaaattaattaaaatatggaggtaatatcatgaaagtaggcgttattggtgctggtactatgggacagggcattgctaaggcatttgctcagaatgaaggatatgaggtagctctctgcgacattaagcaggagtgggctgatggcggtaaagagaagatcgctaaaggctatgacagattggtacagaagggtaagatgacacaggacgctgtagatgctatccttggcagaatcacaccgggcttgaaagaaaacctttgtgctgactgcgatcttatcgtagaagctgcatttgaagatatgcaggttaagaagacaacattcgctgagcttgacaagattgctaagcctgagtgtgtatttgcttctaatacatccagtctttctattacagagattggtaatggtttaactcgtccgatggtaggtatgcatttctttaacccggcagaccgcatgaagctgatcgaggttattgcaggtgttaatacaccagctgagacagttgagacaatcaagaagatttctgagaacattggaaagactcctgtacaggttaatgaggctgctggtttcgtagtaaaccgtatccttatcccaatgatcaacgaagcagctttcattaagatggaaggtgtatctgacatcgctggtatcgatgcagctatgaagcttggtgcaaatcatccaatgggaccattggagttaggtgatttcgtaggtcttgatatctgcttagctatcatggatgtactttacaatgagactggtgacagcaagtatcgtgcatgcccacttcttcgtaagatggtacgtggcggtaaccttggtgttaagagtggtaaaggattctatgtatacaatgctgaccgtacaaagacaccggttgatgcgctgtaatcaattctgaaatgagttcacattttttagtgttctgtcagaacaagttgttttggcagaacattaaaaataaaatatgtgtctgaaacagcacacaataaatatgacatgaaaggtggtaaaagaaatcatggattttacattaagtaaacagcatgagatggcgagacagttattcaaagatttcgctgaaaatgaagttaagcctctggctcaggaaacagatgagacagaagcattcccacaggtaacggttgataagatgggtaagagcggattcttaggaattccggttcctaaggagtacggcggacagggcgctgacattttaacatacattatgtgtgtagaggagttgtctaaggtttgtggtacaacaggtgttgttgtatccgcgcatacttctctttgcgttgatccgatccttacttatggaacagaagatcagaagcagaaattccttccggatctctgcagtggcaaaaaacttggtgctttcggtcttactgagccgggcgcaggtacagatgctcagggtgttcagacaaaggctgttcaggatgaagcaactggtgagtggatcttaaatggttctaagtgcttcattacaaacggtaaagttgctgatgtttatatcatcattgcttatacagatgttatcgaagacaagagaggcagaaaagttaagaaattctctgcatttatcgtagagaagggaacacctggattctccttcggtacaaaagagaagaaaatgggtatccgtggttcatccacatatgagttgatcttcgaggattgcagaatccctgcagattctatgctcggtgtaagaggaaaaggattcccaattgcaatgcatactttggatggtggtcgtattggtatcgcttcccaggcacttggtcttgcagagggtgcactggagagaacaatcgagtacacaaaggaaagaaaacagtttggccgtacaatcgctcagcagcagaatacacagttccagcttgctaatatggcaacaaaggtagaggctgctaagaatcttgtatacaaggctgcacttaagaaacagcagtttgctgatggcgctagagtttcttactctgtagaggctgctatggcaaaattgttcgcagcagaggtagcaatggaagttactacaaagtgtgtacagttgttcggtggatatggttatatcagagagtacgatgtagagcgtatgatgcgtgatgctaagatcacagagatttacgagggaacttctgaagttcagcgtatggtaatctctggtgctcttttgaagtaagaactgataattgcaaattatataagacaaggagtgacattgccgtgaaaattgtagtatgtataaagcaggttccagataccaaaggcggagtaaagtttaatccagatggtacactggacagaggtgcaatgcttgccatcatgaaccctgatgataaagcaggtttggaagcagcacttagaattaaagatgaaacaggagcagaggttactgtattgaccatgggtcttccaaaggctgaggaagttcttcgtgaagcaatggctatgggcgcagataacggtattttggtaacagatcgtgtacttggtggtgctgatacttgggctacttctacaacgatcgcaggtgctcttagaaacattgattatgatttgatcatcacaggtcgtcaggctattgatggtgataccgctcaggtaggaccacagatttctgagcatttggatattccagtaatttcctatgcaaaggatattaaggtagaaggtgacagcgttattgttgagcgtcagtacgatgatagatatcatgtattaaaggctaaaatgccttgtctcgtaacagctctttctgagttgaacgagccacgttacatgactcctggcggaatcttcgatgcatttgataaggagatcactgtttggggcagagctgatttgaaagatgttgatgactctaacttaggtttgaagggttcaccaactaagattgcgaaagcatccgataaggttaaaaagggtgctggtgagaaagttactccagattctccggatgaggcagtatcttacatcatgagcaagttacaagagaagcatgtaatctaacaataataaggaaaagtggtgactaaaatgggtttagaagaatataagggtgtctatgtctttgcacagcaggtagacaacgaattaagcggtatcgcttttgaattgcttggtaaagcaaaagagttagcagctgatttgagcacagatgttacagcagttctgatcggttctggtgtaaaaggtcttgtagatcagttggcagagtacggcgcagataaggttatcgttgtagatgatcctgagctgaaagagtatagaacagagccatatgcgcatgcattagcttctgtcatcaatgagtataagccggaaatcgttttggttggtgcaacagcaattggtcgtgatcttggtcctcgtgtttctgcacgtgttgcaacaggtcttactgctgactgtactgtacttgagattggtgattttccaatcaatcctgttccaaatcaggagcagaagcataaccagcttcttatgacacgtcctgcatttggtggtaacacaatcgcaacaatagat

SEQ ID NO: 276 - DNA, 6846 bp, unidentified
  source 1..6846: mol_type = unassigned DNA
atggaactgatttacacaaatgatttatgcaccggatgcaacaaatgcgtgcggggctgtcctgtacttacggcaaatattgcaacgcaggaaggttatgtaacggtagacccggacaaatgtattgcatgtggggaatgctttgatgtctgcccacatgaagcgagagactattatgatgatacggaccgcttctttgaagaccttgcatcgggaaagaaaatttccgtgatactggcaccggcatttctggcaaattatcccaaagaataccagcgtgtgctgggatatttaaagagtaagggagtcaaccatatctgcagcgtatcgttcggtgcggatatcacaacctggggatatctgaaatacattacggaacacaaatttttcgggggcatttcccagccgtgtccggcagtagtcacctatgtggaaaaatatataccggagctgattccgcgtctgatgccggtacacagtccgatgatgtgtactgctatttatatgaaaaaatacatgcaggtcacagatgaaattgctttcatcagcccgtgtattgccaaaaaattagagattaccgatccaaattgcggcggatatgtttcttataatgtaacttttgaaaagatgatgaagtatatcggaaacgattatgaaggatgtgaaccatataccgatgaactggaatacggactggggtctttgtatccgatgcctggtggactgcgggagaatgtagaacattttcttgggaaagagcaggtagtgcgtcaggtagagggcgagcatgaggcgtatgaatatctgcgttcctatgcaaaacgtattcagcagaataaagaacttccgtttatggtagatatcttaaattgtgcgaagggctgtctctacggaactgccacagatccgaaacggggaacggatgatgtcatgctgacaatcgcaaaactgcggaacagcaaaaccagtgcaaaacaggagaaggcacactttggcaggaagagcaaaagcaggagtccgtgggcagatacactgacaccggaggaacgtctgaaaaacttcatggacgcttttggaaagctggacatcaacgattttatgcgtagctacaccaatcgcgcagtacatattgaggaaccgtccgaacaggagaagaaccacctgtttgcagaaatgaaaaaagatacctatgaggaacagcacagggactgcgaatcctgtggatattcaagctgcaccaacatggtacgtgccatccacaatggagtcaacgtaaaagaaaactgtgtgcactatgtgcggggcatggcagaggaagagacaaaaaagattgcagaacttcgcgatcaggagcggacggaacaggaaatccgccagcagaagattacagatatcacagaccggtttattaccctgagtgataacattgcagaactgaatacggcaaacgaggaatctgcaaatgaagcaaccaatctggcacagtatattcaggatatttcccgcctgtgcgacgaactgaatgagtccatccgtattatgtcggatttcatcagtgtatataaaaagagcaatgaagatatttctgccattgcagggcagacaaatctgctttcgctcaatgcctccattgaggcagcgcgtgccggtgagaacggaagaggctttgcagtggtagcggaggaaatccgtacactgtctgattccacgaaagatcttctgacacagaacgaccagaaagccgaggcaattcttccaaagattacacagagcatggattcgatcaaagatctggtagaaagcatgaataccatgacgcagaaagtgtcaacgattgccgcaaacacggaagaaatttcttcccagacgacctatgtacagaatatgacagaagaaatgcgggatgaggtgaaagaactgtagatgaaaaaggatgcgtattacacatccggacaatttgcaaaaaaagcacatgtgacacttcgcgcgatccggtattatgataaacagaatattttaaagccaagtgcacggactgccgcaggagcgcggctgtatacggatgcagatctggcaaaactccagcagatccttttattaaaatatctgggattttcgctggaagatatccgggagatgacacttgctgcggcagatcagcagtatcttcttgaatccatgcggatacagaagaagctgctgcggcagaaaatggacgaaatgcaggcgatggatgaggcaattgaccgcaccatagaagccatccagacggaacaggcgattgactggaacagtatgctggatctgatccatctgacggcagtggaacgaagcctgaaaaaccagtaccagaatgcggcaaatatttccgcccggattcgcctgcacagggagtattccgtcaatccgcaggggtggtttccgtggattatgcagcagtgtaatctgcagccggggatgcggattctggagctcggctgtggaaatggagcactctggaccgaaaacagggaacaactgcctgcggatctttgggtcgttctctcggacaaatcggaaggaatgctaaaggatgcacagcgtgcactgggagaggacagccgcttttcctataaaaaatttgactgcgaagaaattccttatgaggagggaatgtttgatgttgtgatcgcagatcatgtgctgttttactgtgaaaatatcccacaggtgcttgcagaatgcaggagagtcttaaaagatgagggacgttttttgtgcagtacttatgggaagcagcatatgtgggaaattaccgatctggtgcagaagtttcataaagaaatcgttttatcagcggaggtgctgtatgagcggttcgggcttgaaaacggagaaaatctgttagcaccgtattttccggaaattcagatgcgaagatacgaggatgcgattgaaatagcggaagcagaaccgctgatttcctatattctttcctgtcacggaaaccagaaccagctgcttttgaaccagtacaaagagttccgggaatttgtttctgcccgtgtggcagatggatttcatatcacaaaagatgcagggatcttcctgtgcagaaaatagtttgaaaatctataaaaaagacttgaaggtgacctagcgtcaccttttataatgcaatcaaatagaaaaattggaaactcacacaggaggaaaagtacatgactattattgtaacgggtggtgccggtttcatcggcagcaactttatcttctatatgttaaaagaacatccacaggatcgcatcgtatgtctggattccctgacctatgcgggcaatttgtccacgctcgcaccggtgatggatcagccgaattttcgtttcgtaaaactcgatatctgcgaccgtccgggagtatataccctttttgaggaagaaaaaccggatgtgatcgtcaattttgcagcggagtcccatgtggaccgctccattgagaatccggaagtctttttgcagaccaatattatcggtacttccgtgctgatggacgcatgcaggaagtatggtatttcacggtatcatcaggtatccacggatgaggtgtacggagatctgccgctggaccgtccggatctgttcttccatgaagatacgccgatccacacctccagtccgtacagcacttccaaggcatctgcggatctgcttgttatggcatatcacagaacgtacgacctgccggtgacgatcagccgctgttccaacaactacggcccgtatcagtttccggaaaaactcattccgcttatgatcgcaaatgcgctggcagataagccgcttccggtatacggagagggactcaatgtgcgcgactggctgtatgtcgaggatcactgtaaggcgattgatctgatcctgcgcaacggaaccgtcggagaagtctacaacatcggcggacacaacgagatgaaaaatatcgatatcgtaaaactcatctgtgaatatctcggcaagccggagagcctgatcgagcacgtacaggatcgcaagggacatgacatgcgctatgccatcgatccgaccaagattcacaacgagctgggctggctgccggagacgatgtttaaagatggtatccgcatgaccatccaatggtatctggacaataaggaatggtgggagaacatcgtaaacggggaataccagaattattacaaagaaatgtacggaaagaaaggcttataaatatgaaagtattcgtgacaggcgttgccggacagctgggacatgatgtggtaaacgaactgacaaagcgcggacatcaggcagtcggttcggatattgcaccgacactggaatcctgtgcatcgtatgtgccgctggacatcaccgatgcggcagcagtggaacagacaatcatgcaagtacagccggatgccatcgtgcactgtgcggcatggaccgctgtggatgcagcagaggacgaagaaaatcaggcaaaagtcagagccatcaacgtagatggaacgaaacatattgcggaagcggcaaaaaaagtagatgccaaaatgttctatatcagcacagactatgtgtttgacggacagggcgagactccgtgggagccggactgcaaagcatacgcaccgcttaacgtatacggacagacgaaacttgacggggaactggcagtagcacagacactcgggaagtatttcatcgtgcgtatcgcatgggtgtttggattaaacggaaaaaattttattaagaccatgttaaaagtggcaaaaaatcacccgcaggtgcgcgtggtaaatgaccagatcggcacaccgacctatacttacgatctggcaagactgcttgttgacatgatggaaaccgaaaaatatggttattaccacgtaacaaacgagggtggttacatatcctggtacgatttcacaaaagaaatttaccggcaggcagggatttctaccgaagtgcagcccgtgacaaccgcggaatacggtctgtcaaaggcagcgcgtccgttcaacagcagactggaaaaaaagaaactgaaagaaaatggatttacaccgcttccgacctggcaggacgcgctgggacggtatctgcaggaactaaagcgacagggggaactttaagatgaagggaattatattggcaggcggcgcagggacacggctgtatccgctgacgatggtaaccagtaaacaattgcttccggtatatgacaaaccgatgatttattatccgctgtctacactgatgctggcaggcatccgcgatattttagttatttccacgccggaagataccccgagatttgaagcacttctgggggatggaaatcagttcgggcttcatttgtcctacaaagtgcaaccgtccccggacggactcgcacaggcatttttgctcggagaggaatttatcggagaggatgccagcgccatggtgctcggtgacaacattttctacggaaacggattcggaaaaattctgcgaaatgccgcaaaggatgcacaggaaggacaggcaaccgtctttggctattatgtcaacgatccggagcgtttcggcgtcgtggatttcgatgcgaatggaaaagccgtatccatcgaagaaaaaccggcacagcctaagagcaactatgccgtgaccggactgtatttctatccggcaggcgtgagcgcgatggcaaaacaggtaaagccatctgcccgcggcgaactggagattacgacgttaaacgacatgtatctgcagcagaaaaacctaaatgtacagctgctcggccgtggctttgcatggctggacaccggaacgatggacagccttctggatgcggcagcatttgtgcagatgatcgagcaccgtcagggcgtgaccatttccgcaccggaagaaattgcatatatcaatcagtggattgataaagaaaaactgcttgattctgcgatacgctatgggaagagcccgtatggagagcatttaaaagcagtcgcagaaggcagagtgaaatattaaaatcagcgtaactattcagaacccctcagaattcgaaaatcagaatcgttatgtttacataaaagaggctgattttcgaattctgagggagcttgaatagagttccctccccatatatgagcaaaattagctgcgttagcagcgagaaagcacgtgaagcgtgcgtttttgcgaatatatggggagggggttctgaatagtaactattcagcatgaaagagggaaaacagtgggacagataacagttaaaaaaaatgtcggtggcatcgaagggctgtgtgtgattacaccggccgtacacggggatgcccgcggatactttatggagacctacaatgaacgggaaatgaaagaagccggatttgacatccagtttgtacaggataaccagtccatgtccgtcaaaggcgtacttcgcggactacatttccagatcaactatccgcagtgcaaactcgtgcgcgccgtgcgcggcagcgtgtttgatgtggcggtggatctgcgggaaggttccgcaacctatggaaaatggtacggagtggaactttccgaggaaaacaaaaagcagtttctgattccggaaggctttgcgcatggcttcctggtcctgtccgacgaggcagagttctgctataaagtcaatgacttctggcacccgaacgacgagggcggcctggcatggaatgacccggcgatcggtatccagtggccggatgtgcagggggagtatcagggaaccccatcggcggaaggatattgcatgacagatggaacgccgctgacactttcaaagaaagaccaggagtggccgggattagaggaaaaataa

SEQ ID NO: 277 - DNA, 7632 bp, unidentified
  source 1..7632: mol_type = unassigned DNA
atgaagaaatcatatgcagtgatcacaggggcaagctccggaatcggtatggcgtttgcacggcagcttgcagcagaggggtatcgtctggtgctggttgcacgcagagaggaccggctacaggaactggcgcaggaattacaaaagaagggaaccgagagcattgtgatatcggcagatttgtcacaaaaagaagcctgttatcacctgatgcagcagatcgagaagctgccagtcgggatattgattaacgatgcgggattcggtgactgtggcagctttctggagacggacgcagataaggaaatgcagatgattgatgtaaatgttaaggctatgcatcttcttatgaagctgatgcttcgccgtatggagaagcaggagggcggttacatcttaaatgtggcttcctcggcgggacttcttccggcagggccttatatggccacctattatgcgaccaaagcttatatagccagcctgacacgtgccgtggcactcgaactgaaacagagaggcagccgcgtgtatgtgggggcattatgtcccggaccggtgaatacagaatttaatgccgttgcaaatgtagagtttgcactggcaggaattactccggaatattgtgttagatatgctttaaagcagatgaaaaggcgcaaagtagtgattgttcctacgttgacgctaaaagccgtgacaacctgtggaagatttataccacaaaaagtgctgattgcaattaccgcacatcagcagaaaaaaaagctcagagcagaggatatatcataagatggaagaaattaaaatcggttcccatgtgggaatggcaggaaaagagatgtttttagcgtccgtaaaggaggcagaaagctacggagcaaatgtgttgatgctctatacgggtgcaccacagaatacccgcagaaaagaaatcaaagatctgaatattgaggcaggatgggcctatgcaaaacaggccggaatccgggagattgtggttcatgcgccttatatcatcaatctggcaaataccgtaaagccggagacatttgaactggctgtacagtttctggaaaaggagatccggcgcacggctgctatgcgaagtcatatcctggtgttacatccggggtccgcgctggatgcgggtgcagaggccggaattgcacagactgtccgcgggctgaatatggtgctggatgagaacgaggatgaggtatttattgctctggaaacgatggcaggaaagggcagtgagattggaagaacctttgaagaaattaaggcaatctatgatggagtgaacaaaaaggagcggttgagagtctgttttgatacctgtcatgtaaatgatgccggctatgatctggtgcacgattatgatggggtgtttgaaaaatttgatcaggtaatcggactggatcagattgcggtcttccacatcaatgacagtttaaatcccctgggggcacataaggaccgtcatgcaaatattggaaaaggaaccattggatttgaacccctgtaccgtctggttcacgatccgcgctttgtggaaatcccaaagattttagagacaccgtggctttgtgccgagggagagaccaaaaagacgattccgccatataaagaagagattgcacagcttcttgcaaaggaatgagggggagaaggattatgaatgttaaacaacaggggatttccggctattggttaaaggtgatcgccgtggtttccatgctgattgatcacacatctgccgttattttagaacagattccgggactggaagcccccgcatttttgatgcgcatcattggaagactggcgtttccgatttactgttttcttctggtagaaggattttaccatacacgcagcagggcaaaatatgcgggaaggctttttttgtttgcactgatttccgaggttccgtttgacctggcattcagcaggagaatgtgggatttttccagcaacaatgtcttttttactttgctgttcggacttttggtgatctggggtgttgaaaagataaggcagaagtttgtggcggatgtttacggggaaaaagcagcagccatccgtgtgattcttatcattgtgacagttgcagccgggggatttctggcacttcttttccgtacagattacgatttgtcgggaattgtgacaatttttgcaatttacatgttttatccgaagaaagtgaagggaatgggtatcggtgttctggttttaaccctgctggcaagtatcattgaagcggcagcatttttagatatgataccgatttatttttacaatggaaccaggggaaaacagatgaagtatttcttctacatattctatccggcacacctgtttcttcttgccatgattgcacgggcaatgggattttgggcttaatattttaagaagatgttacgattcttatgaaattcttatctttttcagatacagcttgcgttcctgaaaaagcgggagtacaatgcagacgaaatgaaagacagataggaatggaggtcttgaatgatgagacaaaaatcttggaatcagtttaaaaaaacaatggctgcctcgacactggcaggagcgatcgcttttacagggtgtgcggtgatgccttcggttacagcttttgcagatacaatggaacagaccggtcaggtatcgtatgataatgaggtgatgccgatccacacggacgtgcagacggaggcaaaaccgttgatgaagggtacgtcatgtacggtttcggatggaaagaacctgtattatgcgtttgaaatgatgggtgtgcgtatgggaattatgaaatacaacaccaaaacaggcaaaaagagtgaggtatattcctacaaaatagggaaaaacaaaaagggaagcaatggtttttcccagttatctgtggataagaaatatatttatgcaacctgggaccgttactatggaaccgatgcaacaaaagaatatatttaccggatcgcaaaagacgggaaatccgcaaagaaacttgcgctcggacgtgacccacagcttgtagatggacggatttattatctggcactgaaaagtaaaagtgaagatggcatgaattattcggaagataccggaaccgtaatgagcatgaagacggatggaacggataaaaagaaagtagcacagattgcaaacagcggagatgcttataggtattccctgtttcaaagtgagggaaagatttactataccaaagaaaacgagaacaggacattttatgatctggagggaaacagttatcagagaggttcctttgctgttaaggatgaaaattatctgagtgtttcactggaagctgtcaatgatggaacgtatacctatagtacgacaggaaaggatcggtacatgcagacgaaactctaccggacagataacaggacgggaaagaaaaaccttgtggcatcctttaaacttggcattgaaaaatactcggtttgtggaaattatgtattcgtggaagcaaatgttccgtacaagggagctgatgtgactgagaaacttgcagtttactgctataaggcagatggcagcagcaaagtaaagcttgcttcctggtttccggcagaataaaatccgggtaacaatcgaaaaaataaaagaagcaccgcgacttgcggtgcttcttttattctggggatttatttatccagatcttttttatctacattctgcagcatcattgcacgaactttcagaggaagtccgaacagtgtgatgaatccgtctgcatcgtgatgatcgtactgatcaccggttgtgaaacttgccagagactcactgtagagagagtatggagaagttgtgccggctttgatgatgtttcctttgtagagcttgaattttacttcaccggtgacatacttctgggtagaagtaacaaatgcctggattgcttcgcgaagaggagtgaaccattttccttcgtatacaacattggcaagacggttgcccatctctttctttgcagataaggtatcgcggtcgagaaccagttcttccagctggtcatgtgcttccataaggatcgttccgccaggagtctcatatacaccacgggatttcataccaacgacacggttttctacgatatcgatgatgccgacaccgtgctttccaccgagacggtttaattcacggatgatatcggaaactttcatttcttttccgtttacagtctttggaacacccttttcaaaggtcatggttacatattcgccttcgtccggggctttctctggggaaacaccaagaaccagaagatgatcataatttggctcgtttgcaggattctccagctcaagtccttcatggctgatatgccataagttacggtcacggctgtaactttggtctgtgccgaatggaagatcgattccgtgtgctttgcagtatgcgatctctgcctcacgggaatccatctgccacttgtcatcacgccaaggagcaatgattttgatatccggagcaagtgctttgataccaagctcgaaacggatctggtcatttccttttccggtagcaccgtggcagattgcaacagcgttttcttttctggcgatctctaccagtttctttgcgataccaggacgtgccatggcagtacctaataagtatttgtgctcatatacagcaccagcctgtacacaaggtacgatgtaatcgtcacagaactcatctgtgatatcttcgatatataatttagaagcgccggataatttggctctttcttccagtccgtctaattcttcgccctgtccgcagttgatacagcagcagacaacctcataaccataagtctcctttaaccaagggataatagcggtagtatcgagtccgccggagtaagctaaaacaactttttctttcataagattgtatcctttctttctatatggaattgtacgctctcgtacgactaaccctactatacatcaatccaaatgaaaacacaagtgaaaaaatatacataaaattgcataaatatacataaatttgtgaatatttgctatttacggatggaaaaagatggactattataggatagaatcatatttttaaaagaaagaaaaggtaagaaacatggtaaaggtaggaattatcggagcgaccggttatgcaggagcagaattggtacgtattttattaaatcataaagaggcacagatcgagtggtttggatcaagaagctatatcgatgaaaattatgcagatatttacagaaacttttttgagcttgtcgatgcagactgtctgggtgataacatggatgagcttgcttcccgcgtggatgtgattttcacggcaacaccacagggatttctggcaggtgtgctgaatgaggatattttaaataaggtaaagatcattgatctgagtgcggattttcgaatcaaagatgttgctacctatgaaaaatggtataagattgagcataaaagcccacagtttattaaggaagccgtttacggactctgtgagattaaccgtgataaggtgaccacccagacccgtctgattgcaaatccgggatgttatacgacctgttccattctgacagcatatccgctggtaaaagagggactgattgatccggatacattgattattgatgcaaaatccggtacttccggagcgggacgtggggcaaagacaccgaacctgttctgcgaagtgaacgagagcatgaaagcatacggtgtgacaacacacagacatacaccggagattgaggagcagctcggctatgcggcaggaaaagagattaccgtgaattttacaccgcatctggttccgatgaaccgcggaattcttgcgacagagtatgcaaccctgatcaaaaagccggatggtacctatccttcttatgaggaactgaaggctgcttacgataaatattatgcaaaggaacgtttcgtgcgtgtattaaagaaaggtgtctgcccggagaccaagtgggtagagggcagcaattacgtggacgtaaactttgtcattgatgagcgtaccggcagagttgtgatgatgggtgcactggacaatctggtcaagggtgcagccggacaggctgtacagaacatgaatctgttgttcggatttgatgaggcagaaggactttccatggttccgatgtttccataaggaaaggcatctgttcggtgcatttcctacgctcattgtttccgcgtaagcggaactctcatacaatgagctctataatgaggtgaataatgagtaaagaatatacaatccgtgtgatgacactggaagattatgatgaggtgtatgcgttgtggatgggcatccacggttttggaatccgttccatcgatgattcaaaagaaggagtggagcggtttttaaaaagaaatccgaccacgagtatggtagcggtagcagatggaaagatcgtgggagccattctctgcggacatgacgggagacgcggatgtctgtatcatgtctgtgtgcacgaagattaccggaagaacggaatcggaaaagccatggcagtcgcatgtatgcgcgccctgcaggaagaaaaaatcaacaaggtcagcctgatcgcatttaagagcaatgagctgggaaatcatttctggaaagatgccggctggtgtttcagggaagacttaaattattacgattttacattgaacgaagcaaatattacgaaatttaatcagtaaggagaatgttatgagtgagaatttaaacgcattggaaaaagcacaggtgctgattgaggcattgccttatatccagcgttttaaccgcaagattatcgttgtaaaatacggtggatcagcgatggtagatgagaaactgaaaaaacaggtcattcaggatgtcaccctgttaaagctggttggattcaaaccgatcattgtgcatggcggcggcaaggagatcagcaaatgggttgccaaagcaggaatggaaccggaatttatcaatggactgcgtaagacggatgcgcctaccatggagattgcagagatggtgttaaaccgtgtcaataaatcactggtatccatggtgcaggaacttggggtgcaggcggtcggcatcagtggaaaagacggtggtctgttaaaggtggaaaagaaattgtcggatggtcaggacatcggatatgtaggagaagtaaaggatgtgaatccaaagattctgtatgatctgctggagaaagatttccttccgattatctgcccgatcggtcttgatgacaattatgatacatataatatcaatgcggatgatgcggcatgtgcgattgcccgtgcagtttccgcagagaaactggcattcttaaccgatatcgagggagtatacaaagatccggaagatccgtccaccctgatttccgaacttacggtttccgatgcagaaaaactgattacagacggatatatcggcggcggtatgcttccaaagctgaataactgcattgacgctattgaaaacggagtatcccgtgtgcatattctcgatggaagaatcgcacattgtctgcttttggagatctttaccaatcgcggaatcggtactgcaattttgggtgatgaagaacatcatttttacaatgaataa

SEQ ID NO: 278 - DNA, 6713 bp, unidentified
  source 1..6713: mol_type = unassigned DNA
ctattcagtcttctccttcaggtattcataaaaagtatattgtgaacgtactttttccttttgtggatgagctgatttccaacagttacgcagattctcatctacaaaacaggctttacgcttatctgagagctggatagaaagcatatctattagttcctgctttgcatccgggtccagtatgggggtgacggcctcgatgcgacggtacagattacgccgcatccagtccggtgagccgaggaatagtttcgggtttcctccattaccgaaataccatatacgtgcgtgttccagaaatgtatctacaatacgtgtgacacgaatgttacgactgtatgtttgccccggtatcaggcagcagataccacggacgatcaggtctatttccacaccggcttgcgaggcttcatacagacggtttatcatggtaggatcttgcagtgcattcatctttagtatgatgcgaccggcttttccttttttcgccagctccatttcatgatcaatcagacggttcagttccggtatcaggttaaaacgggctaccagtaagcgatggaacttcagattctctttaccttgcagggtacggaacaagttgtacagatcgttcacgatgatccggttacaggtaaatagaccactgtctgcgtagagcgtagcagtcttttcattgaagttaccggtgctgatataggcataactggttagttttttcccttctgcgtcgcgccgaagaacgagggcaaccttggcatgtacctttaatttaggaatactatatatgatattaatgcccgaagctttcatcatttcagcagtggcaaggttgttttcttcgtcgaagcgggctttcagttccacaaaaacagtaacctttttgccattctgtgcggcggctatcagagtgttgattacagctgagttctcggcaacccggtattgtgttaccatgatttcacgcacggtaggttcgtgtacggcttcgtacaggaagtggatgaaatgttcgaatgaatggtaaggataatgtagtagcaaatcctttttctccacatagcggaatatggattcccgttcatcaaggcaggtcagtttcatcggttgcggcttccgtatagggtgtatattggggttgggattaggcaaatggcgtaagtcttccaggttgaggtgcttgtctcccggaaccaactcgcggcggtcgatatggaaagcgtctaccaggaaatcaagaaaatcctgcggcatggcacggtcgtacacaaagcggcatacatctcctatcttgcgtttctttactttagtctttacctgttcgatgatttcggaagtgttggcggcatcgtctatcagtatatccgcatcgcgagaaatcttgatgcaataactgctttctacatcatagcccgggaagataacatccagattagccttgatgatatcctctatgaacatcagataatagttgtttcctactttgggcaactctatgaaacgtggaactttgctgtatggctgtttcattacgaaatattgcgtacgtcccggagcaccgggcggcaatcctttctgttgaagacggacggcaagatacagacggttgtcgcgcagaaacgaaatgaccttgtccttggacaccggcacaggttgcaggaacgggaaaatctcttcccggaagaaacgacgtacgaagtcgtgatggaagggttccacatttcggctctgatagaaaatgatatgatttttcttcagggcaggaagtatcttttgctcgtagatacggatacgatcctccatttggcggtttacttcaaggtttatcgcatccaccagttcgatggtagactgtacggtttcctcgtcactttgtgcagcaccggtagctatagctttatggtcggcaacgcgtattttgtagaattcttccaggttggaagaataaatggatataaagttaatgcgttcatacagaggcaaggtgtcatcttctgcttccaacagaacacggtaattgaatgacagccaactaatgtcccgtttaaaatattgatattggttttccatactcatcaagattttcccaaatatagttacctttgcacagataaacaaaagaaagatgacaaaagttggtttattatccgatacacacggatattgggatgaaaagtatctgcaatatttcgaaacgtgtgatgaaatctggcatgccggtgacatcggttcgctggaagtggcgcagaagttggcggcattccgtcctttccgtgccgtgtatggcaacattgacgggcaagacatccgtcaggtctatccgcaaatcaatcgttttactattgacggtgccgaagtgttgataaaacatattggcggctatccgggcaattacgatccttccatacggggaagcattctggtgcgtccgcccaaacttttcattagcggacattctcatatattgaaggtgaagtatgacaaaacactggatatgctgcacattaatccgggtgccgcaggtatttccggattccataaggtacgcacaatggtccgtttcattgttgacaatggagtgttcaaggatcttgaagtaatagagttggcaggttgagaaagctcctaaaaataaattaaattattttgtactacatttgctttgcattatctttgcgacttgaatagcaaattgagagccgtggggcttggtcctccttcttattttattctatatttgtatcaaccgaaaaaagaactgaaatatgaaaggaattattcttgctggtggtagcgccacccgcctttaccccttatcaaaggctatttccaagcagattatgccggtttatgacaagccgatgatttactatccgctttccacgcttatgttggcggggatacgcgaagtgttgattatttccactccacgtgacttacccatgtttcgcgaattgctcggtacgggtgaagagctcggaatgtccttctcttataagatacaggagaaacctaacggactggcacaggcttttgtcctgggtgccgagtttctgaatggtgaaccgggatgtcttatcctaggtgataatatgttctacggccagggcttctctgctatgttgaagcgtgccgcttcgatagaaaaaggcgcatgtatcttcggctattatgtaaaggacccacgtgcctatggcgtggtggaattcgatgccgacggcaaagccatttcgctcgaagagaagcctgcgcaacccaaaagcaactatgccgtgcccggtctttatttctatgactctactgtcactgccaaggctgccgctttgaaaccatctgcccgtggcgaatatgaaatcaccgatcttaaccgcttgtatcttgatgaaggcacactgaaagtagaaatcttcggccgtggtttcgcatggctcgatacgggtaactgcgacagtctgctggaagcaagcaactttgtggctaccatacagaaccgacaaggtttccgcgtcagctgtatcgaagaaatagcctggcgcaaaggttggatagatgccgatcagttatatcgtcttggtgaacaactcggcaaaacggaatacggtacatacctgatggaacttgccaattctcaccgttgagaaaatcataaattataaattataaatcataaatcaatgaagacttatctcgtaaccggtgcagccgggtttattggcgcgaattatatcaagcacattctggcaaagcatgatgatgtcaagcttgtgatattggatgctttgacttatgccggcaacctcggtaccatcgccaaagacattgatgatgaacgttgtatctttgtgaagggtgacatttgcgaccgtgtattggctgacgaactgtttgccaagttcaaattcgactatgtggtgaactttgccgctgaaagtcatgtagaccgcagtattgaaaatccgcagcttttcctggttactaacattctgggtacgcagaacctgctggatgcagcgcgtcgtgcctgggtgacgggtaaggatgaaaatggttatcctacctggcgcaagggtgtacgctatcatcaggtttctaccgatgaagtgtatggctcattgggtgccgaaggatacttcacagagcaaactccgctttgcccgcacagtccttacagtgcttccaaaacaagtgccgatatggtggttatggcttatcatgatacgtataagatgccggtaactattacccgctgctccaataactacggtccgtatcatttccccgaaaagttgattccgctgattatcaagaatattctggaaggaaagaagcttcctgtttatggtgacggtagcaatgtgcgcgactggttgtatgtggaagaccactgcaaagctatcgacttggtagttcgcgaaggcgtagaaggtgaagtgtacaatgtaggcggtcataatgaaaagaccaacctcgaaatcgtgaagttaactattgccactatccaccgattgatgacagagaaaccggaatatcgtgaagttctgaagaagaaagtgaaggatgaagacggtcagattgatatcagctggattaatgaagacctgattaccttcgtgaaagaccgtctcggccatgatcagcgatatgccattgatccggcaaagatcactgccgctttaggctggtatcccgaaacgaaattcgaagacggtatcgtgaagactatcgagtggtatctgaataatcaggactgggtggaagaagtaaccagcggtgattatcagcactattacgagaagatgtacggaaagagatgatgtttagtgattaacggttagtgattgctattataacactaagaagaatccccataaacagcatattgcgcgaagtctcgcccagtatgctgtttaattttttaccgcttcgtatctttaccatgcgtttccaggtagttacgtggaaataaaggtaggtgaaaggcatgaagatacctgcatagttccagccttgggcaaaccagaaggaaagcaatgtcgcgatgatgccgagccagaggtaaaggtatctgccgaaaggttctccgaaacggacgatgagcgtacgttttccgctgagggcatcctgatcgcggtcgcgataattgttcacaactaataaggtatctattaccagtccgctgatgagcgaagcaatgatgacgtttggggtgaatgtatatgcctgcacatagtatgtgccgcctaccggaacaaagccgaagaatatcagcaccagtaagtcgccccaaccttgataggagaggacggtggtataaaggaaggcaaatattacgcagaatactcccagcacaatgagttcccatcctccgtgaggcagttctccccaacttgtgtatagcaatccgagaccggaaatgcaggacaaaatgacgatgacaccgattcccactttcatggctcccggtgtaatccagccttgtgcgcaggcacgttccgggcccaggcggtcggtacggtcggtacctttcaggaagtcgaagaggtcgttgatgaagttggcggcgatctgcataccgcaggcaaagagcatacacagcagagcgggaacaattttgaattgtccgtcggcaaatgccagtgaagtacctatcatcacaggaatgatagctcccgtcaaggttttgggacgggctgcaaggagccatgcatggggggaattctgtttgatctctttcatattccggttttagaagtaagttatcatttaccaattttgtagcaaagatacagaaaatgcctatctttgtattcgtttatgatgaataatgtgctcacttgcgatgaataatatacttgcctatgatgaagaatttattttatatatgtatcctttccttactatttttttcttcctgtaagtcgggtagcagtatgttttcgtcttccaagtccggttccggatataaaggcatcagtcgggtaaggacttatgaatttacccatcccgatgtaccaactgctttcgatggttttcgtattgcctttatatccgacttgcattatagaagtcttttcaaagagaagggattggctaatttagttaagttgctcaataaccagcatgcagatgcattgttgataggtggtgacttgcatgaaggttgcgaatatgttcagccccttttggctgccctgtccggggtgaaaacaccgatggggacgtatgtcgtactgggcaataatgactatgaagcttgttatgatgatattgtacgtggattgcagaagtacggtatgcacttgctggaacataaagtagatactttgagacgggacggagaagaaattttgattgccggcgtacgtaatcctttcaatttaaagaagaatggcacatctcccacacttggactttcacccgatgattttgtcattctgctgacgcatacgcctgactatgcggaagatgttcccattacgaataccgatctcgtacttgccggacatactcatggaggacaggtcactctatttggcttgtacgcaccaatcattccatcccattatggtaagcgtttccgcaccggattgaaatacaactcgcatcacataccgatgattataaccaatggcatcggtacatccaataagaacatccgactctttgcgcccagcgaagtggtgatgattatactgcatcagcagaaagactaa

SEQ ID NO: 279 - DNA, 11005 bp, unidentified
  source 1..11005: mol_type = unassigned DNA
ttattctacagtattcagcttttcaattatattttggttaatcatagaacgaactgctcgttttactgctattctacttccgaaatagagcaagattacagttgctataaaaacaggtacgacatagaaaagatatatatcccataatttgatattgctaccaagtatagagaaaaacactactactgcaccgcccaaaatagttcctaatataattccggtagtcaatgtacgatttatttcattgataatcaatttttgtacagtttctattctcgctcctatcgccctcatcataatataacttttaagatttgagcgaacctgaacatagcttgaaaaaacaatcgctattaaaattattactataaatataaacacactaacgataatttgcaatgtttccagattcacttggtcataaaattccctctgcatctttgcatagttatcatatcttacaccaacagaaattccttccaaattttcgagattattttcaagctcattcacccatacactatcattatggtcaagattttctaaaataatattttcataattcaagtctggataaatcgaaaaaagatattctgtagatataatgagttcatcactattatattgttccttagaatatgttgctgcaactttaactttagctactttaaatttaatatgttcttctatattctgttctgttgcttctgcatcagctataggaataatcatagtaaattcatcaccaactgaacataaataatcaggtgctattatttcaacgccattcttataatttttttcatcaattttaccgttagcaaattcatttatattatttaatactgaatcatatgactgccatttaacagaaagctcaaccaagctatccttgctgctgtcaccgcctgcaagcttaatcatttcatttgtacgcttatgttgaaaaatataattatactcattttttttcgcttcaacaacatacttatataaaagcttattatcaggattttgagaagttaagaaaaaaggtacaaaaagattagaaacagacgcttctaaaacatttattcttttatccgatgttatctcatctgctattttatgtgatacaccacaacctacaggtaaatttatataataaatttttgcagagcttcctccacccatcatatgcaaagaataatctgcgttttgtttaaaatactctggattatcagcatcaaatgaacttcctcttgcattaaataacggaacaaacgaaccaaatattgacattccaacacaaaacattaccaacataacacaagtaaaattttgtagtttatatcttcttccatatgctttatgccaacaacgctttaatttagtttgagattttatctgttttttagatacatatatcgcttctcttaaaggtgcatttttataaaaacgagcgagcaaaatattgaacgaaataaaaatcaatactgcactaagcaaggcaactataatcaaatctaaaatgcttaaatttaagaataagtattgcgacgaaaaagacgatataaattgtaataatagtaacaccaatattgacgcaacacttgaaataaccaaggaacttaaccatataaaaaatccctgaataagtaataattttcttgatttcttctttgaaaaacctatacatctaagtaaattcaaatatcgttcttgttctttaaagaaatataaagaaattgatactattcccataatcgtagtgagtacaaaaaatatcttcactggcattaaaattaaattattagcaaccattttagaagaaatcatttgttgagaatcattatagtatacacttttacttgaaatatttcttatcaaaaatgagttttcagctgctattatatgtatatactttggtgaagctttactatttgttgttaatattgatggaaataaaagtttttcactttgatagtcatagtgcaattttattttatttgaaaaattctttataattccagtcaatataaagcttttcttttctgtgtttccatctgaatttttaatttcaagttctaccttatctcctattttacttttcaatccaagaatatcatatgtacttttttctattgcaatttcattctcagattttggcatttctccagattcaaaatgtaatgataagagtgtacttacattgtcatttacatttcctatccaaatatccgaagggcttttacttttaacttcccaaattccacttataattcctgctttttcttcaactaattgagattccttttctctgaaattctcttggtctacataaaatcgaattgattcataagcaccacctttttctattttataattttctacaagagaatatttaaaactattactgtaccaaagaatagtaagaaaagcaattaagaataatgatatacataaaactatacctatacaccgtttcggatatgatttcatatattttttagtaagatataaataacttttcattatatatcaccacccaaaatgccatcacttattgttataactcttgaaaatcttttagcgatattttcatcgtgagttacaacaagcagtgtaacagaatactcttttgacatatcaaataaaagctccattacagattgtgtagtttttttatcaagatttcctgtaggttcatcacacagtaaaagagatggtcgatttatcaaagctcttgcaagtgcaacacgctgttgctgaccacctgaaagctgtccaggaagatgattcattctgtctttaagctcaagacgctctataagcttatctacatatttatcatctatatttttattttgcaacataagaggaagaattatattttcatatgcagtaagttcgggcaaaagattaaatgattgaaaaactactcctatatgttcaagacgaaaatcatcacattgattttgtgacattttagaaaaatctgtatcaccatattttatacttccgtcagtagcctgttccaaacctccaagcaaatgcagaagtgtagattttcccgaaccacttgtacctgttattgcaatttgttcaccatcgtttatttcaaaattacaaggctttaatgcctcaactacaatatttccttgcttatatgtcttttttacatcttttactactattttcatatcaaattctccatatattcaaaaaaggaagagcaattctgccttttttgttaatctattgtttaattatttaactgtaacattactcaccttatttcatattattaacctcctattaatttataatattttttatcaaaataaattttaattttttaaaaacatcgaaacaccaactttctgtttatattttttaaattcacaattattttatatctcaataataccatattagtttttaaaaagtcaacacattttttattaaaagttatttttttatatatcacttacacaatgttattttaaaatattgtctattcaaaattaaattgaactcaattaaattatagcacattctttttcaaatttgttatatctggtaaaatttgtcgttttctggtaaactttgtaatttaaatataattttgattatatttcaaatcaaatattcttatgtaaacaaaataaaaagccgatagctttaaactatcgacttttattttcaaaaatcattatattttaaggacgaagacctgtaccaccttgaagtgtaagtgtttcgcctgtcatatacttaaaatcaggtgaagcaagctgaacacaaactctgccaatctctgtttcaggatttgcaaaataccccattggaggtgttttaacattcttttcatatgcctctggaaatttactcttaaactgttcaagctgtgcagtccatgcaagtggacaaataacatttacatttataccgtccttactccactcggtagctgctactctactaagtccacgaataccttcttttgctgcggcatatgagcattgtccgaagttacctgaaataccagcaccagatgcaaaatttataacagagcctttagtttcacaaagatatggataacacgctttcatatagtaaaatgttgcataaagtccagaatataaagcaagattgaattgttctgttgtatgttcagcaagagtaactccagaagcagaagcctgtgcattatttataagaacatcaattcttccgaattcatcaatagctttttttacagtattttttgcaatagtttcattatctgcacctgcacaaatatctgcctgaactgcaagtaccttaatagaatatttgctctcaagttcttcttttgcggcatttagtttttctatatttctgcctgtgataacaagattagcaccttcctttgcataagctgttgcaataccatacccgatagaaccacaactgccatcagaaagaacagctctgcccgctccagtaataattgctgttttacctgctaagaaacccatataagcatctcctttaaaaatttttttataatattttacgcctttatccattttataatttctttttcagaaagacttcttgccttttgacaatcagctttaaactttctttcattcttaaaagctaaaggtgtaaacatatattaacttttatgcttgaatttcactctcttaagttagatgtagctaacttgcctttactaaattgtagcaacctttaaacaaaacggtttaattctgcattatattcatagcctattatcgaaagcttttctttgatagtatcagtatctatactattagtctttgcaaattcctcaagagatgaataaaaatctctcaactgagtatttacatatgataataaaatcatagggtcattaggcagtgacattttatcattctccattttcgctattataaatttcattatacaacaaacctcctcataaatcaagctacaaatctttatcatataagaaaacgcatacccaagcggatatgcgttcgatttctataaaataaatttattttattttaaatctaatgtttgtggctgaggtaatgcaggtgtaactgacatcttaaagtaggtgccgagatagtccttagcaaccttagtcagtgcaatcattgctgcacgacgaacctgtggattcggtgaaagtgtatgagccataagtttaaaaaacaataatggactataatacatcggcttttcgatttccattctatcaactcctttctaagatactatgtatataaaatttcttgtaatctatttgatgatataagtttaacacacaaatttaaacaatctataaacaagctgtaaattcatatggttatttttgtaaatatatcattcaaaataatttaagagagttgatttttgcaattgtcttaaaattcgctgattatatcaagcccaaaatcttttgcacgctttacggcaagctccatagacttatcataaacctgctcagggctatgtgcatctgaaccaactaagacttttaagccagcgtcttttgccatcgcccaaaaccttgggtgaggatatgggtctctcctgccatcaggataatcctgctgacctcggcgaataccgtttgcattatactcaacaggtgtattagtaagcattgcggcatctacaattatctcacaagctttatcacagtttttattccacgcaaagcaattcataaacataatatccgggtgaacaagaactgaaaaatacccctttttaagagcctctgaaatagcctttgcataagggatatattcatttgtgctttcagaagcaaaaatactgcaaaatcttccatttatatcaaagaaatgttcacctaaggcgagataatcaagcttcatttcattcaaaagccattcataatattcacagtatttaggaagatattctatctccaagcctgtcataatacgcattttttctgaatagcgttctctttcggtctgaacagctgaaatatattcttgaagctccgaaaactgcatacggtaaccgtaatcaatatctttaaaaggtgcgtggtcagaaaatccaagcactgaaagtcccttatcataagcctcttttgcataatctgcttctacaccaaatgcgtgacagcagcgtttagtatgtgtatgaaaattacttttcaaaatcattccctgctttccaacaatcccttagaaacagcacaatcaatcacacgaataagctcatcataggtcatacaaaaacctttttctttgtttttaagtctgtttttcaagtcctcgatttcaaagaagcgaagttctgtaatctctttttcgtcatatttaagtgtatcaagcgaaacactttcatcgacaaaataaacacgattaaattcattgcttataaaatcgccctgatgaacagtaagtatctggtcgtgcaaaaaatgtaaatcttcaggcttcagcttgagtgaaatttcttcttcggtttcacgaatagccgcctctattggtgtttcacctgcggaaatatgtcctgtgcaagcggcatcatagcaagatggaaaggattccttgtcatctctgcgtttttgcaggagaactttgctatcacgaaaaagccatatatgaacacttccatgcaaatcaccatcgtggtgtacggcattacgctctttgattttacccgttggtgttccatcaggattcaatatatcaaaatattccgacaccgaaaatcagtccttcttatagccgtttgggttattcttttggaatctccaagtatcttcgcacatatcatgcaagttacgctctgcgtgccagccaagaacctcatttgccttcttaggatttgcatagaatgctggaaggtcacctgctcgtctttcgccgattttgtaattaaccttttgaccagttgcgtcctcaaatgcattgataatatcaagaacgctgtatccgatacctgtgccgatattataagcatctatgatgtgtgggtcggctttaagcttattcaatgcacaaagatgagcttttgcaaggtctactacatgaatatagtcacgaatgcaagtaccgtccttagtgtcgtaatctccgccgaatacagtaagctgtggcagcttgccgattgcaactcttgaaatatatggcataaggttgtttggaatgccgttagggtcttcgccgataagtccgctctcgtgagcaccgattgggttgaagtaacgaagaagtgaaatactccattcattatcagaaacatatacatcaccgagaatttgctcaatgaaatgctttgttctgccgtaaggattacttacatcacctgttaccatagtttcctcataaggtataggattattgccataaacagttgctgatgaactgaaaactatgctcttgcagttatattctttcataacatcaagaagtgtaactgtacctgaaatattattatcataatacattattggctctcttgtagattcaccgacagcctttaaacccgcaaaatgaataacagcctcgattgagttttcagagaaaattttctctaagcctgctctatttcttatatcacaatcatagcctgctatatttttattagtgatttgcttaattctctctaaaacttctggaacggaattgcaatagttatcgcaaacaactacttcatatcctgcattgagaagctctacacaagtatgacttccgatatatccggcaccgcctgtaactaaaattgccatattataatacttccttttctttagtaattttatccgaataaattattctatattgtagttaagtatacaatactggcaatcatttgtcaaattaaaggttttatagctgttttagaaagataaatgtatctaattatcacctctttatatcttgaaatgtttaaaacaatttttataattggcaatgctttcttatgcctcgacacttttagcgacctattcgctgcaaatataattaaaaaatcgttttaaacacttattgtgtacctctacatttaattatagagaattattaagcctttgtcaagtacagaaacacttattgtgtaatattatatcagcctctctcttaaatatattaaaagctttttctctctgcgtgatacttgtacctgtgtcattcccaactcctttgccgtttcggattgtgttttatttttgaaaaaccgtaataatatgaggtttctatcgtttggttcgaggctttttatttcatcgtgaagtgatataacctccgttagtttttcatctggagaatcagtaggaatattaagctgtcctgaaccgttttcttcatcggctgtaagtgaaacaggcaatcttgacgcattgagtgcctcggttgcctgttcaggttctacaccaagaatatgtgcaagctctgaaatctgaggttctctgccgttttcttttaagaatcgtgcaacttctcttgtagcctttagggagagttcttttaatccccttgaaattttcactgcacctccatcacgaaaaagtccttttatctcccctaatattactggcacagcataggttgaaagctttaatcccctactttcatcaaaattatcaatcgcttttataagacctacacagccagcctgaaacaagtcgtcatactctattcctctgccacgaaaacgctttgcacaggaatgtacaagtccaagattttcgctgactgccttatctctgtcatacatcttttatacggctcataagccgtttttcaagtacaactgttgtgcctttgccctctcttgatgtaaccttaactttatctgtaaagctctgcataactgcaaagcctaaacctgctctctcctctcctcccgttgtaaaaagcggttccatagcctgttctatatctgcaattccacaacccttatctcttattttaattacaacaactgcaccctcaaagatttttacacttatgtatataagtccaacgctttctttatatgcgtgaactatacaatttgttacagcttcagaaacggcggtttttatatcggttatttcgcctattgtcgggtcaagctgtgagataaacgccgaaaccgccgttcttgcaaaaccttcatttgatgaacggctttcaaaggtcaggctcatctcattttttaacttcatctttttcacaccctttctcaaacagctttaatgccgacaagcccgacaactcaaccattctttccatgctcggcggaatattcaacacacgaacctctccgccgagcaacttcatagttcggtatctgcccataataaggccaattcctgagctatccataaatgtcacaccgccaaaatcaagataaagcactgtcggcttatttctctcggcggctgaatctatggtttcacgcatagaacgagctttatgatggtcgatttcaccgaatagctttgctgtcatttcgccatggtcggtgatgatttttacatccatttttctttttcattcctttcagagtttttagccctccacatatatagatatgcttcttgcttcaataaaataatagctttttatacacaaaaattacggcgaaaaaagtttcaggaatgatatttttgctcgacacacaaggctatattaagtcagatataagcacattacgctgattttaaccaataaaaaagcaattcttttgtaataaaatatcaatgttttacctaaagacagctaaaagttttgctcaggctttttcaaaagcttgcagtttccaaaggtagtcacctacggcaaagtatttggtgggtattaaggacaaaacaatacttaaaatttaagctttataatttttaatagatatgatataatgaaagaaaaatgcaagggtggtataaatgaaattttattgtgaactcaagaaagttgtagatgattcttatgatattgaaatcggtcacaagctttctgacacgctcataaatgacatacagaatggtttagttggtaaaattaagaagtttgctgttgttactgattctatcgttgaaaatctttatgcgaaggaaatctttgataagcttattgaaaaaggttttaaagcagatttattcgttattcctgagggtgaaaaatcaaaaactcgcccaatgaaagaatttgttgaagattctatgttaaacaaaggatatcgcagagattgctgtgtgcttgcaatcggtggcggagttgttacggatttagctggttttgttgccggtacttttggcagaggtgtacctttcatcaactatgcaactacacttctttcagcggctgacgcttctgtcggcggaaagactgctgtcgatacaccgctcgcaacaaaccttataggaatgttcaatcagcctaaaaaagtctatatagatatagatacttggaaaactctacctgcaagacagctttcaagcggtctttcggaaactataaaacacgcttgcctcggcgatttagaaatgtttgaatatttagagaaaaacattgaaaaggttcttcaaaataatgttgaggcttgcgagtttatcgctgagagaaattgcagagttaaatataatgttgttatgaaggacgagcgtgaaagtggtttgagagaaatcctaaatcttggacatactgtcggcagagcgattgaaactgtttctgactataagctcttgcatggtgaggctctgtctattggtatggtcgctcaagttaagcttggtaatgagcttggatttatttctgaggaaaatatgaacagagttattagcctctataagagagctaatttgcctataacaatccctgattatattgataaaaatgttctcgttaaaaagctctatactgataaaaaagttcgtgacggaaaacttagatttgttttccaaaaggaaattggcgatgttatgtgctttggtgataatgcttatggtttagaaattgcagaaaatcagattgcaaaaattatagaaaatatgtaa

SEQ ID NO: 280 - DNA, 17290 bp, unidentified
  source 1..17290: mol_type = unassigned DNA
  misc_difference 14979: note = a, c, g, or t
  misc_difference 14980: note = a, c, g, or t
  misc_difference 14981: note = a, c, g, or t
  misc_difference 14982: note = a, c, g, or t
  misc_difference 14983: note = a, c, g, or t
  misc_difference 14984: note = a, c, g, or t
  misc_difference 14985: note = a, c, g, or t
  misc_difference 14986: note = a, c, g, or t
  misc_difference 14987: note = a, c, g, or t
  misc_difference 14988: note = a, c, g, or t
gccgatgagcatgatctcgggcttcttttccattaccacatcgcagatgaccttggtataggcatcggtggtgtagtccttcagcagggggtgctcacatacgatgatacggtcggcgccgtagccgcccagctctttggccagcccctctaccttatcgcccagcagcaggccgcacagctccacgcccaggtcatcggccagcttgcggccttcgctgatgagctcgaaatcggtgggcatcagcttgccctcgcgctgctcgcagaatacccatacgcccttgaaggcggtgggatcggtattcacaaaagtagacatagtcattttctcctttctatcagatgatgtgcttctctgccagcagagaaaccagcttttcgcaggtcgccttatcagcgccctccagcatcatgccggcacccttctgagggggagagaaagacttgtaaacattggtgggagagcccttgaggccgatggtatccagctcgatgagcggatcatccttcagagtctcaaagttgtagatctccagaggcttattgtagcactcgaagataccgccgacgctcatgtagcggggagtattcagctccttgatgcaggtgagcaggcagggggtgtgggtcttgatggtcatgtagccatcctccagcatacgccggcagatgacatgctccccatcgaccttgatctcggaaacataggtgatctggggcatccccagcttttcggcgatctgggggcctacctgggcggtatcgccatcgatggcctgacggccgcagaatacgatgtcacccttctccacgccgatcttcttgatggcggcggcgagaatctggctggtggcaaaggtatcggagccgccgaattcacgggcggaaaccagaacggcacggtcggcgccgcgggccagcagctcacgcagcatcccctcggcgggaggggggcccatggaaacgaccacgacctcgcagccggtttcgtccttgagggtcagggcagcctcgatggcattgaggtcatcggggttggtgatggtatccatggaggcacgatccatggtaccgtcttcttttacagcaaccttaccggaggtatccggtacctgctttacacatacgatacatttcataacggcatactcctcctatcagttgaccttaagattggcggcgatgaccatgcgctgaacctcggaggtaccctcgtagatttcagtgatcttggcatcacgcatcatgcgctccacggggtaatcacgggtgtagccgtaaccaccaaagagctgtaccgcgcggcgggtgacatcgctggcagcctcggcggcaaagagcttggccatggcggcatccacgctgtaaggctcgtgggcgttcttcttgcaggcagcggagtaaaccaaatacttggcagcttccatgcgggtgtgcatatcagcgatctggaactgggtattctggaactgggaaatgcggcggccgaactgaacacgctcgtgggtgtacttgatgacctcttccacagcgccttcgccaaggcccagtgcctgagcggcgataccgatacggccgccatcgagggtagccatagcgatattgaagcccttacccttcttgcccagcagacggtcggcggggatgcggcagtcttccatgatcagctcgcaggtggaggagccgcggatacccatcttcttttcgtgcttaccaacgctgaagccgggatcggtacgctctacaatgaaagcggagatctccttgcgggtcttcttggggttcttcttatcggggatgatgccggtaacggcaatgatgatgaacacattggcaaagccggcattggtgatgaagatcttggagccattgaggacccagtggtcgccatccagcacggcaaaggtctgctgaccctgtgcgtcggtgccggcgcccggctcagtcagaccgaaagcaccaatccactcgccgctgcacagcttgggcaggtaatatttcttctgctcctcggtgccgttctcatagataggagcgcagcatagggaggtatgggcggaaagaataacgccggtggtgccgcagaccttggagagctcttcgacagccatgacataggagaggacatcgccgccggcgccgccgtactctttggggaagtagatacccatcataccgagcttagccatctttttgacggtttcttcggggaagcgctcttcctcatctacctcggcagccaggggctttacttcattctcggcaaactcacggtacatcttctgcaccatggcctgctctctggtgagtttgaaatccataacagatcctccttatcgcttactttctgtaatcgtagaaaccaacgccggtctttctgcccagcttgccgccgcgaaccatcttgcgcagcagggggtgaggacgatacttatcgtcgccggtctcggcctgcagaacttccataatggcgaggcatacatccagaccgatcagatcgcccaaagcgagaggacccatggggtggttggcgcccagcatcatggcattatcaatgccctcaacggaggcaacgccttcggcatagatgccgacagcttcgttaatcatggggatgaggatgcggttaacaacgaaaccggcagcttcttcgacctgtacgggggttttgccgatgttttccgcgatcttcttgatggtttctaccatctcagcgggggtattcaggccggcgatgacttcgaccagcttcataacaggagcgggattgaagaagtgcatgccgatgatgggacgatcgagcttagcgccgatttcggtgatggagagggaggaagtattggtggcgaacatgcactcgggcttgcagatctgggagagctcctggaaggtctgcttcttgatctccatattctcaatggcagcctcgatgacgaggtcacaatccttgcagatctccttggtgccggtggtgatcttggcaaggatggcatcggcagcagcctgctccatcttgcccttggccacgcggccattcagacccttggcgatcttgtttttgccattagcggcaaactcttcgttgatatcgcacaggagaacctcgtagccattggactgagcaaaggcctgagcgatgccggaacccatagtaccagcgccaataataccaactttcattttcagttacctccgtaagtatagtttttggggctttaattatttattgaggaatgcgtcgaccttgcgcttttccaagaaagcgttcatgccttctttctggtcgcaggtctcaaagcagctgccaaacagcttttcttcgatgacgatggcctggtccatatcgacctgtatgccttcattgatagcgcgcttgcagttgcgcacagcgatgggagcattgcgggcgatggtggaggccagctttttggcggcgggcatcagttcttcggcagggtaaacattgttcaccaggccgatgcgataggcttcttccgctttaatattgcgggcgccgtagatcatctctttggccttgccggcgccgacgatgcgggccagacgctgggtgccgccgaagccgggggtgatacccaggccgacctcgggctgaccgaacacggcgttttcgctgcagatgcggatatcgcagctcatgctgatctcacagccgccgcccagcgcaaagccattgacggccgcaataacggggatggggaaggtctccagcttgcggaacacatcgttgccctttttgccaaaggcttcgccctcggccttggtcagggtgctcatctcgccgatatcggcgccggccacaaagctcttttcacccgctccggtgaggatgaggcaacggatggcttcctgatcgaccgcgtcgagggtcttatccagttcatccagcacggcgctgttcagcgcattgagggccttgggacggttgatggtgataataccgatctggccttccacttcataggtgataaactccatggaatgtcactctccttgacttattttgcggagcaccggagagccgtggctctccggtgcactattgatttgtgaaaaagattagtcgcgcttaacaacggtggcgcagcccatgccgccaccgatgcacagggtggcgagaccggtcttggcgtcccggcgctgcatctcgtgcagcagggtgaccagaatacggcagccggaagcgcctacggggtgccccagcgcaatggcgccgccgttgacgttcagcttctccatatcaaagccgaggtcatggccgactgcgagggactgtgcggcaaaggcctcgttggcctcgatgaggtccatatcagcaaccttcatatccagcttcttcatcagcttattgacagcggcaacggggcctacgcccatgatggagggatctacgccgcccagagcgccgccgatccaggtagccatcggcttaacgcccagctccttggccttctcttcgctcattactacgatggcggcagcgccgtcattgataccggaagagttgccggcggtgacgatgccgtccttcttgaaggcgggcttcaggcgggccagggtctccacagtggtgccgggacggggaccctcatcggtatcaacgatcacagagcccttcttgcccttgacctctacgggaacgatctcgtccttgaacttgccctcggccatggccttttcgcacttctgctggctgttggcggagaactcatcgagcatttcgcgggtcaggtgccactgctcggcaacattttcggcagtgatgcccatgtgatagttattgaaagcatcccacagggcgtcatttaccatggtatctaccagggtagcattgcccatgcggtagccgtaacggcccttcatcatggcgtagggagcgagggacatgctctccataccgccggctactacgatatcggcatcgccagcctcgatcatctgagcggccatattgacacagttcagaccggaaccgcagacgacattgacggtaacggcgggggtagtcacaggcaggccagccttcaaggaagcctgacgggcgacattctggcccagaccagcctggataacgcagcccatgtaaacatgatcgacctgctcggcgggaatgccggcgcggttcagggcctccttgataacgacggaaccgagttcagcggcgggaacggtgctgagagcaccgcccatggtgccgatggcggtacggcaggcgcctgccaaaacgattttcttcataagtgtgtgcctccttgataaaataaaatgaaattgaaaacaaaattattttcacggccgaaatgcagccggatgaaacgggggaagatcagctgcccagcttttccttcaggcgagcggctacgcagggattgacgaacttggagatatcggtgttatcgtagtgggctacctcttttacaatagtgctgctgaggtaggcataacgcaggctggtggtaaagaacatggtatcgatggtgggatcgaggatgcggttggtctgcgccatctgcatctcatgctcaaaatcggtgacagcgcgcagcccgcggatgatgatctgtgcctgattggcccgggcaaaatcgacagtgcggccatcaaaggttttgactgaaacatttttgagttctttgacgctctcttggagcatttctacccgttcttccacagtgaaaagcgggttcttatcgcggttgatgagcacgccgataaccaactcatctactacgcgggaggcccggcggataatatccatgtggcccagtgtaacgggatcaaaacttccgggataaacagcccttgtcatatggtgtcctttcgccgtaaaacggctttcacttaatatttatccacatcaaaagcaacttcagtataactgcaaaaaggggtggtgtcaaacaattgctaaaaaattaacaaataaagaattggagaaaagtgtaaattaggaaccccgaaaatttgaacaaaaaaagacgagttggaatttaactacaaatgagccctaaaatattgaataaatgtattatctatttgttatatagcaccaatcgctaaaaacaagtgcaataattccgcctattttatggtggcaaaatccacaaaaagcaagattaaactttggcgggggaaatccgcaaaacgaacggtgtttattgtctttccataatacagacgctataaaagagctaaatttaataggatattaggcatatcgaaagcaaaaacttgtttcttctccataaagcgtgggaggggatttgccagccgcggatgcttgtggtacaatgacaatagaaacagaatgaaacagcggggagggaaagggtatgatcctttcgacactgtgttacatcgaaaaagacggctgctggctgatgctgcaccgggtaaaaaagaagaacgatgtgaaccatgataagtggattggtgtaggcggcaagtttgaggagggggagagccctgaggactgcctgctgcgggaggtgagggaggaaaccggcctgaccctgaccgaatatcgattccgtggtttggtgacctttgtatccaatgaagcgcccaccgagtatatgcatctttttaccgcaggcggttataccggtacgctgcgggactgcgatgagggtactctggagtgggtgcccatcgggcaggtggaaaacctgccgttgtggcagggagataagatctttctggagctgctgcggcgagaggaagcattcttttctcttaagctgcggtacgccggagatacactggtggaagcggtgcgggatggcaagcccctgccgctggaggaggacagatgaagctattggtaagtgcctgcctgctgggggtgctctgccgctatgatggcaaggcgaaaacacatgagggcgtgtgctccctgctggaaaagcatacgatgatccctttttgtccggagatctatggtgggctgcccacaccccggtcggcatctgaacggctgggggagcgtgtggtggcaaaaacgggcggagaggttacagagcagttccgccgtggggcggaagaagcgctgcgcctgtgccggctgtacggctgtgaggcggccctgctgaaggagcgcagccccagctgcgggcacggtgttatttataacggtctgttcaatggcggactggtagagggggacggtgtaacagctgagctactgctgcaaaacggcattgctgtttatggagaaagcgagtgggaaatgctgctgtgatttttgagagcaataaagccgggcttgtcgaaaaggacaggctcggcttttctatatagtttatattccaaggaggctgtgaatggcatgtgcgacgccgtcttcttcgttggaaagggtgatccaatcggcagctgcttgaacttccgggatggcgttgctcatggcgaccccgataccggcggtttgcagcatgccaatgtcattatcggcatcccccagggccatgacctgtgccgtgggaatgttcagcatctggcaaagagcggccaaagcggcgcctttgctgccttcccgatcggtcagctccagattgcactccatggtgctgacggcgcgtacccggtcgccataacgctgcgccagccataccttgatctcggccttttgttccggagtcaggtagggcatattgattttctccaggtgggtgccgggctggcgggcgcgttccatcaaatcatcgacaatgctttcttcactggaaaagagcgttttgagatgaaatgccggaagatggatgaaatcgcggtgttcccaatcggtacgggagagatacattttttgatcggcataaagctgcacagcaaagtcgcccatggtggtcaaatgctccaggatctccaaggtggtatccagaggcagcggtgccgcccgcagaatatggccttcccggtcggtggttatgctgccgttacaggtgatgaagtagtggagaaagggcagttccaatacctgtggtgcaacagcggcaagactgcgtccggtggcaacaacgacctcaattccggcatcggcggcacgggtcagcgcctcacggttggcaggggagagggtgaggtggtcatcgcgcagcagcgttccgtctaaatcagtggcgatcagcttaatttcggtattcggcatggcggctccttttcaggcagatttcagggacggcctttttgcttgggcttacggtaccgttcggtgatctcctctactgtggtgggctgtaccgtcagcagttcctccacaaatggggctagtacaggccgccagccgattccctttttcttcagtaatgcggccatatcctccggcaggggagcggtaaggcatagctgttccccggtgatggggtgggtaaaggcgaccccggcacagtgcagcgcctgccgggggaattcctccatggggccgccgtaaagctcatctcccagcagcggccagcccttttctgccatatgaactcgaatctgatgggtgcggccggtgtgcagaatgaaccccaccaaggcgcagcttttatccggtgctgtggcaaggactttatactcggttacggcgcgttccccatcgggggaaaccatacgcttcatttcgagcgggatctcccgctccagcggcaggtcgatgaggccttcggggggctgcggaacaccacttactacggcaacataacgcttggtaacggctttccacagcttgcctgcggcaatttgatggcgggcgactactacagctccggtggtgtccttatcaatacggtttaccgcccgaaaggtgccgctgttgccctctttttcgcacagggtggcatatacgctggccagcgtgccgaagatgtgcccgccagactgatgcaccggcataccggcaggtttattgaaaacagcgacatcccggtcccagtagaggcggggaacatcgatttcgcagggaggcagtttgcgggcctggtccggcaggttgatctccagcgtatcgccttcccgcagcagatcgatggtgcgggcgtgggagccattgagcaggatgccctccggcaggtgtttgagagagatgaccaccttgcggctgatgccctgcttaaagcgcaggaagtgctggatctgatcgcctgcgtcctcggcagtgataagatagcgaaaggttgtcatgggtggtatcctccttgggtgttttgcggagagctgctggctgggggactatgataccggattataccataaagcgaattcaaaggaaagccccgatagcagtaagctgtcggggagatagaaacgaaaattatgccacgcccaggtattcctccagcgtcaggttgttctccatgatgtaggtcgcgatttcaacgccgacatagcggaagtgccacggctcaaagatgatgccggtcacatcctgcttgcccttggggtagcgcaggatgaagccgtattcggcacagtgctccgccatccagatggcttcagcatcatactcgaaggattcctccatggtgctgtggtgatagtaataatcaccggaaaggatatccaccgccaggccagtgttgtgctcgctggttccgggaggcgctacacgggtagcggccacctgctcagccttttcccggctgtaaccattatatttcatctgcgcctgcacctcattttccagcagaatggcgctgcgggcaaaggtgcggtaggcgctgatgagctgcaggtcatagccatccgccttggccgccgccataaagtcccggagtggctgggcaatgcgggcatcaaccttcaggtcaaatccggcatagttgcagatgaattcccgctccatatccagctcttcggccagcgggtatttggcgctgaccagaatggtgcgccaatcatcgctgccggggttggtcaggttggtgccggaaggctccggatcaggaactggcttcggctgaggctgagggtcaggctcgggatcgggggttggctccgggtcgggcattggttcggggtcgggggtttgatcaccctgctctccgtcggccgcatcggattgctgaccggcattgggatcaggagtggggtcgggctgggcggcattgcggcgtaccagtgcggtaacgccccatgcaatgagacccaacaccagcaggatcagtataatgccgcgcacgcgcttataggtgcggctgcggtgggcgcgggaatgttcgttttggctcatggtttctccctccgtttgttcacggtaaagtgatttatatagtaagtgccgtttaggcggcgatttgctgcacggcttatgctttttgcattagcagagcgcaccagccatcctgttccttctcctgggtgatgaacatgccctcagtctccaatgcggcgatgacttcctctttccgggggaggataatgccggaagccaccaggtgcccaccggactttaggtgatggtaaatggcgggggccagcgcgataatgacatcggcgacgatattggccagcacgatgtcgaagccgccgcaggtcagctcctcttccagcggctggtgtataagatcggcggcaacagcggtaaaacggtcaggaccaaagccatttacctcggcgttttcggcggcagtgcgcacggccaccttgtcgatatctaccccaacggcttcctgggcgcccagcatcaatgcggcaatggaaagaatgccgctgccggtacccatatccaatatgcgcgtatgttcaacggggagctgctccagcagctcgcagcacaggcgggtggtgtggtgggtgccgctgccaaaggccatgccgggatccagtgtcatcaccagttcttccggggtgggggtgtattcctcccagctggggcataccaccagccgtttacccaggtgggtggggtgataaaaacgcttccaggcattggcccagtcctcctcggccagcgtttggtcggtctcgatgcgatagggaatgccctctgcttccagccggtgggtaaggaaggcggaggcttcggctggattttcctccgggggcaggtacaggtgcaggatcgcttcggtgcggctgcgggccagcagatcctcatcgatgagatcaatgtgggcaatttgcggcaccagctccagcatatcgctataatcctcgatgtagatgccgtaggggacggccatctgcgcaatcgcttctgctgtctcggcatccttggtgcttacggttattttcaggtcagtccagttcatggcagttcctttcttactaggtttgtcccatctattatagcgggtgatgtaaaaaatctcaacagtttgcgggagctttttgcatagcggcggtatagcggcccatactgcctgcataaagatggaaaaggaggcgcgggatcatggcagagatgagccgatgcagggaaccgcaaaagacgggaacacaggagactctgcgggaagagctgagcagggtaaacaaggaactccgccgggcggaggagctttttgatgtagtgacggaggacacattgattgaagcttgtacctaccgcatccagacactgctgacctaccggacctacctgctgcgcaccgcgcgccgacaggcggaacagccggaacccattgccctgtaagcaccacaacaaaaaaggaggacatcatgggagtttggattattgctggggtggtacttattctggcgctgctggtgcgctggcggcatgccctgcgaggctggttgctttcggcagccggtggactgggggtactgtgcctggtgcaagctataggtgcgctgctgccggtgaatttatttactgtggcggtgtgtggtattttgggcctgccgggagccattagcctgttggtgtgcaatttgatgtggtgaatctccgaggcaaccggaacaaactgcgaattgtgagagtcggccgcaggcggcccggactaagcctgggccgatgccctataagggcgttgacgatgcgaaacatcgtagcctgcggccggtacttgtgcattgcagagggtaaaaagaaagacgccatcccggcatcgaacctgtggatggcgtctttcttttggaatggcttacatgccattcaggtagtcctccactacatcaagcaggtggcagggttccagatcttcctgctgcatcaaagcagccagagcttctgcggcattgcggtcatctgtaatatcagaaacagcctgctgcagttgccagccgtgtttgggaagatagctttcacacacgataccatagcaacagtagcggcccagctgcgggtgggtgatccattcttcgtaaacgcggtagcggacggtttgtgttctcatcttactctctttctctttttcctctaaagtgcacaagggtcggatcctcctctttttggtttatgctgatttactttggctttggtatgaggctttagcaatgctgctggatagattttaccatactttttaaggaacggtatgacaaaaatttcatttagattttttacagagcgcacaatagattgacaattaaagtcgaaaaacatcgacctggtctaaaaagaggaaccacagaggagaaatgaggacaaaaacttagcagaaaaagggcatgttccataaaatttgagataatttttctaacaccaaaacgagaacaaggcgtgaaaaatagactcaaaaacaaaaatatcggcctgtgagatccaaggtggaaaaacaggccggtattttttgtggaagatgacgaatcagtcgcagcgattttccgtgttctgcttttcgctgcggttctccgtgctgtttttgttttgagtattgttctgcgtgttattggtgccgttctgggcattattcttagcgttgttctgagaatttttactcatttgaattcacctcctttgtggaaatattatgcgctccacaatgccatcttatacgataaaaaacagccgtaaaaaatgcaaaaaaatttttcagattaggcttgacaaataaataggatatgttataatgaagttacagaaacgataattattactaaaaaggagatattatactatggctaaatatgtttgcactgtttgcggttatgttcatgagggcgatgaggctcccgaattctgccccgtttgcaaggctccggcttccaagttccagaaggtagaaggcgagatggcctgggctgctgagcatgtagtgggtgttgcccaaggatgtgatcctgagattctgcagggtctgcgcgagaactttaacggcgagtgctgcgaagttggtatgtacctagctatggcccgtgtagcccatcgcgagggctatcctgagattggcctgtactgggagaaggcagcctgggaagaggctgagcatgctgccaagtttgccgagctgttgggtgaggtcgtaaccgactccaccgagaagaatctgaagatgcgtgtggaagctgaaaacggcgcaaccatgggcaagaccgagctggccaagaaggctaaagctctcaatttggatgctattcacgatactgtgcatgagatggcccgcgatgaagcccgtcacggccgtgcctttgccggtctgctgaagcgctacttcggtaaataaccaaaagtaagttttagagagaatgaagaaagcccccggtggaagaccgggggcttttgcgctttcaattcaccgtcaagacagaaacggcaaaaaagagtttatccccgcatagcgcaaaacgcagccaaatgaagaaccaaaaccggtggagaagccgcccctttgtcgccacgacgaaaaacagactggaataggggaaagcgctttgtgaactttttacatactgaaaaattgcttctaaaatttttctcctaaactctttacaaaataacggccatttgctatgatatttctgtattcaacccccgaattttagccaatttggggaattacgccggaagaaccatagaaaaaacatacaaaaggagaaactgctatgtccagaattgttatcgccctcggcggcaacgccctcggcaacaccccctatgagcagctcgagctcgtgaccgagaccgctaagcccatcgttgacctcatcgaggccggcaacgaagttatcattgcccacggtaatggtccccaggtcggtatgatcaacctggccatgagcgctgcggctgaagctggcgctgtaaagagcgatatgcccttccctgagtgcggtgctatgtcccagggctacatcggctatcacctgcagaatgccattggcaacgaactggtcaagcgcggcatcaataagcccgtagcgaccattgttactcaggttctggtagatgagaatgacggcgctttccagaagcccactaagcccatcggtgctttctataccaaggagcaggctgatgagatcgcagctaccaagggctttaccatggtagaggatgccggccgcggctatcgccgcgtggttccctcccccaagcctgttgatgtggtggagaaggatgtagtagaggctgttgttaattccggtgctgttgtgattaccgtaggcggcggcggcatccccgttatcaagaaggacggcaaactggtaggtgttcccgcggttattgataaggactttgcttcctccaagatcgctgagctgctgcatgcagatgctctgttcattctcactgctgtggatcgtgtcgccatcaactggggcaagcccgatcagaagagcctggaggagatgagcattgccgaggcagagaagtacatcggtgagaaccagtttgctcccggctccatgctgcccaaggttcaggctgccattgcctttgctcagtccggcggccgtgccatcattgctgatctgcacaatgctgccctggcgctggaaggtaagtctggtaccgctattcacaagtaattgcaagtcatagctaaaatgcatagcgcccggccgtagatcggaagagcggttcagcagnnnnnnnnnnggccgttttggccgggcgcttttgtgttgttgtcagccatcttttgtggtaaaatagcaaaagtggtagggcagggtacccaccccccagcaaaaggagtgatcatatgcatctgtttttgacaggcagcgtccagattgggaaaacgactgccttgaataaaacgctggagctgctgaaagttatccccggcggctttcgctcctactttggggtggatcgcaaatctccctgccggtacctgtatatgagcagcgctgcggagccatgtgcctttacgccggagcacgccattgtaaaatacgggctaaatgagaatggtatgccggtgcacatcgtcctgccccggtttgaggagctgggcctgcagtatctctcggaagccttatcttatcctctcatcgtgctggatgagtgcggccggctggaacagcagctgccccgcttccgggcacgggtgctggagctgctggacggggatgtgccagtattgggcgctgtccggcaggatgccatgggctggctggaggatattcgcaaccaccctaaggtacagttgataacggtgacggaacagaaccggaatgatttgcctctgcagttagcggaatattatgccccgtttatcaaacccatcaaggaggaataaaaatatgaagcatcaaaatcaatcactgagaaacctgctgctggcggctatgttcctggccattggtttggtgctgccctttttcaccgggcaaatcaaggagatcggcaacatgctgctgcccatgcacctgccggtgtttctgtgcgccttgatctgcggctggcagtatggcaccgctgttggttttattatgccgcttttgcgtttcgcgcttttttccatgccccgcatgcctggtgcccttgccatggcattcgagatggcaacctatgcctttgtagcgagcttcctttacagccgggcacgctggcagtgcacccgcatgctgtaccgctgcttgattgtcgctatgattgccggccgcgtggtatgggcagctgctatgattgtcctgctcggcttttccggcggtgcatttacctggcagatgtttatttccggcgcattcctcaatgccattcccggtattattctgcaactggtgcttatcccggctatcatggtggcgctggaccgtgccaagctggtgccgttccgccgcagtgaagaaaatccccacactcatcgtgaggaaacaatatgatttatgacattgcggtggtggggggaggccctgccgccgcaatgtttgcccgtcgatacttgattctttgtccaggagcctcgctgctccttatagatggacagaacgagcagcataaaaagccctgtggcggcctgttggcccccgattcccaaaaggcgttggcgcatttcgatctcaccttgcccaaggaggtgctggtcgatccgcagatcttcacggtgcagaccattgatctttgcagccggcaggtgcgttattaccagcgctactatctcaatatggaccgctacgcctttgaccgctggcttttatcgcttgtgccgtcgcaggcggagatactccccggccgctgcacagcagttgcccgcagagaggacagcttttccctgactgtaaggacggatgggaaggagcgacattttaccgcccgccgggtggtgggcgctgatggtgcgtcttctttggtgcgccgcaccttttaccgggagccgaagacccgctacacggctattcagcagtggttcccggccggggagaaccgcgcgcccttttattcctgtattttcgatccggtcaccagcgaaagctgttcctggatcatacggaaagacgacaccctgatttttggcggttgcttttctccgcaggacagcagggaagcctataatcgacagaaaagccgactggaggagtacctggggcattcgctgggccgccccattaagaccgaggcctgccaggcggtgcgtccacgcggcttttcggattttatcactggccgggatggcgtatatcttattggggaagcggcgggctttatcagcgccagctccttcgaaggaatcagcagcgccatccgcagcggcagcgccctggcggagtccatgagccaaaccgatgatgaccgcgaacttgcccgcttttaccggagaaaaacgacttcattgcgtctgaagctgtggcttaagaccatcaaacgctggtttatgtataccccatgggtgcggcatattattatgcgactggggctggcagccatccatgtagagcaggagaacaaataa

SEQ ID NO: 281 - DNA, 16288 bp, unidentified
  source 1..16288: mol_type = unassigned DNA
ctatatctcagaattataattttcttcgacctctaatgccttctttctcaccgcctcatcataacctttaagtgccgcaaaagatgcaaactgtgccgccctgtcatgcagactcataggcttatgttttttcgatacaggtctctccatatctattatatcctgatactttttccagtcatcattttcaagcattatgccctgtgccctccaatctgtctgtttctctccattgctgttgcaccttcttcgaggttcatgccttttaatatagcattttttccatactttttcttcacatctatcatagctttctgcagccttttctctttagcaagcatatctttttctttctgcttctgcttttcaagctcgccataatccgtaaaaaggtcaagctgttcaaattctttcttttcgaccacatcttcctgccttgtaacatgatttgcaactacattcattcttctcacaagaagttcgctgtttataatctcatcatagagttttgcgacattttccattattatttttgtagatgaagtcatttttttaagatttattgttccatgtgcatgttttggaatcttccgtccgtatctgtcaaaagtatattctcctttatatttttttcttatctcggaatttttaagattttctatatcgtaacccaccgtaagaaccatctggtcggtcacaagtcccttttccacaaggtctaatacaagcatatccgtcatttccataaccacaagttttgccttttttgcatcatacgggcatgtgagcacctgtcccgaacttatgctgttgttttccggtttatatgcctttatgtcggcaatggtacacggctcatatccccatgcatggtcgataagaagctctgcgtttatcccaaacaatttataaagcagctcttcattataaaaatcccctgcttttccgattgaacaccttgcaacatcacccattgtataaataccgcacccggcaagtcttttcgcatatcccctgccgactctccagaagtcagtaatcggtttatgtccccacaatattcttctgtagcttatctcattgagctccgcaattctcactccgtccttatcaggttttatatgctttgcaacaatatccattgcaactttgcaaaggtaaaggtttgtcccgattcctgccgttgcagtaataccggtttcctttaaaacatccattataagcatcattgcaagttctcttggcgttttctcatatgttttaagataagatgtcacatctataaatacctcatccacagaatacacatgtatgtcttcgggagctatatatctaagatatatattataaatttttgtgctgtactccatataataagccattcttggctttgctacaatatagtctatttttttgccggtagcagcttttatttcatttgctttctgcaccacctcaaaaagtctcgctcttcccgaaatgccatacgctttcaatgaaggtgacacagcaagacatatcgttttttcagtcctcgactcatccgcaaccacaagatttgtcgtgagcgggtcaagtcctctctccacacattcaactgatgcataaaacgattttaaatctattgctatataaatatgtccggtatcattttgtttatatttgtccgaactttcaaaacccactgtaaaatcccccttaagcctttttaaattcaatattgactataaaaatattatcatgaagtgatgcagaaatttttcctcccatgcactctgtcatctcttttgcgatagccattccaagtccggtagaagttttactcctcgctgcatcagctttataaaacttctcaaaaatacggtttatgttaatctcatcagggtttagtacctcgttttgtattgtgagagatattttatccggagaagcatataaactgatttcaacttttttctctccatgttccaatacattttttataacattctgtaaaatacggcgcataacctgctcatttccataaaaacaaagcgattcgtctgtcaatctcaaaaccggaacaatctttttcatttcccactcttcataatatgaaaatagtgtttccctgacaatctcattcaaatcacatttatacaatttaatattataagtcttattttctaattttgtaaatgtaaataattcctccagcatgtccctgagtgctttaattctctcttgaattatcgcaatataccgtttattcttctccttgtcatcagactccgataataattggaaatatccgtcaagtgatgtaagcggtgttcttatatcatgtgataaatttgtataaatatccgcaacctcattttctctcttcttccatacaatcctctctgccctatgtttctcaaataatttatttaggacatctttaaggtctttcagccctccaatctctatctgtgacgtcaccagcgcattgctttgatttttttcaataaactctatttgctctgtaatgtcttttatctggcttctcaacttaacataaagatatgtaactataacaaacattattgcaaaaaatgctatgatacactctctcaccaaaaatcatctccttcccgacaacgccataaagccacacacgaaatataactatagtaatatactatatatcatacaccatatgtgactttattttaatcagcttttatttccaaaatcttaaagtaaaaactccttcatcacaccatatctctcttttccgtactaattataccggctgctgccgcaatggcaagataaacaatcacaaacatagtaagatttaacagctgtgacatgctttcgcctggaacaagattgtttattttggtagtaataaggtatttttcaatctcaacagtaaagcctgtgagcttatgcaccccgacatcaaccgccatgcagataaacggtcccactccaattgacaggcacactgctgccgtcatgccaaaaaccctgttttttatcacagcctcaattgtagcacataccatcaaaaatgcatattgaagtaacacctgaaaaacaataaaacttatatatccatcaaaacttcccgctcccagacttatttttttcgtgcatatcatccacacaaccgcctcaaccaaaaacataatcaaatcaaataaaaccgtataaatccctataaccgccatttttgaaataaatagctgcctgcggtgtcttacctgaccacctatgtttttaatatatccgtttttgttttcgcttgatacaaatatcatcacaaatattacactaaaaagcagataaattcctgatgacaataattttccgtatacatatactgcattcggcgtagtattttttataccggtagtgtcaatctgaactcctatttttacttctgaattatcttccgaatctgaagcactgttcttatctgtgctttctaccaccgtcttattactgcttgtatttgtatctgatgtttcaggcatcagattcattgccataataataccaaacgccattgcaattatagttaccacataaaatgatttcattttaatcatcttatacaaatccatctttataatattcaacataaactttattctccttttatacgcactcataaacaaataattgatttaatctgctgtcatattcaaaaaataactttcaagctcttcctgattcaccttaatctctctcgggcatactcccgagtttacaagtctttcatttatataagcactttcctcaaacctttcataaatataaatatgcgacttgtcaaccacctcataattgtgaactcctatttcatcaagtgtgacaagtgctcttttaggctcatcaagcactatctcgattctcttactgcactgctgcattaactgttcctgcgaaagctcctgtaaaagttttcccttgtgtattatcccaaaatctgtgcagacctttgaaagttcctctaaaatatgactcgatataagtattgtaatatttctttctttggcaagaccggcaagcatatccctcacttccactattccctgcgggtcaagtccgtttatcggctcatcaagcacaagaaaatcaggatttccaaccatcgcaagtgctatgccaagtctctgtttcataccgagagaaaaattctttgtctttttcctcccgacatctgaaagtcccacctcatcaagcagtcccaaaacgtattttttgtcatttatgccaaacatctttgcctttatcatcatattgtcaaatgccgacatattcttgtaaagtcccggttcctcaataaggcatcctactcttgacctcaccttcgataaatcctttcctgaatacccaaacaatgaataatctccggatgacggagctgtaagaccgcttatcattttcaaaaaagttgtctttcctgcaccgtttcttccgataaagccataaattgctcccctctttatatgcatatctatttctgaaacagctttgtgcctgcgaaactgtttcgtcaatgcatgggtttctaacaaaatctcactcataataatcctttccggctgctaactcccattcctacagcctgtcatataatcctgtaaaattcttcatcaggactcgtttttatcttacaaaacttattttaaatatcatttcataataaaacgctaagaaaaagtaaagatttagtaaagatatttattttccgtccgcaaagcggtatccaatcccccaaaccgtctgaatatactctttgtctgttatatttttaatttttttgcgtatgttgcttatatgtacgtcgagtgtttttgtctctcccatatattcttcctgccatgcatatgtaaaaattgcttctttgctaaatactcttttgggattttgtgcaagaagtcttaaaatctcaaattcctgccttgtaagctttttaagttcctctccttctatccatatctggtatgtttttatatccagttcaaatccgtcaagttttatcttttcatcctctttttcatgtcccgcatgcctaagctgtatctttacccttgctgccacctcatctatattaaaaggttttgtgatataatcatcagcaccgtttcgcaaaagttcaagcttttcatccatcccatctttcgccgtaagcacaataacaggcatatcactgttttctcttattttcgccagcacctcttctcccgtcatccccggaagcataaggtcaagcaatataagcgatacatcatccctctcaagaagcagtaccgcttctgttcccgaaaatgcctgtctgcacacatacccctcacgctcaagagcctctttgagcagattgtttatatttacatcatcctctgctatcaatatatttctgcttttcaatctaataacattccttccatatataataaatttaattctcgtcaataaaactttttccaacaaaaataagaccacacagaaacataacaactctaaatccaaattctatatttctgcatagtcttatattaaaacaacctaaaacagtccgtcaaccatctcttttgtaacagtaacgctctcaaccttgtccacctcaatctggtaaagcgtgtttgccgcaatatgttctgctgcctgttcaaggtcacgtattcctgttgtatttgaaaatttatcaactactgctgcaactgcctcaggagtgacgatacattcctcatttctcatacccattctcttaagaaccttaggcatacagaagttcttgaagataacctgtttttcttctgtcgtgtaatcaggtatatctataaccgcaaatctcgacataagcggtgcgcttatctttgacttgtcatttgctgttgctataggataaacacctactgtcggaaccatacactctatgtaattgtcagtaaatcctatattgtcaagaagtgtaagaagtacatctgccggatttccatgtcccttatttgacgtagctttgtcaagctcatttatgataaatacaagatttgactctcctgccatttcaaatgcatctataataataccggattttgcatttgaatatattcttgaacttcccgtaagctgctcagggtcacttattgaactcatgtcaagtgttgtccatggaagtttaagtattcttgcaacggcatatgcaatctgtgatttacctgttcctgccggccctacaagcaatattccatacgctggaagtgtatgagtacgatttatctgtactatagtctctataatgcgctgttttactctctccattccatagagttcttcatcaagtatctttcttgcctcaacaatatctatcgtctcaaaataattgctcttccattttatgttcatcataatagacaatgctctctgtgcatggcgtctttcttccggagacacttcatgtgactttgctaccgcaagatttcttcttgcccaaagcctgatgttatcaggaagtgttgcaccagcacagtttataaagtcagtaatactctgaagacttgtgagcttcattccatctccactctcatcatcttcttcatcatccgaaatcttcgcaggtgcgtcactcgcaaaaagtctctctatcatatattgaaggaaaccatcctccgcggacaattttgaagtgttgccgtgtgcaacttcgctaatcttataaaccgcatatccggcatcggtattttcacctgaaagtctcacatttatatggctctctccaagccatttaagcagacttacgaatctcgcatcaacctttaaaatatctgaaacttcaactccatcatcctcattaaattcaaatgttgtacgttttatcgggtttgtaaacattccatatgaatgatggctccactgtttatttttgttgtcaataatcaatatcggtttttccggtgtggcactttcctcattcgacataaatgtctcatatgtgcacaccgcatttttcttttcttcatcgggtacactgttaaaatcaaataccggcatcgtattctcctttcgctttaaaactcaatatctttaagataacgtccaactgcatcctgccatgaaggtagtggcttaaacccattgtcgataagttttttcttgtcgagtctgctgttaaacggtctcgccgcttttgaaacgccatactctttcgttgtaacaggactaacctgaacattttgttcactgtattcatctcttcaaagttctacagcctgtctgaatatctctttagcaaaatcataccagcttatataaccgccctcatttgttgcatgataatatccatacctgtcagtttctatcatatcgacaagaagtcttgcaagatcaaatgtgtatgtcggagttcctatctggtcatttacaacagtaagtttatcgtgagtctttgcaacattaagcatagtctttataaagtttgaaccgttctttccaaatacccaggcaattcttactataaaatatttatctaaaatgtccgatacggcaagttcccctttaagttttgaatctccgtaaacgtttaaaggcttataatctttacagtcaggctcccacggcttttctccctgaccgtcaaacacataatcagtacttgtatacatcataggaacatctatctctttgcatgctttcgctatattttctgttccctctgaatttatcttatacactttgtcctgcttatcttcatcttccgcagcatcaacagctgtccacgctgcacagtgaattactgcatcaggtttaatttctttgatgtttttaagaacagcctctccatctgttatatccatctgaacatacggtgcatcaatagatgcagcctctttcaaaatatcacttccaactccttcataaccacgctttgcaagctcgttcataacatcaaaaccaagctggccgccaactcccgtaaccaaaactttcatgtttacactccattcccgcactgtctgctgcgcatatatcaaattttataatttcaatatcacagagtactactttctgtttccatacattttttcataatagttctgatactctcctgaaatgatagtctcccaccattccttattgtcaagataccactttattgttttctttataccatctgcaaactttgtctcaggaagccatccaagttcgttgtgaatttttgtagggtcaattgcataacgcatatcatgtcccttacggtctgcaacatatgtgataagactctcaggctttccaagctccttacagataatcttaactatgtcaatatttgtcatctcattgtgtccgccgacattgtaaacctcaccaactcttccgttgtggatgataaggtcgatagcacggcaatgatcctcaacataaagccagtcacgcacattctcacctgttccatatacaggaagcggcttatcattaagcgcattcgcaatcataagcggtataagcttctcaggaaaatgatatggaccatagttgtttgagcagcggcttattgtcaccgggagtccatatgttctatggtaagcaagtaccaaaaggtctgccgaagccttagatgaactgtatgggctgcttgtgtgaataggtgtttcctctgtaaagaaaaggtcaggtctgtctaacggaaggtctccgtaaacttcatctgtcgatacctgatggtatctcttaattccatatttgcggcatgcatccataagcactgcagttcccataatatttgtgcgaaggaaaacctcagggtcttcgatagaacggtcaacatggctctctgctgcaaaatttactactatgtcaggcttttcttcctcaaataatttataaacagcctcacgatttgtaatatcctcttttacaaatctgaaatttggattatccataaccggtgcaagtgttgaaagatttcctgcataagtcagacaatcaagacagattatacggtaatccggatatttatttaacatatgaaaaacaaagttgcttcctataaatcctgctccacctgtaactataatattcattttattttgttcctccataaactatttctaaaattgtctcttcttgaccgaaagtcaaaaagcatcgctccctcgcttctgctcggtcactctagtataaattctcctgatattttccatcgagcacatctttgagatactggccgtactggtttttcttcattatttcgtatacttccaaaacgtcctctttagaaatccatccgtttagatacgctatttcttccaggcatgctatctttctgtgctgatgctgttcaactgttttaacgaaatttgtcgcttctacaaggctttcatgtgtacctgtatcaagccatgtaaatccttgtcccaaaagttcaacatttaaatttcccttttcgagataaatacggttgaggtcggtaacctcaagttcccctcttgctgacggtttgaggttcttagcatactccacaactttattgtcatagaaataaagacccgtaacgcaataattgctcttaggcttctccggcttttcctcaatagaaacagcctttccgttcttgtcaaactctacaataccaaatctttccggatcatcgacataatatccgaaaactgttgcaccttttccgttctctgcattcttaacagcttcattgagacgtttctttaatccgtgtcctgcaaaaatattgtctccaagcaccatggcaacattgtcatcaccgataaactccgctccgattataaatgcctgcgcaagtccgtcgggacttggctgcacctcataggaaagatttacgccaaactgatggccatctcccagaagttccttaaatctaggtgtatcctgaggtgtcgagataataagtatatctcttatccccgcattcataagcactgacataggataatatatcataggcttgtcatatataggcaaaagctgtttacttgttactcttgtaagcggataaagacgtgttcccgaaccgcccgctaaaataatacctttcatattattaatcctccattcgtaataatattccatatctttctactgtgattacattataaaaggtgccctaagggcacctgcaagcactttttttattttttatattttatttctcttaaccgctttaaaaacacctgcttcttttgtcaccgtaaaaccatcctgtgtctttttcttcacaaatgttacaaagtcactgtacctgtcaactataaaacgattctggtttccgtggcacgaaagaacatacgatataagtgcctccggttttgtcacctcaaggctgtcctcgtattcagaccaaaaaacatcatcaaaatattcacagagcagactgcctccgttttgttttccaaatttttcatacagtctgtctgccgacaaaacaattctgctgtcaaaatcctttacaagcatactaatctctttcatatgctcactgccatatgtgctgcataaaatcctcccgcccggttttaaaacacgctttatctcctcaaagactttttttagatcttcacaataaaataatacatgatttgcgataacgagattaaaactttcatccggagcatttatatgatgtgcatccataacttcaaacgaaaaactgtttcctgcgtctttcattgaacgccttacatcccttatcattccatccgaaatgtccgataatataacatttatatcatttaaaatcctgtgcctgttcatcctccacagcgaggcatcaccacatccaagctcaagtatgctctccccggctttaatatcgcactgttcaaaaagccaaggaaaccatccctgtttattttttgaaaattcttcgtggagatttattctcgcagaaatatttgatgaattttgatattgtactttaagcttatgctccatctcattgacattgacaagctgcatcatcttactccagtcaacatttttttcctcatctacagcttgtgcggcatctaaaagtgctgtttttataagctccatctgttcaattttttcttcaataagaccaagctgcatatgaagtgattctgagaaaaaatgtttgtcagaattcctcactgtcatttcctttatgtctgcaagcgaaaaaccgagatattttaaaaacaaaatctgctgcagccttgcaaaatcctcatccgtataaaaccttgcaccgctgtcactgacaaaagatggttttaatatattatgttcatcgtaataccttattgtctttttggtcacatgagctttctttgcaaactctccggacgaataatacccttctaatttcatatatcttccctttatctaatcaacgcttcattgccatctgcttttcatcatatctcaagtgtatcaaacatataaggtatcgtcaaaccgcagcttatcatacatcagcacttttatgatattttgcccggttgccacaaataatcggggataccatctttataaggaacttctatctcgcctcttataagtggttttatataatctgtgatttcttttgtaacatcattttgttctttatttatccactcaaccggcactttcttttctatatttgcgatacatccaagctctatatattctatatcatatctatatggcttctctgataccctctttaaaacaggaataaagcctgaattgcctgcaaccgcatactttaccgctgaaacaccaagttcaaaagcttccctgatgtctgtagccgatgccacatgtgctgcacaacgctgcataatatttatttcaacgctcctgcatttaataccaattttgtctttcaccagaatttcaagtgcttttgctgctcctcccaattgattgtgcccaaacacatctgatgttcccgcacttatataatttccttctctgtcatgtattccctctgaaacagcaaccatcacacaattagattttttgagttcctttttcacatcttccataaatctttctttgtcaaaatcaacctcaggaagatatacaagctgtggcatttcattaaattcatttcttgcaagagctgctgccgccgtaagccagcccgcatttcttcccataagttcaacaatcgtcacacacggtatatcataaatttttacatcatgtgccatttctgccatagacgcagcaatatatttagccgctgagccgtatcccggagtatgatccgtaacaggaaggtcattgtcaatagactttggaacacctgcaaaccgtatatccgaatctatactccttccatacgttgacagcttgttgacagtatccattgaatcatttcccccgatatagaaaaacataccaatgtcatttttatccagtatagaaaaaatcttttcgtagacttctgccccctcttcaacagacggaagcttataacggcatgagcccaaatacattgacggagtaatggcaagtctgtcaatcattgatttcggactccatgtatcaaaagccccatccggctgcgaaattttgatttctgaaacactttcttttccgttttttacatcttcctgaaactctgaaagattaataaaactctcatccaatacgcccttaatgccgtttgccgccccaaaaacttcataatctcctgactgtgcaactccggcaataactccggcaagagaagcatttatagcaaccgtaggtccacctgactgtgcaactaaaactttttttctcataatattatctgttcccttctaaatttacttacatattattatcctaatgtattatacattactcttctcatttggtaaatctaatttttcaggtaacaaatatctatttcttcatgcaatatatttaaaaatcaaatcacagaattactatttactccacgtttttaagcgcatcgctctttggtattttccttatttttgccatttgaataacgcaaaccacaagataactgagcactcccataataaacatcttcatataacaactgtttgatatgatatacggaacatatcccgtcatctgagtatacagatacgatgtaaacatttcatgcaggaaaatgtttactattgggattgctaagagaagcgagataactacaaccacaaatgtagttataatataaagtccacctatctccatatccgaatatccgagaattttcgtaagcgctatcgaattgctgtttttttcgataatctgctttgacaaaaggtacatcagaagaataaacattataactccgaaatatttaaccatatccatgaaactgcccatcgacactttcatctgtgttgatacttttctcaaatcttttaccgttataatactcgctatataatcgtcatctatatctgttaattttttattgctgaaatatccgctgtaatattcatcatccttgtcaaaagtcttaataaacatatccctgttcataaatactgatattaccgcatcatatgtatatgaacctgcaacttcaaatttatatgttttgttgctgtacgggtcttttaattcgattttatcaccgttctttactccaaatttgtccatatatccatttgatacataaactttgtcatcagggatattagcatcaatatatgtactgtcatctgatattccatatattgttatctcatcttccatatattttcccggaagagttttaagactctccacacaatatttttcagctccggattcttttgtttcaaccggtgctttcaaaatatactggtaatctgctatcgtactctttcccaccagttctgaataatcatcaataagcggaccaaacataagactgaatataacaatcattgcggcaaacagtatgccaacaaataatgttatataatttgaaacattttgaaataccactctcaatctgaatctgtgcataaacggtatttttgtatttaaccttatagctttctttcttgttttctttgaaagttccctgcgcaaaaactggagcggtgaaatctttaatttagatgacaaaaccgcataatttatgataaacataagtataatcggaataaccgtcgtatccacaaatgcttctgcattccataacgtattgtaagtcggcaaactgtaactgttataatacattgacgccatagctttcaccataaccgtatacccgataatatttccgataacagccgatataaatgtcacgagtatcggatttatcatataatgtcttactatctcgccccttgtgtatcccgatgctcttaaagtacctatcactcccgcttctttgactattgtattggacgttgttattgcaaaaacaaatgcaagtatcgctataacaatataatcaaacaagataaacattgctttatcgccacccatatcatcaccggtaaagttaatcgctttattggaataacgtggtaaataagatgtaacaacagcctgcttgctcagattttcaagaaaatcatctgacatatccttttgctttttgtcactttcaggctctttatcatacttcactgcataacaataacttaatttactctttttaagtttgctaagaccgctgtcagtcattgaagcaacaccaaagttcaccgaatcaaacatcatatcggcattatcttcaaacacacagctgtaatcaggcattgcaatgaaacccgttattttatatgtatttttatcaattgttatattgtctccgactttatagttattattttttgcaaacactctgtcaagtgcaatctcatcatcattttttgcaagctttcctgacattacacataacttatttacattttttctttccccatatattcttatagtcgcatttctttttgattcctttaattcgtaatatctctggtcatatatcttaaccttattttctttttcaagtttatctatcgtttcatcagacaacttgtcagccgtaacaaaatttatatattccacattatacttgtcaaatccctttttatacgcgtcatatacactgttatcggctacaagaaatcctgatacaagacttataagcatagtcataaataaaaagataacaatatacttcccaatatctccctttaattctctaggaagtctttttgtaagtggatttttcattttctcacctcctaccattcaagttctttcgctgaaattttattttcatttttataattttttcttatctctccatctctcagcgtaataactctgtcagccatattttttatagcatcattgtgagtaacaataattattgtatttccgtatttttcattgatactttctatcaatttaagaatttcctttgaagtattgtaatcaagcgcacctgtcggctcatcgcacaaaagaaggtcaggattttttataatcgctcttcctattgaagttctctgctgctgtcctccggaaagctgattcggaagcttatgtctgtgctcataaagtccaagacctttaagtatttcgtctgtatccatcggattgtcactcagatacgcacccgtttcaacattctcctttatattgagatttggtataagattatacatctgaaaaacataaccaagatgctttcttctgtagcttgtaagctgcttttcattcatatcctcaattttgtcaccatttatggctatgtacccggcatctgcctcgtctataccgccaataatattaagaagcgtagatttgccggaacccgaaggcccaagtaaaacacatatctcccccttttcaatttcaatgttaattccctttaaaacctcaactctgctttctccctctccgtaatgttttctaatatctttaatttcaagaaacatagcgtcactcctcccgatgtttttacatcttaaatcattttttcttttcatctcatgtgaatacttgttcatatgaatatatgtatcacatttcccaaaaaaagtcaatacaaaacagtaaaaaagttagtacatactaactcatattcttagtatatgctaacttcgattagttatcaatatcttattcatataaaattctcgtttttatataatctgcgatgacaaaccataaaaacaatatatccgattatagttcccaatatatttgttactacatcgtcaagctgacaatacccgcatcccgtcctatactgtatacattcaatacatacactgcatatcgcacctgcaaatattgtcaatgccgatacttttttaggcagatcggaagagcgtcgtgtagggaaagagtgtag

SEQ ID NO: 282 - DNA, 11582 bp, unidentified
  source 1..11582: mol_type = unassigned DNA
  misc_difference 568: note = a, c, g, or t
  misc_difference 569: note = a, c, g, or t
  misc_difference 570: note = a, c, g, or t
  misc_difference 571: note = a, c, g, or t
  misc_difference 572: note = a, c, g, or t
  misc_difference 573: note = a, c, g, or t
  misc_difference 574: note = a, c, g, or t
  misc_difference 575: note = a, c, g, or t
  misc_difference 576: note = a, c, g, or t
  misc_difference 577: note = a, c, g, or t
  misc_difference 6182: note = a, c, g, or t
  misc_difference 6183: note = a, c, g, or t
  misc_difference 6184: note = a, c, g, or t
  misc_difference 6185: note = a, c, g, or t
  misc_difference 6186: note = a, c, g, or t
  misc_difference 6187: note = a, c, g, or t
  misc_difference 6188: note = a, c, g, or t
  misc_difference 6189: note = a, c, g, or t
  misc_difference 6190: note = a, c, g, or t
  misc_difference 6191: note = a, c, g, or t
  misc_difference 6566: note = a, c, g, or t
  misc_difference 6567: note = a, c, g, or t
  misc_difference 6568: note = a, c, g, or t
  misc_difference 6569: note = a, c, g, or t
  misc_difference 6570: note = a, c, g, or t
  misc_difference 6571: note = a, c, g, or t
  misc_difference 6572: note = a, c, g, or t
  misc_difference 6573: note = a, c, g, or t
  misc_difference 6574: note = a, c, g, or t
  misc_difference 6575: note = a, c, g, or t
  misc_difference 7329: note = a, c, g, or t
  misc_difference 7330: note = a, c, g, or t
  misc_difference 7331: note = a, c, g, or t
  misc_difference 7332: note = a, c, g, or t
  misc_difference 7333: note = a, c, g, or t
  misc_difference 7334: note = a, c, g, or t
  misc_difference 7335: note = a, c, g, or t
  misc_difference 7336: note = a, c, g, or t
  misc_difference 7337: note = a, c, g, or t
  misc_difference 7338: note = a, c, g, or t
tcagttgtccgtgtcgttcggcatgccggcggccgagtagagccggagcaggtcgtaggcttcgccgatgccgagttcgcccgccttgctgatgtcgagcagccccttgcgggtatccttcatgtatatctgtaccaagcccctgttgaaataggcttcggcgaggcccgggtcgagggcgatagcgtgcgaatactcctcgaatgcctccgggaagcgtcccgacagggcgaacagattgccccggttgtagtagatgcaggggaggttcggattgagtttggccgccttgttcaggtcggagatggcttcgtcgtagtcgtacgtccgtgccgcgtcgcgcatcctggccgaacggtcgctttcgggcgaaatgcgcgaataaccgttgtccatggaggagatgaaatccgtcatttcggcctgtacggcgctgcgggcgatgtagaggaacgggttgcgcggagagagcgtgatggcagtcgaaagggctccgaccgcgttggtgtactgtttcagcagcgcctgtgtcatgccccgcatgaaataggcctgccagcggctgccnnnnnnnnnntccttcctgacgagggcggcggccgccatgtcgcttccttcgcatccgaagacgaccgatgcgtcgcccagcgaagcgatgaactcttccgcctcggcctctccggggtgcaggatgaggccccggcctggctccgcatccgaacggagggtgaagccgtaggaggggcgcagcgttattcgctctttcgttcccattgccgtattgcgtaccggtccgtcggagagctgcgtgtcgaacgacagcagtttgtcgaattgccgggaggtgtcggcaaaggagacttcgctttccccttcgagccgtgcccggtattcggcgattttgcgttcggcgacactgcggtcccgttcggcgccttcgctgtcacggagcaggtatttgaccgaagcccggccgaggtaggcgttggcgaagtcgggatagagttcgatggcgcggtcgtagtcttccagcgccccctgcaattcgccgagtctgaagcggaggccggcccggttgtagtagacgatgacgttgcccggcgagtaggcggctacctggtcgtaatcctccagggcccggttgtagtcacccgtttcggtgcgcaccagcgcccggttgaagtaggttaccgaactggtcgggtcgagctccaatacccggtcgaaatcggcgagtgcggcctgcaggttgtgcttcctgtaatagaccatggcccggctgaagtaggccggtatgtacgacgtgtcgcaccgtacggccgtatcgaaatcggcgagcgcttcgtcgtacctgccctgctccatgtagagcgaaccgcgttcgaggtaaccgcgcggatactcccgattggtgcggatggccctgccgaagtcctcgtatgcggcgaccgtatcctgcaggtggaggtacgctgtgccccggttggcgtaggcgtcggcgtcgcgctggttgaagcgcatgtacatgttgaagtcatcgacggcttcgcggtagcgccccgtgaggatgttcgtgacgccccggctgtaatagggggccggataatcgggacgcagttcgatggcttcgtcgaagtctttcatcgcgtcgtcgtagttgccgagccgcgaacgggtgagtgcacggaattggtaggcgttggtgtaaaccggattttttgcgagtgtcagggtgaaatcccgttcggcgcccagcaggtcgtcgaggtgatacttcgcgataccgcgccagaagtaaccttcgtaggcgtccgggtcggcgcgcagcagaatgttgagcgtctctatcgcttcccggtagcggctgtccataaccatgtcgcggcctacccacacgaaatactgtttgttgacctgcgctccggcgttgtctgcgaacatgcagaaaaggaatagtatggccccaatgaatttacgcattcccggattttaagcttgctaatataacgattataatcctaatacggatgcgccggaggcgttttcggagcggcagcggtctgagaggacttgttaagtggctggatgttagtgtattcgtatccgatggacggtcggccgacgggaaagccccgaaaaaacgggacgtttatgcacctttctcggaaaaaagagtaaatttgcatccggccctaatttggaacggtgtatttgcagctatcccggctatgtagagatagtattgtcatacagtatgttgcaatgcaaaggcaggatgccgggccgtcttgcagggccgtggcggggcatgtcggcggcggtgtcggcaggagctttcggaaatcggtgatattaaaaggaatcccgtgcggcgcagcccgcacgcgggtcggttactaaataaaagttaagctaatgggaaaacagttgaaagtagttgtactcgccaagcaggttcccgacacgcgcaacgtgggcaaggatgccatgaaggccgacggtacggtgaaccgtgccgccctgccggccatcttcaaccccgaagacctgaatgcgctcgaacaggcactgaccatcaaggacatgtgcgaagggagtacggtatatatcctgaccatggggccgctgcgtgctgcggatatcatacgcgatgccatgttccgcggtgccgacggcggataccttcttacggacagggcattcgccggtgcggataccctcgccacctcctatgccctttcgcgggcgctggccgagataaagcccgatatcatcgtggcgggccggcaggccatcgacggcgataccgcgcaggtggggccgcaggtggctgagaaactcggtcttccgcaggtgacctatgcggaacaaatcgtgtcgatagacgacagccgcatcgtcatcaaacgtcgtctggaacatggcgtggagaccgtttcgtcgccttatccgatgctgatgacggtgaacggttcggctcccgaatgccgtccccagaacgcgaaacgggtgatgaagtacaagcatgcccgtacccgcagcgaactgcaggagctcggcgaggattactacatgcagctcctcgaagccaagagttacctgaaaatcaatgagtggaacgtcggcgatatcgatgcggacccccagcagctcggactgctcggttcgcccaccaaggtaaaacagatagagaacgtggtattccaggccaaggagtcgcgcagactgaccgcttcggacggggatatcgattcactgatggtcgaacttatttccagccacacgctcggatagaggaggaatgtaagatgaacaacgtattcgtatatattgaaacggaaggcggcaaggtggctgatgtcagcctggagctgctcaccaaaggccgcgaactggccgaccgcctcgggtgcaaactggaagcgctcgccctcggtcacgaactcaaggagatggataagattgtcggacgctacggagccgatacgctctggctggcggacgatgcggagctcgctccgtaccgcaccctgccccatacggcggtggtttgcggtatcttcgaagaggagaaaccccagatagccctgttcggtgcgacgccggtggggcgcgacctcgctccgcgcgtctcctccacgctgcgcagcgggctcacggccgactgtacgagcctcgtcataggcgaccataccgatgccaagagcggccggtcgtacgagaacctgctctatcagattcgtcctgccttcggcggcaacatcatcgccaccatcgtcaatcccgaccatcgtccgcaaatggcgaccgtccgcgagggcgtgatgcgcaaggaagagctcaaggagccgaagcatccggaggtgaaacgggtggacgtggcgaagttcgtgaaggagagcgacctcgtcgtgaaaataatcgaccggcatatcgaggagcggggcatcgacatcaagaacgccccggttatcgtggccggcggttacggcatggggtcgaaggagaatttcgccatgctgcatgaactggccgacctgctcggcggcgaggtgggcgcgtcgcgtgccgccgtggatgcgggatttaccgaccatgcccgtcaggtggggcagaccggcgtgacggttcggccgaaactctacatcgcctgcggcatctccggtcagatacagcatacggcgggaatggaccaggcctccatcgtgatagccatcaataccgacccggaggcgcccatcaacaaattcgccgattatgtgattaccggcagtgccctggaggtcgtgcccaaaatgataaagttctataaacaaaactccaaataggcgggagccgtttccggggagggccgagagagacgccgcttcccgtatccgggaacctgccgcaaggcaagatatgggaaacttttttttagacaataaagacctgcagttccacctgaatcatccgctgatgaagaaaatcgtggagctgcgcgagaagaatttcgccgacaaggatgtgtacgactatgcaccggcggatttcgaggatgcgatggacagctaccgccgcgtattggagataacgggcggaatatgcgccgacgtgatagcggccaatgccgaggatgtcgataaggagggaccgcgggtggtggatgaccatgtcgtctatgcacgcggtacgcaggctaacctcgatgccatccgcaaggccggattgggcggtatccacctgccccgcaagtacgaaggactcaacatgtcgctcatctgcttcgtgatggccaacgagatggtggcccgcggcgatgccggtttcgagaatatctggggattgcaggactgcgccgaaaccatcaacgagttcgccagcgaggagataaagcagaaatatctgccgctcgtatcgcggggggctacctgcgccatggcgcttaccgagcccgatgccggttccgacctgcaggcggtgatgcttcgggcgcattacgacgaggccagcggcaagtggttgctcaacggcgtgaagcggttcatcaccaacggcgacggcgacatctcgctcgtgctcgcccgctcggaagaggggacgaaggacggacgcggtctctccatgttcgtctatgaccgccgcgacggcggagtgaaggtgcgtcgcatcgagaacaagctgggtatcaaaggctcgcctacctgcgagctcgtctatacgaacgctccggcagagctcgtcggcgaccgcaagctcggtcttatcaaatacgtgatgtccctgatgaatgccgcccgtctcggtatcggcgcacagggcacggggctgtgcgaggccgcctaccgcgaagcgctgaagtatgccaacgaacgccagcagttcggcaagcccatcatccagttcccggccatttatgaaatcctgacgaacatgaaggcgaaactgtacgcatcgcgtgcgatgctgtacgagacggcccgtttcgtcgagatatacaagtgctgggcggagataggcaaggaacgtccgctgacggccgaggaaaagagcgagatgaaggcctataacaagctcgccgatgccttcacgccgctctgcaagatgttcgccagtgaatatgccaaccagcttgcctacgaggccatacagatacacggcggttcgggctacatgaaggactatcccatcgaacggatttaccgcgatgcccgcatcaccaacatctacgaaggtacgacccagcttcaggtggtggccgccatccgccacgtgacgaccggcacgttcctcgcgcagatgaaggcatacgaggctgccgagcgcccggccgagttcaagttccagctcgacaagctcatcgccatgcgcgaggagtacgaacgggcgatagcccgcgtaacgggcggcgacagcgaacagatagagttccatgcacgtcggctcgtggagatgaccgggcacatcgtcctttcgcacctactgctccgtcaggcggccgagagcgaagagtatcgggtgcctgccgaggcgtacatcaagtatgcccaagcgcagaacaaggcggcggccgaattcatcgccaactcctgctgcggcgatatcgacctctacaaggcggttctgaacgagacgctggaataagataagaacggttgcgcggaaagcgtagccgattgggacgaggggtgcggcaagattgnnnnnnnnnnccctacacgacgctcttccgatctacccctcgtctcgtctttgctccgtggacagccgtaacggattgcctgcgaaacggtgcggtaaagtgggtgtcgttgtcgggcagtgtatcccggccggtgaaacccagccggacatgacgctgtttcgggaagacgttcggcggcggtgacggaatcgggagttgtctcggtcggagctgagccccttgcctgcgtgtggttgttgggcgatttccgtgcagaacctgtatgcggttcagtcggaatgccggaaagcggcgacagggaaatggccggtcggttttcggaatctctgtggccgtactgttgcgggggcaggaacagtacggcacggaatgctgccggttnnnnnnnnnncgatgtccgggaaaggatggggagaggctggcaggtcagagttcctctatgaaatgcggatatttgttccggtattcgtcataaatccgttcttcctgtccgtcgaggttgagttgatacatgcgaaagacgaccgggatgtttttgggctgccagagctcccggtaggagtaacggtatttcatacctatggcctgcatcacgtttccgcttctcgggttgttcacgtcgtgcgtcgccgtaacataagggagaccgtctcgccgaagccggtcgatgatggcctggcaggcttccgtacacaggccccggtgccagaatgcttttcggagtccgtaccccaggtcgtggctgccggcgccgcttacgtggacataaccgacgggtacatcgctgcctttcatgcagacggcatcgtataaaagcgattcgccggaacgcagtgctgcaagtttcttgtgcaggtatgcctcggcctcttccaaatgcttcagcggaaacatgggcaggaatgtattcacttcggtgtcgcccagaatgtccagcagggctttcgcatcctgttcggcgaacggccgcaggtgcagccgttccgttcttatgtcatgggacatgcgttcgttttgtgagggttgtcgcattgtatccgggcatttatcggtgaggcggtgccatgccccgtacttttgccggaaaggcgggaacgacggattcggggaaattggccggaggacgtccgttcgctgccgcacgnnnnnnnnnntttccctacacgacgctcttccgatctatagaagaggtcgctgatgatgctgttggagaccatgagcttttcgggtggtatcctgtacacattgccttcgcggactatcaagccgtttcggagaaacttgccggcacaatattcgaagtagagcagtcccttgaacccgaaccgttcggagagcgcgtcgcgtcgaataccgtaatcggtacggagggcggtcatgatatattcgttgtacttgtctatgcgggagaggatttcccgtccgtatatccggtcggtaccggccagttcgatgtacttttcgaggttgttgaccgagtagatacgttggtccccgtcgtaggagtgggccgatgggccgaggccgagataggttttgccgcaccagtaggcccagttgtgcagcgagcggaactcttcgccgcgggcatagttggagatttcgtagtgacagaaaccgctgtcggtcagaatgcggtggcatatcatgaactgctcctcacatatttcgtcgctggcaggtatgagcgttcccgcctccgccatgtcgccgaagacggtgttgtcggagatggtcaggcagtaggccgagatgtgctgtacgccgagtattacggcacgcaggacattgttttcccactcgcggagcgacatgccggggatgccgaagatgaggtcgagcgaaatgttgccgaacccctttgcctgggccgcccggatagcctctaccgcctgttgggcgttgtgccgtctgccgagcagcttgaggtcgcggtcgatgaaggactgtacgccgaaactgagccggttgatgtcggtacgggcgagttcgtccagatagtgttcggtgatgtcgtcgggattcgcctcgaccgtgatttccgataccccttccagattccagagcgagcgggccttgtcgatgagccgctggagcagggcgggcggaagaagcgacggggtacccccgccgaagaataccgtgtctaccggggtgtcgccgaaatagccgcgccggtactccatctccctttcgagggcttctatgtaatcctccgttttggcacaggatgtgcttttataaaaatcgcaatagttgcagcgcgttttgcagaacgggatatggatgtacaatgcggccatttctgggtggaatgatggtgtgtttcgatttcgtaaggtgctgaacacaaaaaacgtgcgaaagttagcaaaaaaaccgtaataatggccgccgctgccgtcattatgcggtgggggaagatgtgcagataggtattcccggtttccggtacggtaaaaaaagtcgattttatacggtggaattagtaccgcaagacggaattattccatatctttgcgccgttgttagtgtgctaacaataattccggcgggaaagagttatataaccggattcgcagaccggaccgttccgggtgtccggaggcgcatataacaggtgagaatagcataaacacataatatacagaagattatggcaaagaagattgatttgaccaagtatggtatcaccggaaccccggagatactgtacaatccgtcgtacgaacggcttttcgaggaggagatgaacccggccctcaccggttacgaacggggccaactgaccgataccggtgcggtgaatgtgatgaccggcgaatataccggccgttcgcccaaggacaagttctttgtgatggacgacacgacgcgcgataccatctggtggaccagcgacgagtataagaacgacaacaagcccgtgagcgaggaggcgtggaaggagctcaagaagattgccacgaacgagctctccaacaagaagctcttcgtgatggatactttctgcggcgccaatgcgaatacccgcctcaagatacgtttcatcatggaggtggcatggcaggcccacttcgtgaagaacatgttcatccgtccgaccgaagaggagctggagaactacggcgaacccgacttcgtggtgatgaacgcttccaaggcgaaggtaacgaactataaggagctcggcctcaattccgaaacggccgtcgtcttcaacctgaccgaaaaggtgcaggtcatcatcaatacgtggtatggcggcgagatgaagaagggcatgttctcctacatgaactatctcctgccactcaagggcatcgcttcgatgcactgttcggccaacaccgacaaggagggcaagaatacggccatcttcttcggcctctcgggtacgggcaagaccaccctttcgaccgacccgaaacgcctgctcatcggcgacgacgagcacggctgggacgaccagggcgtgttcaacttcgagggcggctgctacgccaaggtcatcaacctcgacaaggagagcgagccggatatctggcacgccatcaagcgcgatgcgctgcttgagaacgtgacggtggacaaggaggggcatatcgacttcgccgacaagagcgtgaccgagaatacccgcgtgtcctatccgatatacttcatcaacaatatcgtgaagcccgtatccaagggcccggctgcggagcgtgttatcttcctgtcggcggatgcgttcggtgtgctgcctcccgtttcgatcctcactccggagcagacgaaatactacttcctctccggttttaccgcgaagctggcgggtaccgagcgcggtatcaccgagccgaccccgactttctcggcatgtttcggtgcggcgttcctctcgcttcaccccaccaagtacggcgaagagctcgtaaaacgcatggagaaatcgggtgcgaaggcctacctcgtgaacaccggctggaacggtacgggcaaacgtatctccatcagggatacacgcggcatcatcgacgccatcctcgacggctcgatagacaaggccccgaccaagcagattccttatttcgactttacggtgccgaccgcactcccgggcgtagaccctgcaattctcgacccgcgcgatacttatgccgacgcggccgagtggaacaggagagcggaagaccttgccggccggttcatcaagaacttcgagaagtttaccggcaatgcggagggcaaatcgcttgtcgccgcaggtccgaagctgaaataagagtgtagtgttgtcactcatcgaacggcggggcggcgtaatgtcgtcccgcttttttcaaaaggagaagagatgaagacgattcgaaggtacatgtttttcgctctccttctgctggcggcagtcgcctgccggccgggagcaggggcggaacggggagcggccggattggattacggtcgggccgacatgtggtatcggggcggtacggcggcttcggcggagaatgccgatgtgttttacatcgccccgacctgcaattggggacggacggatgccgacggcaccgtgcattggcagatggatgtgtacgataccgtgcagcgtgccaatctgcaggcgccgctcagactggccgagcgcgtgttcgccgaaggcaaccgcttctacgcgccttattaccggcagattaccatggagtcgtggttcgagcccgattcggttatcggggcaaggtttgccgtggcgatggaagatgtacgggaggctttccgttactatctggagcacttcaacgggggccggcctttcgtattggcgggacacagccagggagcccggtgcgtgttggagctgttgaaggaggagatgaacgacagtctttacggccggttggtggccgcttacgtggtcgagtaccggattaccgacggagagttggagggagcgcggtatgtcgtgcctgccgccgactcgctcgatacaggtgtcgtgatatgtatcaacagtgtggcgaatacctctgcgctctctccgctctttcggggaaaccgtgcctgcatcaacccgatgaactggcggacggatgctcttccctcccggccggaggagaacctcggtacgcttttcctcaatccggacgggacggtcgcccggcaggtggaacccgtgacggcacgtatcgatacggcctcctgtacgctcatcgtggacggtcttgttccggaggagcatttcattccggccatagcccccgtagcaccgctgggaaattaccatgtgcaggaactgaacatctatttcggcaacctgcggcacaatgtggcgcgaagggtgcgggcgtattatgaagaaggccgtgcggcacgtttcccgaccgcatgccgggctgccgcagtccgggaatga

SEQ ID NO: 283 - DNA, 11780 bp, unidentified
  source 1..11780: mol_type = unassigned DNA
  misc_difference 8662: note = a, c, g, or t
  misc_difference 8663: note = a, c, g, or t
  misc_difference 8664: note = a, c, g, or t
  misc_difference 8665: note = a, c, g, or t
  misc_difference 8666: note = a, c, g, or t
  misc_difference 8667: note = a, c, g, or t
  misc_difference 8668: note = a, c, g, or t
  misc_difference 8669: note = a, c, g, or t
  misc_difference 8670: note = a, c, g, or t
  misc_difference 8671: note = a, c, g, or t
agctcccatttctcctgcattttctcctgctgtatctccgccgtctacttctgacatccatagattcttgccttctgtttctgccagagtacgtaatgcttcacgtctggaaccaccataggtatgtgtatcgattctgtctacaacgtcctttgcttcctggcttaactgaccataggaaagaatctgcacatctatgctggtttcgtctgttcctgacacctgcacttgatccagacctttggcatccagggcatttctaagggaaagtatcagctgtgactgggattctcccatatcaaaatggcagccttcctgcttccagctgtaggcaccccaataatctgtgtaaggctcattcattgctgaatagcttgaaaagtccacattatatgtgtctttgtaatattctgtcacgtctgcaatgtactgtgcaaaggcatcataagcatcgtctttgagattattcttattcgataactgtgctcccgaactacatcctgaattggtcatgaaatacggcgcagaattggagaatccctctacgacagcatcctctccacatacttccagcgcctgtagcagcacatttcgctggttggcgtctgcactccagtcatattcccacgtatactcaccggctgcttcatcataggacggattgattgcataccccggcatatcagaatccgttcttgtaatatggtcatgctctggatcatctccgcctccgacattataccggataatgttcagcccaagtccctgctccttatcatagaatgcctgtgctgcctgttgggtcagcgtatctgaatagccgattctgttcgcccaccagcaaaagctcgttccccagccttcaaacttaccagcatgaaatgtggaagcgtttgccgggtcgattaccactgtagcatcaaccgcctctttgcctgattcttcagatacctgtacctcctgtttttcttccatacctgcctcctgcgtctgttctgatggattgccctgctcattttgtgcacagccggttaatgtcacagccgctgctactccaagcaatatcagctcttttccttgccaatgcaaaattaccccctccttatgcatttctgtttcagacatttgtaaaactctattcttaataagtgacggtatgtatacctgttatgttgaaaatctgcgttttacaaatgtctgctttcctattcttattctatcatggtaagacatttatcaccaccgttaattcatccaattgcataacccgttcaattcctatataattaacttccagaagaactgatatttgcgaataaactataatgtactctcggaatcttcttcaaacgaagcattctggctacatttagaagactccgagagtacattatataaatacggaggaaattcatgaaagataatgaattacagggaaatgagaaaatagaagaagcgattgctgccttacagcaggagcccacacaggaaatgctggcacatgcactgaccgtaatccgcagacgcatgcaggaaaaaggacaattcgtaattgcagtagaaccgcccactggtgataaccaactgaaattacaggcaattacgactgatgatgggaaagtctggtggatggcatttaccagttttgatgaagaattaaaaggaagtaatagtgttatgtcaacctttatgacagatatcaagcaactcttcacctctgcccttcaggctgatactatttccggcatcattctcaacccatggaaccgtaccattatgctggataaaaatctgattcagattacacttggattataaaaaaatcatttcttgacattttgcttttttttagtataatgaggaatcgggcttaaatttgcccatcggtcagttcgagaccttcctgaccttaattaaaactaaaggagcataacaatatgaagaaaaaattatcccctactgtgtttctggcacaggcagcaatgattgcggcactgtatatcgtgttgacttttattgcaaatgcactcggtctggctaattatgccattcaggtccgtttctctgaggcgctgacaattctgccctatttcactccggctgcaatacccggtctgttcgcaggctgtctgctcagcaacattcttaccggctgtatgccattggatgtcatctttggaagtctggctactctggttggtgctttcggtacttatgcactgcgtaagcacaaatggctggcaccacttccgcctatcattgcgaacatcattgtcgtacctctggtattatcctatgtttatcagtttgaaggcagcctgccttatttcgcattgactgtaggcatcggcgaattcatttcctgcggtatcctcggtatgatcgtcctcaacaccctgcagaaacatgccggtaaaatctttcagggaatctacaaataaatgataagtcacgcaagacctctgacggttaattttatgaacacgtcaaggctgtaaggacttctatgcacctacagaagaaatgcttttattacaagccctgcgcctgaactcgcctacggctcaaacaacggctcgggcttgcaggcatttcttctttgctgctaagaagtactaacagccattcctaatgttcataagaatcagccgtcagaggtcttgctgttacatacaattttttgtataactttctgaatacagccgccggtcatgacagttcggtgaatgaagcttaggcagtgatgtctagtatttcttagaacaaagaacaaatgcttgcaagccaggcgcaactgtctgagcccaaagggcgagttttgcgctcggcttgtatgttaagcatttgagatgcagttcttagaaatacttacatcacgtacgtggcgaatgaaccgaactgtcatgaccggcggcgtcccaaaagtttataaatccagtttcaagtccccttccttgatccagccaagtttgcgtaagaagagtccgaatgcccaggcaaggattcctggcaggataaagctgatcaggataagtcctatccagtcaaaggctgtaatagcactcttcgtaccagctgcaatgtcattaatccatcccgtgtatacaccaatctgtccaaccagaccacaagtacccataccagatgcaaccgctgcaccattcatctgcagcttaaatatacaggtggcaatcggtcctgtaattgcagaagtaagaattgcaggaagccatattcttggattacgtacaatattgcccatctgcaacatactggttccaattccctgggcaaataatccgccccacttgttctccttaaagcttaatactgcgaaacctaccatattggcacaacagcctgctactgcagcgcctcctgctaatcctgtcagactcaaagccgcacagattgcagcactgctgataggtaatgtcaatgcaattcctacaatgacagagatgataattcccataaagaaaggctgtaattcagttgcccacataatcgctgctccaactgcactggctgccgcaccaatcgcaggtgcgcaccacatggataacagacttcctatcgtaatcgtaacaaaaggcgtcacgataatgtcaatcttggtttctttggaaactgccttaccaaactctgcggctacaatcgttaccagtaataccgccagaggtcctccggcgccacccagtgtattggctgcaccacctacagcaaccagtgagaacaataccagcggtggacagtgcagcgcatatcctatggcaactgccattgcaggtcctgtagcagcctttgcatatcctcctatattgaccagtacttccattcccaactgttcacccagcgtagcaatgattgttccaatcagcagtgaggcaaataacccctgtgccattgctccaagggcatcaattccatatcttttggcagatatttcaatgtccttacgttttagaaaacttttaaacttctccatactctcctcctgtatagttacatatgtctttacatatgtaaagtagtctgttacagtgtaacatgaccagaagaagaatgcaagcttatcaaaacgcaaaaatcccacctctaatgaggtgggactttctttatcttatattaatcatcatatccgttaggattctgtgactgccatctccagctgtcttcacacatttccttaataccatactgtgctttccagccaagctctctctctgccttagatgcatcagagtagcatgtagcaatatcgccagcacgtcttggtttgatttcataaggaatcttaatgcctgtcgcagcttcaaaattcttaacgatatccagtacactgtagcctacgcctgtacccagattgtaaatgcacagaccagccttctcctgaatcttcttcaatgcctttacatgaccaacagcaagatctactacatggatataatctcttacgccggttccatccggagtatcatagtcattaccaaatacaccaagctgtttgagcttacctacagctacctgtgtgatatatggcatcagattattaggtataccattaggattctcgccaatcagaccactcttatgggcaccgataggattaaaataacgaagcaggatgacgttccattcaggatctgctttctgcatatccatcagaatctgctccagcatggatttcgtccagccataaggattcgtacactgtcccttagggcactcttctgtaataggaatgaatgcaggatctccatatacagtagcagaagaagagaagataatgttcttgcagttatgctttctcataacatctaccagtgttaaagtacctgcgatattgttattataatattcccatggctttacaacagactcacctactgctttaagtcctgcaaagtgaatacaggaatcaatcttttcttttgtaaatatctcttccagagcttctctgtcaaggatatctgccttgtaaaaggtaacaggcttacctgtaatcttctctactcgctgtaaggatttctcacttgcattggaaagattatctaatacaactacatcatagcctgcattctgtaattcaactactgtatggctaccgataaaaccggcaccgcctgtaactaagattgccataacttacctctttctgcgcagtattgcgcttataaattttagtgcgttaaattattatcatgctttgtttttactatatcctttttaacagtaaaaagcaatagcatattcttctgattttcacccattatagaccacgatacttgttatatttatcatcctttaagactttctttcataaaatctgtatcctttatctgtctgtaaatatataaattgcctgaatttattgtcaattttacatatttttatgaattttgtagtgatatctgtggatattgtggataattttgtggatatttatatgttgtctgctatctcggactgcagcatatactcatattgcataccgtatccttaccctgtaatttcacattccattgcagcagatacaccggctcctgctgcccattgtgattactgtgagactccgataatatttgaatgtccccatctgcaccttctactgtaatctccatctttgccctgttaccctgtatctgaatcacattgccttctactatcggcagatactgcgttaccagattctccgtaattgttcttgtctgttttgatacctcaaaagaatcctctacacacaaatgtaattgtacatcctcatcccaggcacgaatactacgctgtattttatgaatacatccatctgggtaagctccaccaaaggatatcgtcaaggtcttgtctttttcctcccagcagaaagcatctgctgcatattcctttcccgcacattgctcctgtccattcatcagaggtacagaatgccccagggagcggttgcacagaatcccgtatcttccgtccgagaaataatctctggtatactcaccggcgcccagatccgtcagcagcatctcaccttcataaatgcacaggaaatgtccgatatcattatgattatggttctcatcattgttaccgccttttgccgcatatccatttcctgccggatccttgcacatcatccactgagcagccgcaagcagttcataactccaatccttagctgtctcattttctgtttccgcattgtcatactgtttcagccagcggatattccgctcattggaaagccagcggtagcaggcatccccgttaaaagacctcgcaagagaataatcaggtgtcattacctgaggatagcaatgcttgagataagaagtaagtcccggcaggaaagtctcatggctgctgccatctgagaagcttacactgacccctccgccaaaataacacttctgctggaataatgcgattttttcacattttggctttttcatcagatctatactgccttttgtctcctgatacagagcctgggcaaaaccggtgtaatagctcattccatatgcaaaatagcccaatccttccgtgcatgcgccatcctcttccattccatccagatagcattgcagcgcatcacagacacggccgataatagattgtttccaatcctctggcagtctctcatccttcggctgctgccttttctcataccagtgggatagataaatggccgccattcctaccgaacctgcacatactgctgcccagttgcagcgatcctgttcccaccagctgtaaggtactgttgatgtcacaaaaggcacaatcactctatcagttacctcacatacaactctttctacggtctgcaatggcagcttgtctcccagtatatccacaatctccagcagactctgtgcagtctctgctgcaaacaggtcaatcgtcttctcatccagtgcgtcaaaatccacatgtgcaggcagtgcccagaacttctctgtacaaatggcatccagcacctgtgacagcatcttcaaatcctcttccctgccctcaaattccgataaaatgccaaatacagttaagtattttctgcgtccaaaatactccccctcataaataaggcggttgcctgtttccttaaacagaaagaagtcttcctctcttagttccggcatgggctgattacgcagctcattccctgccctctctatatccgtccaaaatttctgcagatactccttttgctcttgtgtcatatccattcccccaaattataagattcctgactgttataaaccagttccggaagcacatcgctttctatatgaattattgcgcaaaatatcaaatttggctactgttttatgaaggttatactctcttttggtattcctgaatccgttcattgagtttatttgcctcagctactgcctttttccaactaatcacagatattaccccataaatgatcgtaatggacagaaccatatatacaacactttttatatgagtgaccgtgtaccagccaaataaataaccgcaacccagaacgatagcaatgataatgaaataatgaataatcgtaatcataatggcttttctggtagatattctgtcatccggatagattagtgtactgagtgcacaaaggaaggacgtaaacagaatctgccagaatatatccgaagggatagaatcaacgggatacagaatattggtgaaaaagccgactgcaagcaattcacccgtagtaatctccataaatttattgagaaccatttttgtttttctcattttttctcccccctaaccttttaacccaagcttacgtttcaaatcaggcacatattgtctggaaatcatgagtttttccccatttttcatgcatacctcatatctgccgcccagtgatgggcttagattcttcacatgaaccagattgatgatcgttgacttggaagccctgaaaaaatctgtattctgaaaattgtcttccagctcatacagtttcagcttcgtttcataaacttccttctccatatagacaaacaccctgttatccactgcttcaaaataataaatatcccctggctgtatctgcatgagtttatcctctttggatacagtaattttatcccgtcctgctttcagtgcatagattgtacgaaggagttgttcgtccatgttccggcattttatgataatttcttcctcttccccttcactgcaatccagtatcgtaattttcacccaattaccccctcttttacctgtcctttagcttcctgttccttgtcacgataactgctaatataatagcgcaaaaagtatatgccattaataataacacctgttctcttatactccatatattgcctgccacagtaactgtgattcccattttatcacgatacacaggaatcagtccctccggcattcctgcaaaggtctgttccacgatctgctgtgtactgaccgccctcatcatggacacgctatgcaatatcggaagtgccttgagaatcttctgtactccgatagaaagctgtgacatcggcagataaatgcctcctgcaaaaccaaccagggtaccgataatcgtcagaataccgctccacgcactgttactgtgtacgaacaatgcgattacatatcctatggaagaatatgtcaatgcgctgcacatgatcattcctgtcaatgnnnnnnnnnncagaaagcatatcataccctttcaggaaaaagaatacctctcccattgcaaatgtcagaagacacataaaagttccaataatccatgctgagaaaatatatccaagcgccagataaagcctttttaccggtgtcacataaaaagccataatcctctttctcgtctcgtcctgcaccatatttccaagcactgtcattgtaactgttaccgcatttactgaaataattccagcaagtgtccacatctgtatcagatatgctgcgttctccctgtcctgcgccgtaattttgcgtccaccatattcttctattactgacagcacattctcactgttcatctttccaaggaaaacgaccatcagtcccaatacgatcagcatagacaataaggaaaaaaatactgcgcttttatcccttaaatacaccagacaatttctctttgtcaaataaaaaatctctctcatctcaaactcccgcctttctacaaaccttccccggaaccagctccaagtgtttttcccgtaatattcaaaaagacatcatccatcgttccctgtatcatctcaaatccattgatatatggctttgctttggcaagtaccggtaatgcatccatgctttttgcgacctgcagatgataagcctcctgcactttctgataagaatgtccctgcaaagcctctgtcagttctctttccttatcctgcatagggattaatcgtaacgtatcttctgcatatttttcctttaaatcaaaaggcgtaccaacctcttttatcttcccgctgtccataatcgcaatgtgctgcgccttggctgcctcttccatatagtgagtcgtaagaaagactgtcatctgattccggatacgcatctggtctatgctctcccataccagcctgcgcgttgcaggatccaaacctgtcgttggctcatccaggaacaatacttccggtctgttcaataatgcagccgcaatctcgcagcgtctcttctgccctcccgacaggttctcatatcttctgctccatacatcctgcagctgtagtctctcacacagttctgtcacatgctccctgaatgaattccttttctccccgaaaagggcacctcttacatacagattttcctttacggtcaacttatcatccagacagttgttctgccataccacgccgattctctttctgatctgcgcatcttccttacctgcgagacagccatcaatcactatctcccctgccgttggacgaaacagcgtacacatcatattgattgtcgtagacttgcctgctccattcactccaaggaatccgaataactcacctctctccacagaaaagctgatatcatctacagccttcacttccttaaaatacttttttaagttctctacttttatgattgcatccatcctgtatccgctcccttcaccttttctacagcatagacgcaaaaacagcttaccgcaatcaaattgcggtaagctgttgattttgaatggtaagatgtaatttttgacagaaagattagcaaacaccctgagcgagcatagcagcttctaaggtgtccgcagatttaccggggttttgaggtcggttgtatatcacgtgtatagagtgattgtctgagaatttcgattaagacctatttttgaaaataccataatatatgcaaccaatgctcatatgagtaagaattcaaatagtcgcataataataattttctcaaaacccacaattaaatagcttgaatttctactatgtaatattaacaaacgctacaggcgaggccttctttacattcaattatccatttctcatctctatcatcttgtcaatcttattgactatatatttttcaaaatatctatgttcaaaaaattccgaaaattttttatctgtcataaaacgatattttatccaattatataattcttctcttgatgctttttttaatgaactattcattcctgcaacaataccatttatactttttaacatatgctccatattatcatcccaatacagttcactcacaatacatttaagcaatttatttggatcacatgctccacattccggaacagcaaagtacttttccttaatatataaaatactaaatgcattgcttaattgtatatgattacatgtaaatccataatatttagctatgctaattatttgtgtacaccctaaccctctatagaacattctaagtgggctagtattattacaaagagtttttataattgcatcatcattaataaaaaaaacaacataattttctggtattgcatttaatacgacatctaaaaatggcaatacttttataggttgattttctgaaattgcattcaacaacttatataaattttttccacaagaatgataagtatatataataacttttgtagttgggcacggtaatacttgataatatattacaccatattgagaaatcttacattcctcttttttctcgcatataacatctaaaaattccatgtttttctcagcaagataattccagctaatagtacatgtatttacactactaaaggttctccaatattcatctgtctcctttttcacaaaaaaaatgttaccactgggcatagcattttcaagtgcaaaaaaacatgccatagttgatgtttgagcactttcagttatatttcttactaatatttgaaaaccttgctctagatattcttctatcttttcttttacccaactagtaggcattaacaattccgaagcaaaaatatttgcttctaattcttgagtatctaataaacgtttaccactaacttgaatatagtgttcacctgctatacacttaacgtctccattgtgccacggtatacatatatgccccagctcatgtgccaatgtaaatcttcgccttggtatatatgttatttccgtatttattattactttattatcattcaactgtgaatatgcttctattccgtattgattttcttcttccacaatttgaatatccatttctgaaaaaatattacttacatcaattggcggcatcaaatcaaatctatctacaattcttcgtgcaaattttctcacagcttcgaatctattcat

SEQ ID NO: 284 - DNA, 19267 bp, unidentified
  source 1..19267: mol_type = unassigned DNA
atgaaaaaaggaaataaatacggaacgcatagagtaatttcaccgaaaggagtattgccacaaccagctgataaactggataacaatatggacgaaatctatgataacgagattttgatcgatgtgcaaactctgaatatcgattcggctagttttactcagattgaagaacaagccggaggggataaagctaaaattgccgggatcatgctgggaattgtagagaaacaaggaaaacaccgtaatccggtgaccggttccggtggtatgttactgggaacggtggaaaaaatcggagatgctttagttggaaagaccgatctgaaagtgggagataaaatcgcaactttggtgtctttgtcgctgactccgcttcgtatcgataaaattaaagaaatccgggcagatgtcgaccaggtagatatcgatggtaaagctattttgtttgaaagcggtatttatgcgaaaattccgtcagatctgccggaaaagttggctttgtcggctctcgatgtagccggagctccggctcagactgctaaattggtgaaaccgggagatacggtattgattatcggtgccggtggtaaatcgggtatgttgtgttgctatgaagcaaagaaacgtgctggtgttaccggtaaagtaatcggtttgtgccatagccagagaagtaccgaacggcttcagaaattaggcttctgtgattatgtattctcggccgatgcaactcagccggttccggttatggagaaaattgccgaactgacgaatggtgaaatgtgtgatattacgatcaataatgtgaatattacggatactgagatgaccagcatcttgtgtactaaaaatgacggattggtctatttcttctctatggcgaccagttttacgaaggctgctttgggagcggaaggtgtcggcagcgatgtgactatgatcgttggaaatgggtataccaaaggacatgctgagattacactgcaggaacttcgtgaaagcgaggcattacggaagatatttacagagttgtatgcctgaatggtcgggattttataatcccgacgaattaaaaatatgtttttatggctagcagaagaaaagagtttttccctgaagtgaccgatgaacaatggaacgattggcattggcaggtgaagaacaggattgaaactttggatcagctgaagaaatacatccggctgacaccagatgaggaagagggtatccgtgagtcgctgaagacattacggatggcgatcacaccttattatctgagtctgatcgatcccgataatccttattgtccgatccgtaaacaatcggtgccgaccattgaagaattgcatcggtcaccggctgatctggaagatcccttgcatgaagacggtgattcacccgtaccgggactgacccaccgttatcctgaccgggtgttgttcctgatcaccgatatgtgttcgatgtattgccggcattgtacccggcgccgctttgccggacatcacgattgtgccactccattggaaagaatcgataaatgtatcgaatatatcgctaataccccccaggtgagagatgtcctcctatcgggaggggatgccttattggtcagtgacgaacgattggaatatatcatcaaacggctgcgtggaatccctcatgtcgagattatccgtatcgggtcgagaacaccggtggtgttaccccagcgcattacgccggaattggtaaatatgcttcggaaatatcatccgatttggctgaatactcatttcaaccatccgaacgaaattaccgaagagtcggcggctgcttgtgcccggctggccgatgcgggtatacctttgggaaatcagtctgtcctgctccgcgggatcaacgattgtacacatgtcatgaaaaaattggtgcacgagttggtcaagatccgggtacgtccctattacatctatatctgtgatctttctgtgggtatcggtcatttccgtacccctgtatcgaagggaatcgagattatcgagaacctgcggggacatacttccggttatgccgtgcctactttcgtcgtggatgctcccggtggaggcggaaaaattccggtgatgccgacctatctgatttctcagggccccaatcgggtggtgttgcgtaattttgaaggcgtggtgactacgtataccgaaccgacggattacagagacgaatgccactgtgaagagtgtgagaagcgccgtaaaacagaaggagtggctgagttgctgagcggagaacgcttgtctctcgaaccggcgaatctggatcgtaagacacgtaatctattggcgaaaggataaattatttgtgattttggatttaccgtttcattcgattgaaaggataaatccggaatcataaatgaaaatgctgaacagatgggttttgttgatgacatatccgattacaggagtctggcaattgtcggattggagaaaaatacagggaaaacagaatgcctgaattacatccttcgcaggataaaagattcggcagatcggttcgctctgacttcgatcggaattgacggagaaaaccgggatcaggtatgtcaaaccccgaaacccgagattatcgtgccggaaggaatgatattcgttacttcggagaaacattaccgggagaggaggttggtggctgaaatcatggaaatcgatgatcatcggactgctttgggacggttggttatcgccagggctaaaacttcgggaaaagtattgctttcagggcctgcggatactgccgggttgaaaagtctgatccggcatatgaaagatttcggggtacgaacgaccttggtcgacggggctttgtcccgtttaagcctggcgtctcccaccgttacggaggcgatggtcttagcgacgggggctgctgtttccgggaatattcgggaattggtgagacgtacccgttatgtttgtgatttgatcgatctggaagaggtggacgaagttttacaagagaggttggatgccattcaacaaggtgtatgggcggtcgggccggagggagaatgtatcgatctgaaattgccttctgtgtttatgctggagaaaagtggaaccgatctgctgcaatatgggcatcggatctttattgccggtgctgtgagtgataaagtatttcagtttttacgcgtacagaaacagaccgtagaattgatcgtccgtgattttacccgtgtttttgccgcacctgagtctttttatgcctttttacgtaagggcggaagagtacaggtgcttcatcgtagccggcttttggccgttacgatcaatcctcagtctccgggaggattacttttggattcgttgcgtttgcagcaagcattggaagaaagcttgcaaattccggtgtatgatgtgaaaaaaatagaaaaagtcggtaaaaaccgttgaggatatgattttaagggaagcgataagacaagtcaggggattccgttatatgatcgaacaattggatatctgttcggctgtaggccggagggtattgtatgatctgccctggctcgattcgaaatctcggttggaggccgaatttgaacgtattcaaaagatcatggtactttttgaacaacctgaaaatgaatcccggctggaacgtttgactggtaagctgatgcaggtgagagatatccgggggacgatcgggcggatggcgatggagcaagtgttggatgatcttgaattgttcgaattgaaaacttttgctttgtgctcggaagaaatcagggaacttgtcgaagaatggcggattgttttactcccggaactggagccggttgcacgtttgttggatccggaagggaatcggattcctcatttttatatttatgatacttattcggctgagctggccaggctgagagctgaaataaaacaaaagagccttcaaggggcagaagaacgggaattagaagcgttgtatgtacaaagtgtggttttggaagacaaggtacgcgaagagttgtctgtgcagttgagaccttatcacgacgatttgaaacaggctttggaagcggtcggattgctggatgtcgtattggcaaaagccagacaagcaataagaggacaattgactttgccgcaaattccggaagagggggaaatggtgttcgaaggtcttttccatcctcagatccgggagattttagaacaggaaggaagagcgtttcaggctgtagatttgaaattggaaaagggaacgacggtgattaccggagccaatatggccggaaagacagtgttgttgaaaagtgtgcaattggcgcaatacctgatgcagttcggtttttatgtacctgcccggcgggcgggtatgccgctcgtggaacaagtcttgaccagtatcggggatgatcaggatgaattgaacggtctctcttcttatgcggctgagatgttgcgggtggatgaaatgatccggcaagtcaggcagcgaagtaaaattttggtgctgatagacgaattggcccggacgaccaatcccgtcgagggacgggcaattgtgaatggggtagtggattttttgactactcaccgggtgatggctatggttactacccattatagcggaataacggccgaatgccgtaaattgagagtgcggggatttgtagagaatcgggttgaagggaatatgaccctgaaaaatatcaatgagtttatcgattattcactcgaagaagacagcggagaagaagttccccaggaggcgatgcgtattgcctggatgctggggatcgaccgtggagtgttggaacgggtggaaaattatttgcaggaagaaaatcctgattggaaaaagacagtacagtagaaagaaaatatatatgaaaagtaaattaggaatagattttgataaagtcggacatgcccgtgaaatggcccgtaagattgctgaccaggtgcaggattttgtggatggctatacgacagtggctgtcgaaaggacattgtgtcgtttgcttggtatcgacggagtggatgttcatgctgtccctctgccgaacattttggtagacgagctgaaagaaaagaacgtgttgggagaaggaattttattctttctgggtaatgtaatggtggaaaccggaatgactccgcaggaaatagccgaacaagtggctgccgggaaagtagatgtcacccgggtaccggtatgtactcccggccagcgggaaaaagcgttgcaaccctatatcgaggccagtatccgtcggatttccgacaaccggaaacggcgtgagaattatatcgcaacgatcggagagggagcaaagccttatctttatgtcattgtcgctaccggtaatatttacgaagacgtggtacaggcacaggcggctgcccggcaaggggcggatgtcattgctgtgatccgtacaacggggcaaagtttgttggactatgtaccctatggggctacgacagaaggattcggcggaacttttgccacccaggaaaattttcggattatgcggaaagctttggatgaggtaggagaagaagtcggtcgttatattcggctgtgtaattattgttccggtttatgtatgccggagattgctgtgatgggagctttggaagggctggatgtgatgttgaacgatgcgttgtatgggattttattccgggatatcaatatgcagcggacgttggtcgaccagtttatgtcgcgggtgatcaacggctttgccggagtgataatcaacacaggcgaagataactacctgactactgccgacgctgtcgaagaagcacatactgttttggcttccgatctgatcaatgaacaattggctttattggccgggctgccggaagaacaaatgggcctgggacatgcttttgaaatggatcccatgctggaaaacggctttttgtacgaattggctcaggcccagatgacccgggaaatttttccgaaggctactttgaaatatatgcctccgacgaaatttatgaccggaaatattttccgcggacatattcaggatgctcttttcaatatgatcggaatctggacttcacaaggtattcaactgttgggaatgccgaccgaagccatacatactccatttatgtcggatcgttatctgtcgatcgagaatgcccgttatatttttaataatatgaaaaatatcggagatgaagtggtctttaaagaaaacgggattatacaaaacagggcgaaagaagtgttggataaagctaccgttctcttggaaaagattgaacgggaaggactttttacagccttggaaaaaggaatttttgccgatatcaagcgtcccaaaaacggaggaaaaggcttggacggcgtttgtgccaagggaaagaactatagcaatccttttgtagagattatgatgaacagataacaaaaatcgtaaatcaaataaagattatgagcggaggtttatattcaacagaagggagagatttcgatcaaacccttgatctgaaaaagataaaaccctacggggatacgatgaacgacggaaagacacagctgagtttcactttacctgtacctgccggagatgaagcgatagaggctgctaaacagttgatgaaaaaaatgggatttgaaaatcctcaggtggtgtttcatcaggaactgacgaaaggatatactttttttaattgttatggaaattgtgtacacacggtagattatagccatatctatgtgccgaaagtggaatcgaccaagtgggatatgggagagaccgatcagtttgtccgggaacatatcggtcggaaaattgtggtgatcggagctagtaccggaacagatgcccatacggtgggaatcgacgctattatgaatatgaaaggttttgccggacattatggtttggagcggtatgaaatgttcgaagccttgaatatgggtagccaggtgaccaacgaggaatttatcgctaaggctatcgagttgaaagccgatgctttattggtttcgcagaccgtgactcagaaagatattcatattaaaaatctgacggaactcgtggagatgttagaagccgaaggattacgggacaaagtgatcctggcttgtggtggtccccggatttcacatgagttggcgaaagaattggggtacgatgccggcttcgggatgaatacctatgccgacgatgtcgcctcgtttattgcgcaggaattggatcgaagaatgaatcattgaaaatatacaagctatggaaaaagaacaaatcagggaagtgattgccaggagagtggcaatggaactccacgatggagacgtggtgaatctgggtatcggtttgccgactttagtgccgaattatctgcctgaaggtgtcgaggtcattttacaaacggagaatggattgatcggtatggggccgactcctgctccgggagaagaagatccggacttgatcaatgccggcggtggagcgataacggctctgcccggagcggccagcttcgatagtgctacttcgttcggtattatccggggcggacacgtagatgtcagtatcctgggggccttgcaagtagatgagaaaggagatttagccaactggatgataccggggaaaaaaacaccgggaatgggtggagcgatggacctgctgatgggagccggtaaggtgatcctggccatggaacatacggcaaaaggaaatccgaaaatcctgaaaaaatgtactttacctttgacagccaaggggcaggtgaatatgatcgttacagaaatgggagttatggagatcacacccgggggaattgtactgaaagagatacatcctgagtttacggtagaacaggtgcaggcagctacagaagcaactctgatcgttgccccggatttaaaaaagatgtgctgaacgacgaaagcgtattgaaggaaatcacgatggaggatggatggtggatacctctagcccgaatcgtaaactataaattaaaaaaggtatggatttttcattatcaaaaaaagagatattgtttcagcagatgatcagagcatttgctgagaaagaagtaaaaccgctggcggcagaagtggacgaagaagagagattccctgtcgaaacggtagaaaaaatggcgaaacaggggattatgggtatccctttcccggtggaatatggcggagccggtggtgataacgtattgtattctatggctgtagaggaattgtcccgggtatgtgcaacgaccggggttattgtttctgcccatacctctttgtgtgcttctccgatctatgaattcggaaatgaagaacaacggaaaaaatatttacccaaattatgttcgggagaatggatcggagcttttggtctgaccgaaccgaatgcaggtaccgatgcctctgcccagcagacgatggctgttgctgaagaggatcattatgtgctcaacgggtccaaaatatttattacgaatgcagcttatgcacacgtttacattgttatggcgatgaccgataagtcgcagggtacacgaggaatctctgcttttatcgttgaacgggattttccgggattttccatcggtaaaaaagagaaaaagatggggatccggggatccgcaacctgtgagttgatttttgaaaattgtattgtgcctaaaggaaatatgctgggtaaaccgggtgaaggatttaaaattgcgatgaagacgctcgatggcggacgtatgggaattgcttcacaggccttgggaattgctcagggagccatggatgagacaataaaatatgtgaaagaacggaaacagttcggacgctctatcggacaatttcagaatacccaatttcagttggccgatttaaatgccaagatcgaagctgcccgtttgttggtgcggacggctgcctggaagaaagacaggaaaatcccttactctgtcgattcggcacgggctaagttatttgctgctgaaacagcgatggaagtgacgacaaaagccgtacagttccacggagggtatggatatacccgtgagtatccggtcgaacggatgatgagagatgccaagattacggagatttatgagggaacctctgaagtacagcggatggtgattgctgctgctctattgaaataataatgttttccgcattgaacttataaaaagagaatacatgaaaatagtagtttgtataaaacaagtacctgatacgacagagatcaaactcgatccggtaacaggaacaatgatacgggatggtgtacctagcattatgaatcccgacgataaaggaggattggaaatggctttggccttgaaagataaatatggtgcgcaggtaaccgttattacgatgggaccgcctcaggccgacgatattttgcgtgaagcttttgccatgggagccgaccgggcgattcatttgagcgaccgtaagtttgccggtgcagatacattggctacgtcgaatgctattgccggtgctttacggatgctggatttcgacctggtcattaccggccggcaggcgatcgatggagatacggcgcaggtaggacctcagattgccgagcatctcgatttgccacaagtgacgtatgtcgagaatttggaattcgatggtgacaagttgtttacgatccgtaaatctaccgaagaaggatatcaaaccgtacaggtggaatctccctgtgtccttactgttctggctacggcaaacaaagcgcgctatatgtctgtgcggggaatcgtagaggcatacgatcgggaagtggaaatctggaattttaataatatcagtgtggatgaagctaaattgggattgaacggttcgccgacgcgggtatggaagtcttttaccaaaggagctaaagcagccggaaaagttttcgaagtggaaccggccgaagctgtagatgttattatcgaaaaattgaaagagaaatttattatttaatacatgattttagaggaaaaccgggaataatccggtgaaatctaaagtttaaaatctgatgaagatggataaatctcaatataaagacgtttatgtattcgtagagcaacgggaaggagttattcagaaagttgccatcgaattattggggaaagcccgggagttggccgatagcctgaatgaaaaagtggtagcgatgttgttgggttatgaagtggcgggtcaggcacaggaattgatcgcttatggggccgatgtcgtattgtgtgctgacgaacgggagctggtacaatataataccgagccttacgctcaggcgattacacagattgtacatgagcgtaaacccagtatcgtactgattggagcgacgacgatcggccgggatttgggccctcgtttatccgcccgtttagagaccgggttgacagccgattgtacgggcctcgctatctcggatgaacgggatttgctgatgacccgtcctgcattcggaggaaatctgatggcgacgattatttgtaaagaacaccggccgcaaatgtcgaccgtacgtccgggagtgatgcgcacgaaaccgaaagatgaacaacgtgccggaacggtagagaaggtgaatattcatttcgataagtcgaaatttaaagtgcggattctcgagacggtgaaagaacaaaagaaccgtatcgatataacagaagcgaagattctcgtatccggaggccgtggtgtaggtaatacggagggatttgagatgctcggaaaattagcggaaacgctgaatgccgaggtttcttcttcacgtgccatggtggatgccggggttatgcctcatgaccgtcaggttggccaaaccgggaaaaccgttcgtcccgatctgtatttcgctatgggtatttccggagctattcagcatttggccggaatggaggaatcggaatttatcgttgccgtgaacaaggataaatatgctccgatttttaacgttgccgacctgggaattgtcggggatgtgaaacaggtcgttccgttgctgaccgagaggttgacaaacatccggaaaactgacaaataaaagcccggacatggagtatcaaaaattaatgctggaaaaacaagatcgtgtttgtctggtaaagatcaatcatccggaggcattgaatgccttgaatacggtgatcttgcaggaattggaccgggcattcgatgaaattgcagccgatccggaaaccgatgtggttattctgacaggcgaaggacgttcgtttgttgcgggagccgatattgctgaaatgagtgtgatgaaggccgaagaaggccggcgtttcggtgagttaggggctgctgttttccggaaaatcgaactgatggctaagccggttattgctgccgtgaatggatttgctttaggaggaggatgtgaactggcgatggcttgtgatatccgtatcgcctcggctaaggcgaagttcggtcagccggaagtgggacttgggatcacgccgggattttccggtacccagcgtttaccgcgtttagtcggattaggtaaagccaaagagttgatttatacggctgcggttatccatgccgaggaagcttgccggatcggactggtgaacaaagtggtggaaccggaagaattgatgaatgagtgtatggctatggcaaagactattgctgctaaagcgccattggcggtccgttatgccaaagaagccatcaaccggggagtggaaacggatatggataccggtatcgtcatcgaaaacggtttgttcgggttgtgtttcgcaacgaccgaccagaaggaaggcatggaagcttttttatggaaacgtaaacccgaatttaaagggaattaaaatctttgtaatttaaatttatcgattatgaaaatatgcattgttggaacagggactatgggacatggtattgcccaggtatttgcccaggccggacatgaggtattgttaaaaggccgttctgaagcttctttggcaaaagctcacaaagctatggataaaaatctttccagaatggtggaaaaaggtaaattggaagccggggttaaagatcaggtattggccaggattaaagatacgatgaaatatgaggattgtgccgatgctgatttggtgatcgaggcgatagctgaagatatggctaccaagcatgagatattcaaattgttggacggaatttgtaaaccggaagcgatattggcaaccaatacttcttcgctttctataacggaagtggccgctgtgactaaccgtccggaaaaggtgatcggtatgcatttcttcaatcctgttccggctatgaaactggtggaagtgatcaaaggccggctgacttcggcagaggtgcatgatcaggtatttgctttatcgcaggaaatcgggaaagtgcccgtcagtgtcgaggaagctcctggatttatagtcaaccggattctgatccctctggtgaacgaaggcatcggtatattagctgacggagtggcgaaaaaagaggaaatcgatgccgcgatgaaattaggggctaaccatcctatgggaccattggaactgggtgatttgatcggattggatgtttgtctggctattatggaagtgttgtaccgggaattcggtgactccaaataccggcctcatcctttgttgcggaaaatggttcgcgctaacttattgggacggaagaccggagtcgggttttatgactatcggaaataatgaggagagtcttctttaccgggatacgatgttggggaatatttccccaacatttttactttttccccactttctacaagctgcgattcttaatctgttgtgtgtaatgtattgataattagtgtattttgttgattttgtgcttgtggcatcggatttgttctgtttaaggataaaatctaactctaaaaaataatagtatgaaaaagatcgtcattttaggaatcggagcttctatgttcttcctgggtagttgcgtagagagttctcagaaatataagtctttacaagtccgtctggattctttgagtacagtacatattatgcagaattccgaaatggagagtatgctggccgatttgaacgatatttctgccggaatgcaatcgttgcgggatgccgaacgtttattgactatggaaacaattaatgaaaataaagccaatagtaaatccaaacagcaattgaatcagctgaaaaaagacgtacaggctattaccgaggcgatcgcttcttataaagaacagatttccaaactcgaaggtaagaataaaagccagtcggccgagtttaaaagattgattgccggcttaaatgcggaattggatcaacgtacacagaaactgaatgaaattactaaacaattggctgagaagaatcagcaattggcagtgaagaccgaggaagtcgctaatctgaccgagaatgtggaagctttggataaagccaataaaagtcagcaaatgacgatcaatgaacaggatatggcgattcatcagggacactatttgattggaaaccgcaaagagctgaaagaagctgaggtaatttccagacaagggattttctgtccgccgatcgtatcgtcacaagcacaaaaagccgactttaccgatttggatatccgtgagatgaaggtgatcccgttgaatagtaaaaaagcgaaattactttctgtccatccggctgattcctatactttggagaccggtgaagatggtaatatgactctgaaaatcaatgacgaaaataatttctggaaacaaacaaaatacttggttgtgatgattgaataaaagcgggaataattttaactgagagaggcatacccaaaaagtatgtctcttttcttttttttcacaacgattattcttgtcgggagagaaaataatgaaaaaaaactagccgaagatcatcaggatttttaaaagtgtatccgatgagaaaatcgctttcaatttgtcgatacttttgtatttcagtgttttaacactgcttactgagatgtttatttcctgtgctatttgctgattgtcgaggccttgaaaagcgagctgcatgacttgtttactacggggaggaagtttttctatttctgcgagaatctgcatggcgacgtctgcttctacaatgacattgaagatattgacctctttcagaggatggttgtttagatatttagcttgcagcttgcgggttcgcagccattcaagtgaaaggttatgaaccagcatatacatataattatcgatattctcaatatttttgttttttccttgtaattcccagaggcgtgcaaaagcttcctgtacaatatcttgggcagctgttttatcgcaaaggaaacggttggctgcgaaacacaaagaaacatacaaacggttcactaagctttcgaacttggttgcagctgtatttcccgtttgatatgttgtgtttttatccatttttataacatctttttaaggaattgctctacaaatttaaaaaaaattataattccgttcatccttttcgttactgagttagtctttaatatgaattaagagaggaaaaatgtagtaaaatagattcagatgaacagagagagtttaaatatattgttaaaaaaagcctattatcaacagctttctgaggaagagaggaaaactttgaagttgtggttgggggagtcgggagaaaatacagagatgtataaacggttgatgtcgggacagagcttgacggaatattcggattgggtgactggattcgacctttcccgggcgatggaagctatccggagtaaggtgaaacggaacaggcaaaggagaatccggaaatcagtaagttgggtggctgcctgtgtaatactctgtctgggcataactttcgttttttatttcacttcaatggattcagaacaggtattgacagaacaaatggctgctcagatacagcctggctcggcaaaggcgatattgactttaggggatggacggcaagtggctttggataaaaaacccattgaattgcttgtcaataaacaacaaatggtgacaggagatagtgcgaccttgaattattctattgtattgcccgcttctgagaccgaacagatacaacggcaggaagtggcagaatatcatacaatagaagttcctgccggaggagaatatcatctggttttggctgatggtacaaagatatggttgaatgcagaaagttctctggtatttccggttgaattttccgggaataagcgacaggttattttaaaaggagaagcttattttgaggtggcccggaatgaacatttaccttttgttgtgagtacagtctccggggtacaaatttgtgtattgggaacacagtttaatgtggaagcttatgatgaccgggaaagtgtaaagactactctggtggagggaagtgtagatgtacaggcagggggcgaaaaggtacgtttgattccccatgaacaattgcaatatcataaaaatactgctgaaatggaagtcagggaggtaaatgtacgggagattatcgcctggaaaaacggttggtttgtctttgataatactacattgggggaaattgtaaaaactttgcaacgttggtataacatagaagtagaatttatacgtcctgaattagaacatttgcgtttcaccggtgatttaagcaggtatgactcttttgatgctgttatccggatgtttgaagatactaaaaagctgaaaatgagtgtgatatcgaacaggctaattgtcgatagaaaataacgcagattaattttaaataaaaatacctaaagatgaggattgtgctacctttttctttcatctatttttataccgttaaaaacggacgtttttttgggaaaaatttaaatttataaacctactattttacttttctgtaaaaattaatccacagtttggaattttttctcgtatcgtgatattgtatttataatcaactaattacattcttgtaaaacactgtaaaattcttgccattacagaaaactgtgcttgacattctttggttttttactcttcatttttcactttttacgcttaaaaagtgacttaaaaaacgtcccaataaaagggtggctaactatatgtaattcagtgcttaatattaatcaaaaacagaaaagtatgagaaaaacatcctgttttaaacgtaggtttatgactaaggctttgattctatcgatagttttagtgatagtagggggaagttcttctatcgtaggagcttctcccagagttgataagcaactcggtcaattgataactttgaccatgaaggaaacttctgtaataaatattattcaggaaattcgtaaatcaacagattatcgttttttatttcaggtggacgatttaaaaaatatgaataaagaagaatttgttgtttctcatgcgaccataaaggaggtcatggataagttagttgatggtacaaatctgacatatacttttcgttctgatgctgtagtagttttagctttgaaacaacaagcggctcaaatcaaatcaactcagaaatttagcttgaaagggcgggtgtttgaaaaaacggatcctggtaaaggaattccttttgcttcggtttttctgcctcagttaggcataggcactgtaacaaaagcagacgggacatttgagataaaaaatctggatcctgatgtttataaggtggaaattagttctttaggttttgagacgttacagacaactattaatttgaatagtaaaactcctgcaaatttgaaatttggtttagtggaagcgaatttccgtttggatgaggtggtgataactgccactaatagtaaagccggagcttcgacttcttcttctatctcacgtttggcaatggatcatatgcaggcttccagtttgtctgatattatgcaactattaccgggagcaacggtaagtaaaccggatttaacttccgtatcgactttaagcctaaggggaggggcttctttaggaacagcggtgatcatggacggagctcctatttcaaacaattctaatatgcagatgatgacaacctctattggtggagctgtcccggcaacgagaggaacctctccccaaaccggaattgatttaagaacgattacaactgataacatcgagtccgtggaagtgattacgggagttccaagtgttgaatatggcgatttgacaggtggggctgtgattgtaaatacaaaagccggacgtcagcctttgcaaattaaattcaatacaaatcccaatgtttatatgttttccggtacaaaaggattggggttaggagaaaaaggaggaaatgtgaatgtcgggttagattatgcatatagcaacgcagatcctacagagggatatgattattatcaacgaattactgcacgtatgatgtattcgaatggtttttttcaagatcgtttacgttcaaatacttcattgaatgttatctatgctaaagataaaggggaacctaacccggatgatgaacaggacatgcggactaccagacaacgggatttagggctggttttcaatacaaatgggacattagatataaatgccggttggcttaaaaatattcgttatgcagcttctgtaaattatacgaacaggcattcttattttcaggatgaggcgactaatgcggattggggatattcccagtcaatgacagatggagctgtgttgtccaatgttcccggacgtccagtctatttggaagatggtacagaggttacccgggttccggtgggagaagaaagtttaaaggcgtggatgttacctggttcttatatttatatgtatgatgtttatggaaaagagctgaatacatttgccaaactgactacaaattttgccggcaagaccggacctattcatcatcggttgattttaggggctgattttagaaattcaggtaatctgggtaaaggaaagatatttgatccggaaaatcctccttaccggaatttatcttatgactttgcatctcaacgtaacagagcgtttaaggatattccttttatgaaccatctcggagtgtatgcagaggagaatatacagtggcttatggggaaacatgaattaaatatttctgctggaatacgttgggataaagtctgcggtttcggtgacggattttctccgcgtatcaatgcttctgtggatattatacccaggcatctgactctccggggagcctatggtattactttaaaagctccgactttgttatatatgtatccggataaggcttattttgatttagtgaattttaataatgcttcaaccagtgctcctgacggacaaaaatttcaggtcattaccacgcgtgtctttgatgcaggaaataagaatttagaaatggcaaagaacaaaaaatgtgagttggggttggatctgaaatttaataaaatgcgtttttttattactgcctatcaggaaaaatgtgataacggttataccattgccaaatcgttgaatacctttaaaagtgtaccttttgtacaatattctgaaattactccgcgtccttctgatgaaagccagatagctaatttgaaagagatagccaccaatccttatttattgagttataccactccgatgaatgcgcttaaatatctggtgcgggggattgatttcgatttcgattttggacgtgtggatgccattcgtacggcttttaatttgaacggttcgtatatgtggaggaaatccggttctaataattatatgttctggaataaaattacaggaacagattattctaaatatccccatatgggagttttttctccggattatgaaactgattatagcgaacgtttggctacaaatttgagggtcatccataatattcctcaaataggattggtggtaacattgactgctaatgtgatttggaaagatcgctcatggaaatcttatggtaatgactcaattcctataaaatatatttcccgtttagatggaaaattatatgactttaatccggatgatattgatagtgaggaatttatcgggatagaccggaggtcaactgttaatccgacccggttgatccgggaaggagttatgcctccgcttttaaccatgaatttgaatataactaaagaaatacgtgactttttgaaggtttctttctttgcaaataatatgttcaggagtactcctttatgggaaagcaagaaaaatccgggatcctatacccgaaggaatactacagagaacgtgttcttttttggtctggaattgacggctattattcgttaa

SEQ ID NO: 285 - DNA, 9377 bp, unidentified
  source 1..9377: mol_type = unassigned DNA
ttatttctgtgcaaaaaagtctttgaccacctgcaccacggctgcgcggtcggcttcggtcagaccatagtacagcggcaggcgggtcaggcggttgctttccttggtagtgtactcatccacaccggcaaagcggccgtattggatgcccgccggggcgctgtgcagcggcacataatggaaagacgatgccacaccgtgggctttcaaataagcaataaacgcggtgcgctgttccaggtctcgcagcttgacatagaacaaatgcccgttatgcacacagccttccggcacggtgggcagctccaataggcctgcttcagccagcggtgccagctcctgtgcgtaataatcccagctgtgggtacggtctgtattgatggtatcggcctgttccagctgtgcccacaggtaagcggcattcagatcactgggcaggtagctggagccataagaaacccaggtatatttatctacctggccgcgcagaaaactggcgcggttggtacccttttcccgcaggatttcggccttggtcacggtctcggggtcattgatgaccagcgcgcccccctctcccattgagaagttcttcgtctcatggaaagagtagcagccaaaatcaccgatggtgcccagtgccctgcccttatagctggccatcactccctgggcggcatcttccaccaccttcaggttatggcggcgcgcaatctgcatgatggtatccatattgcaggccacaccggcatagtgcatcacgcagatgactttggttttttcggtaatggcgggttcaatttttgcttcatcaatgttcatggtgtccgggcggatatccacaaacaccagcttggccccagctaaaacaaaggccgttgccgtggaagaaaatgtgtagctgggcaggatcacctcgtcgccgggctggatgccgcacagcagggcagccatttccagcgcggtggtaccgctggtggtcagcagcaccttgcccgcatggaaccgctgttccatccattcatcacagcggcgggtaaaagggccatcgccgcagattttattgtttgccatggcctggcgcatatagtccagctctgtaccaacctgcgggggaatattaaaaggaatcattgttttactgtcaactcgcaatctattgtaaccatccggccgttatcactgggcgcggacaacatcactttccggcgtttcgggttcaaaattcagccgcttttcttccaccaccagggggcggtccataatacgggcgttcattgccatgatgtactcgcccaaaaatcccagaaaggtcagctgcacaccacccacaaagaacacggcaataatcatcggggcataacccgcagcaaaggtattccagtggatcagctttgccaccaggaacacaagccccaggataaagctgaccgccgcgcagaaaaagccgaagaactccgccatccgcatcccaatcttggtgtagctggtaaagctgagcatggcggcatcaaacaggctgtaccagttgttgtgggtcttgcctgcccggcgcttgggctgggtgtattcaatctccttgcgctcggggccaagctccgccacaatcccgcgcaaaaacggggtggggtcgtgcaaatcacgcagggtttggataaagcttttatcgtacaggccaaacccggtaaactgctcgatcatttccacattgctcatctttttgatggttttgtagtaacagtcccgcaaaaagtacatgacagggttttcctggctggtggtctttttgccgattacaattttgtagcctttttcccattcagccacaaactttggaatcatctccaccgggtcctggaagtccgcgcagatggtaatggtgcagtcccctgtggtatggatcataccgtaataggggctgttgaactgaccaaagttcttgctgttaaaaatggctttgaccttggggtcctgcgcgcagatgtccgtaatgatccggcgggtacgatcctggcttttattatcaataaaaaggatctcatagtcataatccgggcagtccttccgaatctcatcccgcaccgcctcatagatggggcgggcgttctcctcctcgttataggtagggatcataacagagatgacttttttcttctcgctcatgcaggtttcattcctttaagtttagtctttggcccactgccgcaatagccgggcagacccttatcactatacactattttgcaaaataggtaaagaacaatttattttcgcagttttgcgtttcaaagttcaggcttacagggcggtccgccagggtgtagggctcctcgttttccaggcagaaagtcccctctttggcaacgtggcagatgccgcggtaaatttccatagccggggtgcaggcaccgatcagcagcgttgccgccagcagaatggtcacggcatgctgtgcaagcgtaccgtcccgccatttggtgcccaccaaggcgataaagtaccgggcacagagggtcatcaggataaagatagccgggatggacacccgcatgcagaaatcgcacccctgtcccaccttaaagaacggaatgatgaagagcgacacggcgcaggtataaaacagccagctgcggcggttctgccgccagagcagcagcagatagatgccggcatccagcaggtaaaataccagcatgcctttttgcaggctggtcagaacgttttggccaaaagtctgctgcgctgcctggttcccggcgacagtttcgcccagaacgctgtagccaaaggcgttattggccaaaaaataactggccgtaatgctgagcaccacaaccagcaccagcacattggccggggagaacgccgattgcagcacgcctttttgacgctgtgccagcagaacaatgccgcgcaccaccataaaaataaccagccccacaaatgggaaggggccgcacatcaggcaggccgtgcccagcagcaggtagttgcggcagtctttctcctgcaaaaagcagacggttgccagccatgcccccactgtctggttgaacacccagaacaggcaggtcgtcagggagctgaactggaaatcattcgtccaccattccaggtgcatagcgtcataggccagcaggtccggcagtcggctgctgtacagtgcgcccagaatatccatgccgctgaagaaaatcaaaaacagcaggccgatcccctgctttttgccggtatcggcacgcaggtagaccaagaaattcagcgccgccaaataggtgcccagcgccgtccacccccaaagggccatacgggcgaacatccaggcggcatccagcccaaacagggcgtataccggtttggtcagcgccgccgggaccagccagtgcccgatgtaatacaccagcgccgtatccttttgcgggtaatacaccggccagctgtttgtgatcagatcccggtaaatggcgttgcggtaaccccagtccgagttctggtaaaaaaagcccgtctgaccgcccaggtagccccacaacagcatcagggcaaacagcagcaccagctttggcaccgaaagcgtaatgccctgctcttcttgccccacttgattaacctgcggcgttttgcacacggcataccaccaggcaaaggccagcacggccaggcccgcaacggcaaacggcgcgcggagataccccgcaaaaaacaccgccagcggcgcggtgagataggataaggcaaacggctttaacttttggtaggtcaactgcataaatactgtctggctcctgttcgtccatgcgggtcctgcccgcacggacggagttattccttaggcaacaccgcacaattcccgccttgcggcttaagcaccgctccggcagctgcggcacggcatctgccgcacctcgctcgccgtatcggcacttagaattatgcggtattgcccttattggcttaattggtttgcttttgcgtttttgcccacgcaatggtggcgcggatgccatcggcaaaggcggtgcgcggcgcaaagccggtatccgccgcaagctgggtgatatccgcctgcaaaaacatgacctgctgcggcccgtaagggattttgcccaggccaagcggcagggccaggtcgatggcatcacgcagggtctcaatatattcccgcagggggcgggcggtgccgctgcccaccgggtacacggcaccgctgcggccatggcaggccatgcggtacagtgcatccgcagcatcggcggagtaaagataatcccacttctgctcccctgccgtcaggtccgggcactgcccggccagcagtttttggatggtggcggagatcatcgtgttggggccgtcatgcgggccgtaaaccgaaaggatacgcgcccacacatggtccatgcccagagcggcggcctcggtacggctcatctggcctgcacacagcttggccatgccgtacccgttttcggggtttgtgggggtatcggcccgcagaacaccgtccacacggccatactctgcctggctgccggtaccaacaaacacacggcagcccattgccgccgcggtgcgcacggcatcaatggtatagcggatattctcaatctgagccggcatatcattgcggcccgcgccaatggtgtgcgcccacgccaggtggaaaaaggcatccgcctgcacgggcagcccggctgcggccatgcactgcggcaaatccgccaggttggcggcatcgcaggcaactacatacaggtttgcatccttgggcagcgctacggcccgcgggctgccggggcggcagaccgccaccacggtacacccggcctgcagcagccggctgcacaatgctgtacccacggccccggtggggccggttacgattacggttttaatgttacgttctatcatcattcactgctccggcaccaaggggataaacatctgcttttccagctcttcccgcggcaggaacggtgccaggtcctccagcggcgggctgaccagtgtgccgtccggcaggcgcttggtggcgctcttcggctcccagacctgctgggtatcggtaaagatctcgcagaaagtcgggccttctgcggcaagggcggcatccaccacctgtttcatctcagcgttggaatgtgcgcaggaatacgggtagccgaacgcttcggcaattttgcggaactccgggaaggacagatccccgctctccggcccaatgccgatcttgcaatggtctttgaacaggttgttctgggtcaggcggatggagtggtagccgttattgttgatgaggaaaatcttgatcggcagcttatttgtcaggatggtctgcaattcctgcaggttcatcatgatagagccatcgccttccaggcagatggtggtacggcggccgcctgcaatgcaagtgccaatggcggcgggcaggccgtaacccatgctggcaatggcgctgttgttggccatgcggctgcctttttggatgacatacgcctgattgcccaccacgcagcaggcgccgttggaaactgcggtcaggctgttttccggcaggcgggaactgaggtagcgcacaaaggcgtacacattggcggtggtgccgttttcttcccactggcgcggcagcacggcggggtaatcttttttccatcgctggcaggttgccagccagtccgctgcctggctgacaggggtcagcggcgttgcggcggcatccagcttttgcagaaagtccttggcatccgcccacacggggtgctccacatgcagggtgtgctttttcatctcggcgcggtcaatatccaccatgatgacttccgccgcgcgggcccaggttttccagttatagcccacctggcggatggaaatgcgggtgcccacagccagaatcaggtctgcgttctggatggcccagttgccagggcggtcgcccatattgccggcacgaccgcagtaaagcgggttttcgtcctcgatcaggtccacggcgttccagtaggtcacaatggggatgttcagcttttccgccacggcgcggaacgctgcgtacccgccggaaagccggatgccgtatccggcgtggaacaccgggcgcttggcgtggcggatcttttccagcaccatctgcacggtggcatcgtccaccgggggcggcagccgggcatcgtcctgcgccgggtcatagccgggcaggctgtcggtttcaatgtagccgccctgatagttgaccgggatatcgatccacaccgggccggggcggccggtggttgccagatgccaggctttttccagcacataacggatctggttcgggtcttccagcatggtggcgtatttggtcatgggggcaacagatttggtgatatcgtattcctggtcgcccaccgcgcgcaggggcaggccatcggtaaactgcgcggcatagcgggccgtggtatcgtaccgaacctggccggagattacaaacatagggatagaatccagccagccgcccaccacaccggtcagggcgttggtgccgccggggccggtggtaacgcacagggcggcaattttgttatcaatgcgggcgtatgcttccgccgcaatggcacttgcctgctcgtgatggttataggtaacatgcagcgccgggtggtggcccagtgcatcattcagatgcatggcgccgccgcccaccacgctgaacacatccgtaacgccgtgcgccgcaagaaaatcggccacataatcggccagacgctgtttcattgagagtgtcctccttttatttaatccgttcaagctgcggctgaaccattacaaaatacaaagttctggaatcctgcggggcatcgacccgcttgccgctgtagctaatatcgattgtactttcaccaaaaggaatatccacggtatagcggattttcatgttttcctggctgaccacaaaggtctggctactgtcaccgaaggtaatggtaatgctggggcggtcagaaatatcaaagaaataatcccccactgtaaaggtaaatgtgtacctttccgtattcagctgcgggtttaccagtttgatctccgcacttttcttgcaccagtaaaacggcagctctttgttggagttttcaggagtataatattctgtgttataaatgccatcccccagctgcatggtaatagacggcacattatacagcacccacacgccatagaaaacggcaagggaaactgccaatgcccccagtgaagcgccgaaagtaaccagcgtgctgcgcgcagcttttttatctagttttgattgttcaggctttttggttttcagcgctgccaacacacaatttactgcctgtacaacgccccagatgatagctgtcagtattgccaactgtacaatggtgttgcgaatataagagttacgctcttcaaagattggaagcggcagattaaataccatcaaaaccgcaaaaggcaatatattttgacgtgtcatcaccttttcctgtgcaagaaaatacgccagcggaatcagcgccatgcagtaaatatagttgccctggctttggtacatcatagccacggtaatcagcagcaacgcctgccattcctggcggcagagcagagcacacacaaccagtaccgccgccacagcaaaggctgctgcaaaaaaagataccgttgcattgctggttccggcaatcaggtccaccagatgcgccccatgtgcgaacatgctgttgatgccattgcctgcccaaggtgttttacttttacttccaaaagagaacaaaatcttcagccaaagctgcaagccgtacacgccctcctggaaggcaaacaccgggagcaccaacgctgcaatgccataaaacaccgtgcggattgctgctttgaaatcccggtttcttaaaagcataacacctaagaatgcgggataaattttaagtccggctgctactgccagtgcaaccaatgccagttcccgcacccatgcgcgctttgaacggtgatacatgacgaaaaaaagcgaaagtcccgccgccagcaaaataatattgccgcggtctaccgcattaagcacaccaaagctgaacaaggcaaaaaacgtactggccctggcccactgggcattttgcatcacgtcacggagcaaaaccgccagcaaaagaaccgccagcaccacaaaaaagacgtatagcaaaaagcacgactgtgttgtgcgtaaatcagtttctgtgccgcgcatggcaactgacgcctcaaagtcataggtccagttatcagataccgaagcaggcaccagtaaaaacagggcataaaagaacaaatttgccaagggcggatacagtgtgtcaaacaccgcatacggctggcgtccacgaacatattcaatgctatggaaaaaatccatgccggcatccagtgtatcatggtataaaaagtacgaaagaaaatcaccatgggtaacatacagcgttaccataaccacaatggcacacactgcgctgagtacacagtacagcttggccgtttttttccagaacggattgctccctctttcttttttaccaaaaaggccttttccccgtttcgtgttattctctttcagcacgcgctggctgttgcattcattctggccataattcagtcccagctgcaccgatttgttatcttccggcaacagctgatctaatccaatgctgataccagatttattctcgttatttgttgtcatgttgtccatacacagccttgccctatttctgttcccggttatgtatcagatattccctggtttcccatattttttaccgatatattttgcagtcttattttcaacaataaagcaccgccaaccaacctcgttgagtcggatgatggttagggatcccgataccgcacttttccgtgccggataagctccacatcgttgacgggaaacattttgtcgtttatctttccttaaatgtccacaacttgttgatgataaaattcagcggaatcgtgaccagcaaatttacaatcggcgcaatcgttttgctgacgctgaagaacgcaacctctatccaaagcaaaacattagaaaggatcgacgtgccgccgtagctgacatatgtttttccaaggcgtttcagtttactgcgccaatcgtttgcattcccggtaaacacaaacttatcgttccaaaaaaaggcattggcaatgctcagaattgttcccagaacgctgcctaccatatacaggtctgggctgatccacaaaaagatataatacaccgccatcgataccgccgtgttgcttacgccaacaaggccaaacttgataaactgtgcaagcagcgcaacaaattcctttttgctttttgctcccaacagtgccaacaatttctgcat

SEQ ID NO: 286 - DNA, 26013 bp, unidentified
  source 1..26013: mol_type = unassigned DNA
tcatctgtttttcatcgctttgtacatcaaaattcctgcggcaaccgacgcattaagggaatttatctgacctttcatgggcaatgacgctattacatcgcacttttcacggacaagtctggaaatgcccttaccttcgttgccgataacaattgcacacgcacccgaaaaatcacactcgtcataatccgtgccgtccatatctgcgccgtaaacccacacgcctttttctttgagttcatcaagtgtaaccgcaatattggtcacccttgcaacacgcatatattcaattgcgcctgcagacgctttggcaaccgtgtagcttaaaccggcacttctgcgtttcggaataataattccgtgaactccggcacattctgcggttctgattattgcaccgagattatgcggatcttcaacctcatcaagcacaacaacaaacggagcttcgcccctgctttcggcatattcgaggatatcgtcaaccgttgaataatcctttgccgctgcaaatgctacaataccctgatgagttgcaccaccgctcacataatcaagctttgtgcggtcaacttccttaacgggaattttcttgtcacgggcttttgcgaggattcccacaatcgcaccgctcttttcaccctttgcaacaagaattttgtcaatcgggcggttactgcgaacagcctcgcttacaggatttcgccctgcaatcacatcaggcttttgttctgtattttcaaatctttcgtttttcatcataatcagccttattcggtttcctttttattttttgtgtctgcatgggacacaccacttcattttgctatctattataacataacaattcaaattattaaatacttttaagccatttgtttttaaaaactcaaactctgtacaatgtatcaagagcaatcgctccggagtcgatgtattcgggaattatgccgtacattcccgtttgtatgtcctcaaaaagtatcatgtgcggagggaacactgtaaaactgcagtacacggcaatcaaaagcaacatcataaacacgcagggcaaaaaaagctgttcaatttttctttcaccgtattcaagccttgcgctgagtgcaaacgcagaaaaacacacagcaattgcacaaatgaaccttgacagacctgcactttcaacaccgagtgcatagattagcagatatgtcgcaagacagaatattccgacaaaccacagcgaaattattcttgacacggcaaagcgatggaagcccgagcgttttccgattgcctcaacaagactccacacaaggtaggaaagcataacaaccttagtctgctcccacatactgccgtttacagcaccgaaaaatatgccgagcaacgcaccgtttgtcagcgaataaagatttttgaacacaattatcatcagcggaacaatgacaagcccccaaagcctcattttcacggtttcctttttcataaaacacacctcgccgatgtattttatgagtatagattgtcatatattaccttgccacaatttgaatcgcagaaaaaaatgtttttttgaatcacaaatttgcgatttatttttctaaatttgcacttatacattctgtataactcaacattttaaacatcaatgtggaaaactatgttgaaagtgttgaaagtgatgttaaaaaatcccgatactacacgaaatttacaaagttgtaacttttaacattaaaaaaataggttttccacatttttggatacaggattgtaacggggaaattagattacattctgtataatccacatgtcaagtggtattttttgctttttttcaacatttttaatttacagaaaatgttttataaaatcaaaaaaacaggcacaccgccgtgtacctgtaaatttcgtgttaaattgtcggcttttagtttctgagaagatgaatcgccgtttcagctttctcaataatcctcaaatcattatcataggagcacatttttcgtgcctgttgcaaatcaacccaaatataactgtcaatttcctcctcctgaattttgacattatccgtaaatgcctgtgcaaggaaaaagacaacccgtttgcgaattttaccgaaaggacagtattcgctgatttcacgaaagcccttttcaatcacgacatcaagacctgtttcctctttaatttcacggattgctgtctgatgttcgttttcaccgtcttcaatatgtcccttcggaaagctccaatatctgccgttgctgttctttacaagcagaattttcgtgttctgtctgcttttgtagaagataaccgcaccgcacgacttttcgtaaaggcacacaatgcttttcagcttaatatttttcagttttgaaagcacctgtcgcagttcgggctcataaaacacctcaccgtattgtgagattatcggacgctcgccgtcaaggccgtcaaattcggcaacggcaaccacaacgccctcaaaatattctgttacgggtttgtgcgaaatcacatacgcacttttacagcgtcctgaaacggaggtaatttgtgccgaatacagcttatcgcctatttttccgaacacgctcaccttcacgctgtctgctatcatcggcatacacctccttacaagaatttacccgatatgatatcagttaaaaagtccgctcatactgtcaagctgaacctgagtgttggcactcattacaccgttcataaaaagcacctcgtcaattccgttggttttgcagtaatcaacaagattatgtttgaaatatctgaaatcgataacatgaacttcttcgtagttattggtgagatacggaacaaaagcgttgccgtaactttcctttacaacggcaatcttcttgcctgccgccgcatttttcgaagctgatttcagaaccgtgagggcattatcacccataataaacacaccgtaggtgtttgaaccgccctctgcggcttcatagtagggactgttatagcttgcggaagaaccgtctgcctgtgtgatatccattgttacattataagggaacttccaataacttaccgtatcgctgtcaagaccgtctgccgagttggtaaacgagcctgtaaagccgtcaatcttctgttccttgcaatcatcaagcgaaagaacggacaaatcgtttgtatcggcaaatgctgtgtaagcatagtaagcgccgaggcctgtccaatggtggtcgctcttaaagtagatgtaatctgtattatgttccgcaagacggttgtagcagttaatcggagttaccttgtcggaaagagccgcataagccgccttgatgttgtcagcctgtgaggttgacggagcgtcgctgtctttgagcctttgcggaagtcccatttcggtatggttaggaacaatcatatcataaacctttacggaactgccgaacttgtctgcaaagccgttaattgtctgagcatagttctgcgctcttgcatcatcactgctgaacaattcatagcctattttgttccacacataaatgccgtacgaaagagttccgtttgtattgtcgtcctttatgctcggtgtcataaagtatgtaggagaaagctcgtctgctttgttagctgtcgaagattttgcggtttcgtcgggagatgccgttgtacccactgttcccgtgggaacgcttgcaagggcatcttcctttgaacaacccttaaaaattgaagttataataaaaataataacaaacagaattaccaatgcgctcacaacgataacaattctgtttctggttcttcttttgtttcttctttttacaggtcttctgactggacgctgtgatgacggtcttgcggcatagcttgcagaacggcgctgttgctgtctgcgacgatattcacgggaatcaatgctgtcatcgaaattatcaagatcgaaataatcgtaatcgtttcttctgctcatagtgttactctcccaaactgaagatttttaaattcaatttgaattcaatgaattatataagtgtattaattactcgcagtgtactcctgtttgaatcaaagcaagccttgctctgaccgtaaggacattatcacttagattatacaacagaaactcatcaaaaacaatacaaaaagcacaaaaaatacaatttccgtgaattaacatttacaaatgcaaaataataaattacacattttttgaataaaatcgcagtaaaaacagtcaaatttcttgaacatatatgcaattcgtgatagaattacagggtatggaattttaaaaaatccttatcatcttaaaaggagatatttttatggaatacaggttttccgacagggtttcaagcctgaagccgagtgctatcagagaaatctttaaatatgccgccgatccgagcgttgtatcgctttcggcaggaaacccgtcgcccgatgcatttccctcaaaggagattgcggaaatctcggcaaaggtttttgcagaagatccgatttcggttttacagtacagtgtttcggagggttacactccgctgagaaagcaccttacggaatatatgaaaaaggagcataacacaggctccgacgatgacgacattctcatcacaacaggcgcacagcagattatggatttatgctcaaaggctcttgtaaacgagggcgatgttgtaatctgcgaggcaccgtcattcatcggctcgcttaacacattcagaagctacaacgcaaagcttgcaggtgttcccgttgagcctgacggtatgagcacagaaaagcttgaagaggctttaaaagccaatccgaatgcaaagctcatttacacaattccgaattttcaaaatccttcgggtgttacaatgagccttgaaaagcgtaagaaagtttatgagcttgccaaaaaatacggtgttctcatcattgaggacaacccgtacggcgacctgcgttacagcggtgaatatgttccgaacataaaaagctttgatacggacggaattgtaatctatgccggttcattctcaaaggtaatttcaccgggtatgcgtgttgcttacacaattgcaccaaagccgatttttcaaaagcttgttgtgtgcaaacagggcaacgatgtacatacaaatatctgggcacaatatgtatgcgatgaattcatcacaaagtatgacttcaacgctcatcttgcaaagcttcgtgaaatctacacaaagaaagcgaacttctgcatggagcttcttgacaaatactgcgcaccgaaaatcacatatcataaaattgacggcggtcttttcatctggtgtgatttgcccgaggatattgatatgccgaatttctgcaaagaactcgttctcaaaaaggtttgcgtagttccgggcaacgcatttttaactgacgaaaacgaaacctgtcacagtttcagaataaacttttcaacaccgactgacgaacagcttgaaagaggaatcaaaatcctcggcgagtatgcaaacagtctttaatcacggaggggaataatggaaaatcagacaaaaaaagaggttgtattcagcgcaatacagcccagcggaacaattacactcggaaactatctcggcgcggttcgcaactgggttacaatgcagaacgaatacgactgcatttacgctcttgcagatttgcacacaatcacggtaagacagactcctgccgttatgcgtaagaatataattgacgcttatgcttcaattatggcttgcggtattgatgttgaaaaaagtcttttcttcattcagagtcatgttcacactcacgcagagcttgcatgggcgctcagctgttacacacagttcggcgagctttcaagaatgacgcagttcaaggacaagtctgcaaagcacgccgacaacatcaacgcaggtcttttcacatatcccgtactcatggctgccgacattcttctctatcaggctgacaaagtacctgtcggtgcagaccagaaacagcacattgaaattacaagaaacattgcagagcgttttaacggtatttacggcaatgtgtttaagattccggacggtttcattccaaagaacggtgcaagggttatgagtcttcaggacccgacaagaaagatgagcaagtccgatgaaaatgtcaacggctgtgtacatcttcttgatgcacccgaggttataatgaagaagttcaagagagccgttacggacagcgaggcaaaggttcgctatgcggagggcaaagacggcgtaaataaccttatggcaatttacagcgcagttacaggtctttcatacgagcagattgaaaaggattttgacggcaagggctacggcgacttcaagacagctgtaggcgaggcagttgttgaagaacttcgtccgattcgtgaacgctacgaaaagcttgttgcagacaaggcatatcttgaaagctgttacagaaaagccgatgaaattgcccttaaaatcagcagccgcacaatgggcaaggttatgaagaaaatcgggtttatctaattaaaaaggaactctgccatgacaaaaatcgaaagtaaagcgattaactttataaagaaaaacattcttctgtttttactcggggcagtgagtataattgcgattgtcataagagcctgcggaatagattttcaaagcgatgatttcaacagctttttaaattcgtggtggagcataatcaagctgaatgattttacggggcttgcaactcaggtgggtaactacaacattccgtatcaagtcataatctatcttatgactcttttgccgctaaatgctctgtatgcgtacaaaatcgtatcaataatctttgactttgtacttgcaatttcaaccgcaatgcttgtttattcgtttgcaaagaataaccgacggctcaaagcgatactcacctactcagccgtacttctttcggcaacggtgatttttaactcatcgttttgggcgcaatgcgattcaatttacacctcgtttataatccttgcaatactgtttttgcacaaagacaagccgattgcatcgtttgtgttcatcggcgttgcgtttgcattcaagttgcagaccgtattcatcattcccgttctgctttattactggatttcgacaaagaaaatttcgattctgcatttctttataattcctgcggttgatgtgataatgtgcctgcctgcaattattatgggtagaccgtttatcgatatcatcacaatatatgcggaacagaccgactacggaaagcttattcagatgaactgtccgaacttttatgcactcatatgtgacggaaacgatataacatattattatctgttcaagcagttttcggtctttctgacaattgccgtactcggaattatgatgtgcattatcatctataaaaaggttgatttgaaaaaccttgaaacttttcttctgacaacagcgtggactgtgttcacctgtatcatgttcctttcgtcaatgcacgaacgctacggttatctgcttgacattattttaattgtctatgcggcggtaagtgcaaagcatttgtggattccgattgtgtcaacgcttataagcctgagaggctattgctactatctgttctcctacgagcttgtaagcctcaaggtgaccgcaatcatctgcaccgcactttatgtttatataacattcttgctcgtaaaaacaattttcagagcaaaatcatctgataatatttttgcaaaaacaatttaaaattaaacatattttaaataacaaacaaccgccaaaatccattatatcgggttttggcggttgttatttttatttattcaatgatttttaatttttgcaaatacaacagcaacaagaaatgtaacaaattctgtaattgggaacgcaagccatatgcctgtcatttgaacagcgctgtttaaaagccaaattacggggactaacagcacgccctgtcgcaacagttgaactacaacgccgggcataatactgtctgttgcctgttcataggttgcaatcattgcagaaaagccgctgaacacaaatccgagtgacataattctcattgccggcactccaaaagcacacatttcttccgacgccgaaaacaaaaacaatatctctttcgggaaaatcagcaccaagagcataccgacaatcatcataacagtcgctataattgttccgctcttatttgcttgtttaaggcgaccgtactcttttgctctgtaattaaaccgcattataggcaaacagccctgaatcagtccgttcaccgtcataaaaatcaactgctgaaccttgaaatatgctccgaaaaatgcaaccgccgtgtccgaatatcgcaccaaaaacatatttgcaaaattcacggtgaatgctcccaacgcattcataacaaacgagggcaatccgtaggaaaatatcagctttatcatctgcggttcaaggcagtttttaaacaccggcttaaccttttgttttgtaagaaacagctgtatcaacgcaatgattgttgaaacaacatagcctaaaaccgtggcaactgcagctccgaccacacccattttcggaaacggacctatgccgaaaatgagcaaagggtcaaacacaaaattgaatacaacacctgcaatttgaaaccacatcggagcaatcatattgcctgttgcctgaagtattttttgaattacaatatgcaccatatttggtatctgcataaaaacgcagacgctcatatacgcaattccgtattcaaaaatctctttgttttgcgtaaaagccgaataatagggatttattatgaaaagcgaaaggaaatttatcagcactccgacaactaccgaaattaccactccgagagccgctgcagaatttgccttttgctgatttttctgtcccaaataacctgcaatcaaaacattaacacccacacctatccacacggacaacgcattcataagcgttgtaatcgggaatgcaagcgatactgccgcaagtgcctgttcatttatccccgcaacaaacatactgtcaacaaggttgtatgaatactgaaaaaacattgaaatcagcggcggtgccgacatttgaattataagtttgttgacaggttcataagccattttattttccgttttaacgcccatattaacaccccttgcgtaaaataaaaatcgccatacacccataatgagtgtatggcgaaaataagaatcacatcttagaaaaatccataccaatttatatttatcatatcaatgagttaagtatatcatacctgtaaaaaatattcaagattatcaccaaaaatttactttttgctttcaagccacatatcaagggctttttcgtagacatcaatgcttgtgattccgagattcataatgaatgtgtgatattcctttgcgtcaaagcttgagccaagctcgctttcggctgtttcacgcatatcaatcatcttgaggtagcctacggtataggggagaaaataacccggatttgaacgggcaaggtcatacgcctcttttgttgcggcagtaacgctctcatcgtcagccgaaccgagtgccgttgacatatactccttgactttttcataatcccagccgttgtagttcacaccgacatcgaccatggagtagagaatatagccgagaatatcatttgcgtagataagcttcttaatgccctcgcttgtatcaaggtaatcaagcgtacatttcgaggcatactgcgcccaaccctcggttgcgccgataaagcttaaaatcttgcggacattcgggatatccttgtttgcatttgatgcggtaaactgataaagatgaccgggatagccttcatgggcaagagttgtgtacatctgagtcatacccttatttgcaaagtcggggttgattttgatgatattaacgcttgtatcgtcaattcgtccctgaacatagtacgctcccacattgtcgctctttgcggaatcgctcatataatctgccgtgtaagaggttgtaacgggagtcggaaagtcctcctcgatattctcaatcaaaaattcaagcacctcatcggcgtccttaaagtcgggtttgtagtcctgaaatttgctcaagtcatcctgcgaaacattgctcatgctcattccaacctttgtaaagctgtttgtaaggtatgatttaagctcctcgggagtcatactgctacttgttttgtctttgacgattgccgaataatactttttgccgattttgccgtaaccgcaaagaccttcttcgtttttgcctgattttttgagacttttaagtgctgaatttgctgatttcaaagcaggaatgtagtattcttcaaaatactttttattggtttcgacaacagtctttttctcggaatcgctaagaccgagtgactttattctcgattcaaactcgtcaacaagcacggacttgtcattcttaatatgcttttcgcactcgtcaattgactgctgtgcaatatcttcagccataaagtaaccgtcctcagcctgtttccttgtgaactcaatgcactcgtccatatagcgttttgtgtccttcaaaacagcaaggtaaaggtcggtatcatccttttcatagaaagtgaattcggacagggtggtaaagaggtttgcaataattcccgactgcggtgcaaatatactctgcaattctgttgtaccctcatatgaaagctgaatttcaaagtagctttcaagggtgtcatatgtctgcttttgagaagaagtaagtcccgaacggtcaaactcctccaaatccgtttttgcctttttcagttcatcaaaggattcttttgtatcttcatcggacacatgaccgagggtatagtcctcctcgtcatatttcagaccgtagtccgacggatttgaaatatcaaaatgtgcggtaagagcgtcatcctcaagttcttccgaaaacaaatcgtcacaatatttatcaaactgaatttgtgcatccgttttggttggttctgtgttagagtcaaagtcacaggcacagacagaaaatgccataacggcacataacataacagcaagcgcacccttgagtgactttttatttataattttcttcattttgtcctccgtaaagattgttgtttaccaaagtataacatattatcgtgctgttattcaataattatttttcattttacccttttccgcagtaaccgtagcaacgctcaacaggcattgccgttctttttcaacaattgttgaaaaccatgtggaaaatgtgtataataatcagccctgctcaattgtatttttgtaaattgtaaccatttgtaattatttgtaattttctcggataattgagccaacaatatgccggaaccgtaaactcgtaggggtagccttgcgactgccgcctgtggcggataatatccgcctctatagatttgtacaaacggttgcaatgttacgcccgggcataatatgttttttacattacaaactgtctgcccgacattaattttcaattttccattttcaatttgaaattcgttctatcgcttcgcttaaatccgtacacaaaaaatctatcatcggtttaatttcgtctgtcggctctgacaaatcgggaaccataaccgtggtcatacctgcggcatgtgcagattttatgccgttaatgctgtcctcaaacgcaacgcagtccaccggctcaagcccgagcttctttgcggcaatcaaaaaaacttcgggattgggcttgccgttttttacatcatcaccgcacacgaatgcgtcaaatttatcatagagattgattttcttcataatcttcaaagccgtttgtgacgaggttgaagttgcaagcgaaattttacaaccgactgattttaaataatcaaaaatttcgtacaagcccttttttacaggcacaccgttcttttcgatacgcttaaaatagcggattctcgactccgccttgtaagcaggatagtcaaaatcatcgccgtaaaccgacttgtaatattcgtaggaatcctcactgcgaagtccgattgtctttttgaaaatgtcaagattaaactctttgccgtcctcatcaagcatttcctgccagattgaataaacaagcctttcgctgtcaatcataagcccgtccatatcaaaaactgcgcccttaaacataaaaccgccccttttttcgcttttaagtctgtatataatagcatattttacaaaaaaagacaaatcggttgtaattgcgacaaagttatgatacaatcgtttaaatggtctgtgaaaaatataaatttgagggtaaggaaattttatggcaacatcaatttatgcaaaacctatcaaagcaaaaacgattctgaagttcactttgccaaccgttcttatgatggtttttatgtcactttacacggttgttgacggaatcgttgttgcgaactgtgtcggaagtgacgcattgtccgcaatcaatattgtatatccgttcacgctcgtatttatggctgtgggcttaatgttttcaacaggctcaaatgctataatcgcaaagaaaatgggagaaggcaaacaggaggaagcaaaccgacttatgtccggtgttgcaatcacggcaacggtcatttctgttatcattgctgtgctgttcacaatttttgccgaacctatgtacatgatgttcggctcaaacgaaaaaattctcccctactgcattgactacggcagcgttatgattccgtatggctttgtaatgtgctggcagatgctcaaccaatcgtaccttgtaacagcagacaagccacatatcatgcttgttttctcgatactgtcgggttgcacaaacattgtgcttgacattctttttatggctgtgtgggattttggaataatcggtgcaggactcggcacaatcatcggaatggctgtgggtgcaattccgcttttgctctttttcaacaaaaagcagactctgcactttggcaagcctgaattcaaggtaagtgaaatcctctttgctatggcaaacggctcgtcagaggctgtgacaaatctttcaacagccgtgacaacagcgctgttcaacattcagatgatgcactttgcaggcgcaaaaggcgttgcggctataagtgctattttgtacattcactttattttcactgcggtttcgtttggattcacttcgggagtttcacccgtcatcagctttaactacggcgcacaaaatcacgaaaaactgcaaaagctgttcaaattatgcataaaaatcacgctgataatttcggttgcaatgattacggcatctgaattttttgcagaaccgcttgtcggaattttctcggcaggcaacgaaaaaattcagcagattgcactcagcggattcagaatttttgcaataaattatctgttgtgcggaatgaatattttcgcatcgggacttttcaccgcactcaacaacggcaagatttcagccgtaatttcagttgcaagaacgcttgttttcgagtgtgccgcaatgctgattttgccgatgtttataggcataaacggtgtatggtcggcattgcccgttgcagaattgtgtgccgttgcaatttccgtaacatttataattgccaatgcaaaaaaatatcatttggtaaaagtttaatatatagcgatacgtagcggcgatcagtgatcgccatttgatttggctgcaaagccaaatcaaccatacaccaatattttgaaatacggtcgaaccgattttgcaatcgtttcgattggcgttcactgaacgccgctacatatttggattcacaccaaacaaaaagtccgaacattttgcgtgttcggacttttttcatagattaaattttcaacgattaaattttaattaaaatcagattgcacgaactctgattacgccgtcaactgctgcgatttttgcaaggtcatctgcaccggcgcctgcaacatcaataattgtgtaagcatagtcgccacggctctttgaaagcatattttcaacattgccgctgatctgtgtgagaaccttcttgagaagctcgggaacattcttgtgagcaacgcagaaacgggtatcgtcagcatttgttcttgcaagtgaaattgcaggatagtttacggagttgatgatgttaccgttctcgagatactccttaacctgatcacaagccataacagcacaattttcttcactttcgggagttgatgcaccgaggtgtgggaggcagataatattctcttcaccgaggatatcgtctgttccgaagtctgtaacatacttagcaaccttgccgctcttaacagcctcaagaactgctgttgaattaacaagaccgtcacggctgaagttgagaatacgaacaccgtctttcatcttggcaatcatattggcatcaaccatatctcttgtgtcatcagtaagcggaacatggattgtgagatagtcgcaatttaccataacatcttctgcgctcttcatgagcttaactgtaggagcaagcttgagagcgttgcctacagacataaacgggtcaaagccgattacattcataccgagagcaacagcggcatttgcaacaagaataccgattgctccaagaccgataacaccgagggtcttgcccttgatttcgggaccgacgaactgactcttgcccttttcaaccatcttaccgacagctgcaccgttgcccttgagagtctttgcccattcataaccctcaataaccttacgatttgaaataagaagtcctgcgataacaagctccttaacagcgtttgcgttagcacccggtgtattgaacacaacaataccctgctcactgcacttatccttcggaatgttgtttgtgcctgcgcctgctcttgcaattgcaagaaggttatcggcaaattccatatcgtgcattgcggcacttcttacaagaactgcgtcagggttctgaacatcgtcaccgtatttatagttatcaccgagacggcttgtgccgatagcggcgattttgtttaatgtaagaatgttatacatcaaaatcaatcctttttaattttttattttaagaatttacaataacaggcgaacagcgttcgcccgttatatcataatattcaataattacttgttttcagcctcgaacttcttcataaactcaacgagtttttcaacgccctcataaggcatagcgttgtagattgaagctctcataccgccgactgtgcgatgacccttgatattaacaagaccgttttcagtagcctctttaacgaatttagcgtcaaggtcagcgtcacctgtaacaaacggaacattcataagcgaacgatcctcgggaacaacagtacccttgaaaagctctgaagaatcgaggaaaccgtagagaaggtcagccttcttcttgttgatttcatacatcttatcaagaccgccaacctcgttcttaatccactcaagaacaagctttgcaatgtagattgtgtagcaaggcggtgtgttgaacattgaaccgttgtcagcgtgagttttccagttaagcattgtaggagtgatatccatagcgttgccgataagatcctcacgaacgataacaaccgtaagacctgccggagccatgttcttctgtgcgcctgcatagagaacgccgaactttgaaacatcaatcggtcttgaaagaatacaggaagaaatatctgcaacgagcggaacatcacctgtgtcgggaagctcgtgataaacagtaccgtaaattgtgttgttcatgcagatgtagaaatagtcagcatcctttgtgaatgttgaaggatcaagctttggaatgtatgtgaaggtcttgtcagccgatgaagcaacaacattagcctgaccgtaacgggcagcctctgcatgagcctttttagcccactgacctgtgataacataatcagccttaccgctctttgtcataaggttcatagggatagccgcaaactgtgttgacgcaccgccctgaaggaaaagaaccttgtagttgtcaggaatgttcataacctctctcaaaagagcctcggcaccctcaatgattgtaccgtaaatttttgagcggtgtgacatttccataacgctctgaccactgccttcgtagtcgagcatttctgccgctgcttttttaagcacagactcaggcagcattgaaggacctgccgaaaaattatatactcttgccatttctgatatctccctttttaaagaaaatttaaaaatatagttgtaaaaataaatacatttaaattatacgcttttagcacgctaaagtcaataaattcatagcactaaagcataaaaaacgaaaaatttcgtgattctgttgtgcaaatgaatcagccaagcttaattttgccgatgcaaccaacgatttcatctctcatacgctcagcctctttacgagcggcaacggcaaaatcatcttctgtaagcccctgctttttccatgcgcacataatgccgcggcttgagttgatgattgcaccaagaccgttttcgtcaaatgcgtttttaacatcatcggcaccgccgccctgagcaccgtaaccgggaacaaggaagaatgtgtgcggaagttttgctctcatttcaccgagctgttcgggatatgttgcacccacaactgcacctactgccgaatagccatgcttacccataaggtcttcgccccagccttcgcacatcttgcccatatgctcataaacgctctcatttgtttcaagcttcatatcctgaagttcgcccgagcttgggtttgaagtttttacaagaacaaaaatgcccttgtcgtccgaatcgcaaatttttgcaagcggcttgataccgtctgttccgaggtagccgtttaccgtgagtgcgtctgcaccgaatgcgtcaatactttcgcctgcaacatctgtatgaccgaggtgtgccgtagcatatgcctccatagttgtgccgatatcgttacgcttgccgtctgtgataacgaacataccctttgactttgcataagcgattgtgtcacaaagagccttaacaccctgccagccgtacatttcataatatgcagcctgtggctttacggcaggaacaatatcataaagtgtgtcaataagcgccttgttgaattcaaaaagtgcagcagccgcaccctcaagcgtcttgccgtacttttcaaagcattttgttttgattgattcgggaacatagtcaagcttagggtcaagacctgcaaccgtaggattctgcatttttacaatattttcgataagtctgtcaaatgccatagtgattctcctcattttttgttattctttctatggtcgggcaaacaattcatatcccgactgcaatatcttttttacaatgctgttgttcgcccctacgaattattattttttagctgttgataatatcataaagttcatttgagaacttgtaataatcctgtctgtcctcttttacaaactgaattgcaggacggggatgtgtgttgtactgacctgtgagaaggtacggaatatcgtaaccccacttaacgccctcagccttaaacttgtgggtgtactcctcaatgattttgagaataggagcaacctgatacttcgggttcttgaggaaaccgagaagaagttcaagtgcacagttgcctgcgcctctgcccatgccgtcaacggttgcgtcaaggtagctgacgccctgagtcatagcctcaattgtgttggcaaaagcaagctgctggttgttgtgagcgtgaataccgaccgacttgccgtacttgtcggcaattgagcagtaaaggtctgcaagtcttcttgactcctcgggatagagtgcgccgtagctgtcaacaatgtaaaaagcgtttacgggagttttggcgagagtttcaagagccgctgtaatatcctcggttcttgcctttgaaacagccataatattgatagttgtttcgtagcccttctttgcagcgtcctcaatcatttcaacagccgcaggaattgcgttgatgtatgttgcaattctgatgaggtcaatcgggctgtccttctttgcgataatatccttcttaaaatctgttctgccgacatcagccataacagcgattttaagaggagttttgttgtcgcctacaatttttctgatatctgcatcgttacagaatttccacttaccgaaatcttcttcgttaaagatttcctttgatgccttgtagccgaattccatataatcaacaccggctttaacatttgcattgtaaagagccttgataaatttgtcgtcaaatctgaaatcgttacaaagaccgccgtcacggattgttgcgtctactactctgatatcctgtcttaccgacaggaggtcacccttctgtgccataattttactcctttatgttaaagtttatattaaattaaatgtattttgtatggacgaacacggttcgcccatacagcaatttgtttattaaacaaactcaatcttcaaaaactaccttaccgccgaggattgtctttttgactttacctgtgagggttctgcctttaaacggggtgtttttgcttttgccgtgaagtttaccagcatcaactgtccattcttcatcgggatttataagaacaacatcggcatttgcaccgactgaaagagtgcctgcgttgattttcaaaatccttgcaggattaacactcatcttctcaacaagctgtgaaagcgtcattctgcctgtcttaaccaggtatgtgttgcagaccgcaaacgaggtttccatgccgattgaaccgttgggggcttctacaaaatcagccttttcctcgggggtgtgcggtgcgtggtcggttgctatggcatcaagtgtgccgtcacaaagcccgttgataatctcgtcaacatcagcctgagttctgagaggcggattcattctgtaatcagcgtcacctcttaaaagctccctgtccgtgagcgaaacataatgcggagcggtttcggcggtcaccttaacacctctccttttggcatcacggataagtgcaacgcttgttttggtgctgacatggcagatatgaataggctcgttaagagcggcggcaagtgcaatttctcttgcagttccgcagtcctcggcaccggcagggattcccttgacaccgagctttttcgaaacctcgccctcgttaattttaccgccgtcggcaagaaacaagtcctcgcaatgtgcgacaattgtcatgccgagctttggagcttttttcattgcgtcactcaaatactttgtgttttcaacaggtctgccgtcatcggtaagtgctattgcacctgcacttttcacagcgtcaatgtctgtgggttcttcgcttttaagccccttggtaacgcttgccgcaacataaacacggctgtcggcgtctttagctttgtcaagaatatactttacaatttcggggctgtcggttgtggggttggtgttaggcattgcaagcaggcttgtaacaccgcctgcggcagccgccttgcatcccgtgataatatcctctttgtgagtctgaccgggatcacgaagatgcacgtgcatatcaacaaatcccggaacggcacaaagaccgtctgcatcaataatctctccgtctgatgtaatgccgctgccgatttcggcaatcacaccgtcctttatgagaatatctgttttttcgttaagcttgtcggcaggggaaacaaccactgcgtttttaattagcatttccatgtttttcctccgttaagaaaagaaattatcttctcttgtttctgtttgcagggtggcgattctgctgggggcggcggtcggttctgctgtgaacctgaacaagtccgtcactttcgcctctttcggcacgcattcttgcacgctctgccttttgtctttctctctctcttctctcttcctctgcctttttgcgtttggcaattgcacgcttacgctttatcattattgaaacattcttgcagaaatatccgcagtgaatgccaaaattcttaactccgcctgcaaagcccctgagagcgttaccgatgtttttgcctacattggcaagaacctcttccgttgaccgtttatcattcggttcaccctcggtttctttattattctctttttcaagagcgttctgctttacggtttctgcttttctttcaacctcgccgataacatcaacgtcctcggcatctctgaggtctgagcttttgataacccccattgactttttgggagcttcgtcaaaaaagtcataaccgctgtcaaacttgtttttcttagcctttgcccttacaagctcctcatcatcaacctcttccccggttttctcctcgggatcgtcactgccgaaaatgatgtttgcgtacttgtcaacctttttttcaagcggatgcttttgttcggaaacctcctcggtttcttcaacatcggcatcgtcctcacggtcgatatcgtcaggctcgcttgtttcaaaaagatcgtgttcgggttcggggataacgagtgtaggacccgacgaagagcttatgtcctcgtatttttcaggtgtttctgcgttatctttttcgttttcgtcaattttttcgggttcagtctctgaggtatctgctgcggtaggctccttttttttttcgtcctccgtgctgttttcctcgtaaccgtagttgtttttatatgcctcacgctcaagctcactcttgtaagcctttgcggagttgattatctcgtcaatttctttttccttggcatcatccgtgtcataaccaaagtttgaatactcacttgtaatttcttccggttcttccatattttcgattatcggctcgggagcatatcttctgcccggcaaagccggttcttcttcaacttcttccgcatatttctgctttttctttgagcgtttatcgggcttttcgggagaatcgtcaaaattgtcgatgtcgtagtccgtacccttttcaccgagtttatacttgactgcaagctcctcaagaattgcgttattcttcttagcctttttatgctttctgattctcacggcaaaaattatgatgagtacaatcaaaataaggataacaacaccgccgccgatgattatgtacggaataaatccctttgaaaacggcaggtcgctgaattttaccgaagatacaactttggaaaaagtatcgtagtcaacggttgtaacatcaccctctgttctttgcattgtgatattaatgttcataccgtcataaaccgtgttggcaacaaaggttttcacatcgcccttactgctctgagcagttgcgtcaaacacaagccacacagctttttctttttggtcgggagtacagctccgatactcgtcggaattaagaaaattgttgcgtatatttgaaagctcgcttgaagaaagctgagcatagttgccaacattctcgctgctctcattttttgtcattgtcacggtcagaataaccgatgacatattatccataccctgaagatagatatttccgttctgaaaggttttcattgttgtgtcataatcaagaccgaaaacggaaaaatatttatctgtgcttttactgtcccttgtaacagcgctcataccgtcaggcattgaaagcgtcatatcgtcaatctgcggaatctcgtaatcttttgttgcgcccgaacaggcaaaaataccgcaaaataccgttacggcacaaattgcaagcgttacagctcttttaaaaacagttttcatcatgtccgtatattcccccgaaactaaattagattcatcaatactgctttttagaatgtatatctaattaattatacataatctgtcaaaaaaatacaaggtttttaccgcttaaatttgaaaacaagagtaccctattcgtgaatgcggtatgatattaaagaacatattacgcctgagcgtgcataaaattgaaaattgaaaatggaaaatggaaaattatggtcgggaagacaattcgcaagaatgcaaaacattgtcgcccgactgtttttgtatatttttgttatatacggaagttgttgcaaaactgtatgtacggatattatccgcctgcagataaccacgcaaagatttgtacaaattaaaattatataaataaacattcactttcatataaaacaaaaattgcatcaatgccgtatcgggcatcaatgcaatttctttatctgactatcttctcgaattgactgcggtggcacaccgccaaccgaaattttacattttcaattttcaattttcaattaaaaacaagactgccgtttattctacagtaaccgacttagcaaggttctttggcttatcgggatcaatacctctgttgattgatgtgtaataagcaagaatctggagcggaacaaccgctgtaatcggcataagaagctcgtctgtatgcggaatttcgataacataatccgcaacaccgtccttgagttctcttgcacaggcgtctgtacaaacaagaataacttttgcacctcttgacttaacctcaacaacattgctgattgtcttggggataatacctgtctgagttgcaacggcgataacgggaacatcctcgtcaataagcgaaattgtgccgtgctttaactcgcctgcggcgtagctttctgagtgaatgtacgaaacctctttgagcttgagcgaaccctccattgaaagggcatagtcaagacctctgcctatgtaaagcaagctgtcggttgcaacaagctttgtggcaacgaacttgcagatatcctcgcagttgtcaattacatactgaactgcctcaggcatttttgtaagagccgaaacaagtcgcttgcactcggctgtgctgattgtttcctttgcaagagcaagctcaaaggcaaagagatacataacggaaagctgtgtgatgtatgcctttgttgacggaacggaaatttcgggacctgcaagtgtgtagatgagcatatccgcctcacgggcaattgaactgccctttgcgtttacgattgcaagagtttttgcacccttctgctttgcaagacgcattgcggcaaggctgtcggctgtttcgcccgactgtgaaataatgattacaaggtcgccctcgcctacaatcggatttctgtaacggaactcggacgcaatgtcaacatttacgggaactcttgcgagatcctcaataacatacttgccgaccatacctgcatgcatggcagtaccgcaggcaacgattgtgatatttttgaaattcttgattgtttccgttgtgatgccgcactcctcaaggaacggaagtccctctttgattctcggcataatcgttgttctgatagcctcgggctgttcgttgatttccttaatcataaagtgcggataaccgcccttttcggcagcctccatatcccagtcggctgtctgaagctccttttcaatcggatcaaggtgttcgtcaacgaacgaaacaccgtcaggtgaaagtgttacgatttcatcatggtcaagaagataataatcccttgtgtactgaagaattgcaggaacatcggacgcaataaagcactcgccctctgcaacgcctacgataagaggactttcacggcgaaccgcaaaaactctgtcggggaaatccttgaacataattccgagtgcaaacgaacccttaagctcagccattacactgtcaattgtttcaagaggatttccgttgtatttatagtcgaggagctgagcaacaacctctgtatctgtgtcgcttaaaaaagttcttccctttgagatgaggaagtctttaagttccatatagttttcaataataccgttgtgaacgattgtaacccttgtaccgctgtgtggatgtgagtttacatccgaaggctcgccgtgggttgcccaacgggtgtgacctatgccgacatgacctttcggagtgccgacctctgcaagcttatcctttaagtcctgaagcttacccttggtctttacggtcttgatttccccgttatcaaaaaccgcaatacctgccgagtcatagcctctgtattcaagctttgtgagagcattaacaagcacctcactgcaatccttaggtcctacataacctacaataccgcacataaaatttctccttttcggttaatcattgaccttgtggcaaaaagtaggtacaagttctgccaaaagttcaactgtcttttcactgtcattgttttctgcggtttttttgagaacctcaagctttgacagcatatctgtttcgtctattttaatttgatttcctatgaaaattttcttgttctgtgttgacttaagaccttcttcgtccataagaagctcctcaaaaagcttttcacccggacgaagtcccgtgaaaataatcggaacatctttgtacggaaccttaccgtacattctgataaggttctcggcaagggttgtaatcttgacgggagcacccatatcaagaacaaaaatctcaccgccctttgccattgcacctgcctcaagaacaagcgaaacagcctcgggaatagtcataaaatatctgataatatcgggatgtgttacagtaacgggagcaccgttttcaatctcacggcgaaacagcggaataaccgagccgtttgagccgagaacattaccgaatcttgttgttacaaattcggtatcggtgctgtgctgcgccttgtactgaataatcatctcgcacgcacgctttgttgcgcccataacatttgtcggattaacagccttgtcggttgaaatcataacaaacttctttgccttgtacttttctgcaagggttgcaacattgaatgtgccgaagatgttgttctttacagcctcctcgggaacggtttccataagcggaacatgcttgtgagcggcagcgtggaatacgagttcggggcgatatgtcttgaagataagctccattttgtcgtaatcacgaaccgatgaaataagcgttacaaggttaagctttgtgccgtattcaagcacaagctcctgctgaatgtcatatgcgttgttttcgtagatatcaacaatgatgatttgtttcggatcattctttgcaatctgtcttacaagctcactgccgattgaaccgccgccgcctgtaacaagacaaatctttccgttgataaggtcatgaatctcctttcggtcaaactcaatgggttttctgccgagaagatcctcaatcttgatttcctttgcctgtgaaataagctgtgtatgcccgtcatcaaacaaaagctcaccgagataagggataatcttgattttgcactctgttgcggaacagtagtcaagaatcttcctcttctcatcttcctcacatgacggaagtgcaacaatgatattgtctatgcggtattcatcacatattttaacaatttcgggacaggttccgacaacggggattccttcgatcttctgattcagctttttcaaatcatcatcgacaaagcataccggaatgatgctttttgaaggattattaacatcaccctgctctttcgcattgtgaatttcacgaacaatcattctgccggcattgcctgcgcccacaataagggtgcgctctccgccctctgcccttcctgcctcggtaaggtcaagaaaagcccttctgaaaacaaaacggaatgcaagaattccgacaagggctattgcgaaatgtactatacaaaaaatctttctctgcggaatctgcaaaaacaacgagattacaaagccgagcgtaaaccccgaaaagacggcaattccgcacaccatatagtcctttgcgttaaagtatcgccacaattttgaatatgttccgcttatataaagcgtaaacagacacatgacaagatcaataacaatatagctcaacaagcctttgcttgaagcagcacctatgtagccgacaagcaagagaatataatttgcaagaataccgctgacaacgataataaacacatctgcgagagccagcaacatcttacgcaaattaatcttcttcat

SEQ ID NO: 287 - DNA, 14079 bp, unidentified
  source 1..14079: mol_type = unassigned DNA
tcagcggaacaatgcctccccgttcaccggttccccgttgtgggtcagagcaaagtatacgttgcttccttcggcgctgtagtatttcgtgggcgctgccacactgccgatggtgtcgccgggattcacataggagttctctttcactgtgatctccgtcagctgtccataagtggcctcatagccgtcacccagatccagggtcaccgccttgccgatctcctcattttcgaagatcgaagtcacttttccctgcgcacaggcggtcactgccgtaccttcttccgcggaaaaaatggtggcgggattgtatttatactgatccagtgtagcaaaataagtgctcttgtccatagagtaatgcatcagaatatcactctgcaccggttgctgtaatccgtcgctttctgcaaagtgcagtgtcttctcaacgaccacatccccgcctgctgtctgctttcccccggtctcttccttttgtcggtcggcatcggaattctgctgctctttctgtgcggcctccagcagggtctcctgatccgtcagccccggaatctctacgttgccggagcctacctcctggggcatatagtccagatcatcctcggtgacaggagttcccgcgatctcatttcccgctgtattatttgccgtcagtccggggatgttctcgtcctccttcagaagatgttcgtcgttattctccgtgatctcctgtaatttgtcatccgcattgttgggaagcgcagtgaagtccaaggtataaccatcatccctggactccacattctgccccttcatatagacccctgtcatggtcaatgctgccagtacaaaggctgaagaggctaacattataatacgttctttgttaataccgctctttttatttcttctcatatcctatccgcatccttcctgttccctgagtcaactgcctgctatacaatcgtttcaaccactttccctggtttatcctatagtcttgcccgattcatgggttttattcagaatgtcttcgatatgaaatttgcatttatttggaactattcagagccatgtaaatagcgtcgaatgtttgcattcgtaagaacatttgatgctatttatagggcgaagtaactgaatagttatatttattctatgcctgtgcggcataggcagccatatccacgtgctgtaccgtacccacatttccgttttcgtataagaaaataccggtcttgcggaccacagcattggtcgcattggcattggtagtgccgtcctgagccttacggtctccctgcagggtaaaatccgtagaaacgttttgcagacagatagcaccgacacccttgtcagaaagtttgtacagtacgtcgttgccgttttcatccttgcaccagatttttaattttgaccagatggaatcgttctcatcgatccagccgttgccatcctcatcatactgcgccagatctgtaaagccatccccattccgggtgccgaacagctcactgccgtcgttgatagtgccgtcaccgttcttgtccagtgccagatagccgctgccattcagcacggagatctcttcttccttgccatcggcatccagatcaaaataaaaggtctgatccgacacttctgccacatcagtatccaggttgatcaccagcggatcatggagcgtgaattctgctacattgagttgctctttgtagtattcctcgcatctgcggctcatatttacatttacattaaaattgatctctctgccatccttggtccgtacgcttcccacggtggaaaaactggtatcctcctgttctatgttccaggtctcgctcacatagttcaatattttcacacgggacgtgaccagattgaacacgtctgacgcaggtgttgcggttccctgtgtgctgccggaattcgtctgggtattatttacgctattccctgtattccagctgtttccggtctgattaccgctgctccatccgttttcctgcatccagtcccgcaaagtgctgttcctggacgggaataataaatcaaaaatataacgcaccgtatattcccggatggtagacaatgtctgttcactggcactgcttcgcatatcccatctggcagaagataccagcaaacgactctgccagtctttggctgtcatcgtggtgttctctgcagtgttctcctgttcctccgtgttctgtgtggtatcctcaccattcggtgtcttctgtcccttagtggatacatctgtcagacctgcctgataatccgttatctcaaatcgtctgacgcttgtcttagaagcgtgatagcttctggcggaatccattcctatgcttgcggaatcaattctcaaatctgtaattttctcctttccccgacctcaccacgaaccaacagggcgcgcttcctgtaacgtttaacagttcaccgccgcatgtattcataaaagcgcctgctccgcagtcgacgccgctaagcggctcatcttttatttcatacatgcggcgctccgctcatgcaatatcatatgttctgctttgtgtgccagcatccacgcagaacatatgatattgcatggctgaactgttaaactaaaaaaagatggtaaagaaacagaatacatataatatgcctctgtctgattaccatccgtggtgtcattatcaaactgtaaaaaataagtagcaggaagtgactggccttgtcacctctctactacttatatcgtccgctatggacattttatttagtgttaatttactgctgtttgggctgagtgggagcgccaggggttccgggtgcgggaggcaccggtctgccggctgctttcagctttgctgcgatcatgctggctaccatttctctggtcaccacgatgttgccaccgaagggattgatcacgaatcccagcgccgggctgatattgccctgtgcatctttgcgcagcagcattcccgcataatcgtcaaagttcatggcgaaagtctgctgattctcctcatctctccacctttttagctctgtccagtcagtgaacgccatgaagaacttccgaccgtcctcggtggacagcatcgggaactgtactttggcatctcttgcgatggtcacccggccgttttcatcgggcacaggcaccggatcgatcacgaccggagacagtaactttgctttctgcagttcatccaggaacatctgtctgtgttccggggtgtcctctgcttttaataattcaatggatcccaccatcatggggttggataccggtttgttaaattccatattttttctccttacttctcattgtaactattcagcctctcttcgcgaaacgcatctgcgatggttcgtcacatgtctctgaatagttacactcggttatagttgatcaggcatcccttcagtatgatctgacgttcttcgtcggtcagctctcccagcttcagggtgaattccttcatgccttctcctgttgttaccacatatgccttaatttcctcggccttgtcttccacggctttcttaataccaggaatgaacaggtaatccagattcttgaaaggcaggtctccgggctggatcaggaaaggaagcatgccccagttgatcaggttggaacgataacgcttggtggcatactcgttggcaatatttgcccagccgcctaataccttctggcaggaagcagcctgctcacgggcagagccgtctccgggcttcactgcgaaaatagtggaaccgaatccggtgttctcacgacttgcatcgggatactgtttctttacttcacccataacatccttcagtaccggaactgcctgacagggatgtccgccgttcatacgctctttctctgccttctggatctccttggcacgtcctacatactgcggatccttacggcttaaagtgaactctgccagtcccagaggattggagcggtaggaagaggtctcaccggatggaatcagctcatcggtagtagttacgggatcgtggatctcggatactacctgcagtaccagattctcaggtagggcacccatagcgggccagtccttgatattggggccgaactggatctctacgctctcatctgccacaccgtgggaatcgaagacacggttcttgtaaatattgctatcgaaatgatatttgtattttccgaaatctccatcgaagtccgttgcggaagtcagcacacccttgttggctgcggtggctgcgatggaacgggcatccatcagagctacggaagcgatctggccgttctgcagtttggagccttctcggttcgggaaatttctggtagagtgacggatactgaatgcgttattggcaggtgtgtcaccggcaccgaagcagggaccacagaacgcagtcttcatcactgcaccggtctctaagatggtagccgcacagccgttgcggatcagctccatgtatatgggcatggatgcgggatatacgcttaaagtaaactcatccgcaccgatgtatctgcccttcagaatgtcggcagccgcacagatattctcgaatccgccgccggcacagcctgcgatgataccctgatctacaatgaacttgccgttctttactttatttttcagagtgaagtctaccgcaccgtccagacttactttcgcacgcttttccgtctcatccagaatatccatcaggttcgcattcagctcttcgatggtgtaagtattgctgggatggaacggcatggcaatcataggacggatcttgtccagatccacctcgatcaatccatcatagtatgccacctggccgggattcagttccttatagtcttcggtacgtccgtggatctcatagaactcacggatctggtcatcggtcttccagatggaggacagacaggtggtctctgtggtcattacgtcaatgccgatacggaaatcagcactcagggaagccacgccgggacctacgaattccattactttattttttacatagccattcttgaatactgcgccaatgatagccagtgccacgtcctgaggacctacacccttcacgggagcaccctttaagtatacagctaccacgccgggcatattgatatcataggtctggttcaacagctgttttaccagctcgggaccaccctcgcccatagccatggtacccagtgcaccgtaacgggtatgggaatcggaacccaggatcatcttgccaccgccggctaacatctctctggcaaactgatggataactgcctgatgagggggtacatagactccgccgtattttttcgcacaggtcagaccaaacatgtggtcatcctcgttgatggtgccgcctacggcacacagggagttatgacagttggtcagtacatagggcatggggaacttctgcagtccggatgctctcgcggtctggataatacctacaaaggtaatatcatggctggtaagcttgtcgaaacggatcttcagcttgtccatattgccggaggtattatgctcctgcagaataccatatgccatggtgtttttcgctgcttcttctttggagatcgtaatgccggtcttcgcctgtatctgactggctgcttccggggtatccgctacgatgtccgtaccgtttaccaggtaagcgccgccctgtgttaactgaatcatgctcgtcctcctgttattccacttcttatgcgtaatgtgcatctaaatgtgcactcctttcattatactggattgttttctcagatgcaatgatcttataggatgtttttgccactgtaccacgctaaattttatttttctccgggaaccattcctcttttgttccggtgttgctataatatcctcagaaattatgccattttccgaaaatctatacgaaaacgacagttgtcggccgaattccggcggcagcggaaaggaaccttatgaatgtagtaatagctatcgattccttcaagggaagtatgacctccatgcaggcaggtttgagcgccgccacggggatcaaacgtgtttataaagatgcacatattaccgtccgtcctctggcggacggcggggagggcaccgtcgatgctctggtaaacggctgtgacggccgtatgacacaggtgcaggtcacaggtccttccggtcaccccgttgtctgtccttacggcatcgtcgacgagacccataccgcaatcattgaaatgtccggtgccgccgggattacccaggtcagcggagaggaaaagaatcctctgaacaccaccacttacggtgtaggcgaagtcatcaaagatgcaatccagaacggctgccggcattttattgtcggtatcggtggcagtgccaccaatgacggcggtgtcggaatgctgcaggcacttggctttggctttctggataaaaacagaaatcagatccgcttcggagccaaaggactggaggatctggaatccatcgctacggatcatgtgcttcccgaactcaaggaatgtactttccgcatagcctgcgatgtctccaacccgctctgcggaaagcagggatgttccgccatctacggaccgcaaaagggcgctacttccactatgatcctgcagatggacaaatggctggcttattatgccgctctggccagagaacagtttcctcatgccgatgccaaatatcccggtgccggtgctgccggcggtatgggatttgcttttcttaccttctgcaatgccacactggaatccggtattaagatcattctggaagaaacccatctggaaaaatatatccgggatgcagatgtcgtgatcaccggggaaggccgccttgacggtcagacggttatgggaaaagctcccatcggtgttgccaagattgccaaaaaatatgaaaaaccggtacttgctttttccggctgcgtggccaaagaggccgttgcctgcaacgcagagggcattgatgcctttttcccgattctgcggaacgtggtatccctggatgaggctatgcataccgacaatgccatgaccaatatgacggatacagtagagcaggtattccgggcgcttcagatttttcaccgttaagaatcacaaaaggacatgacccaccggccatgtccctttgtatgtttcaatattgttttattattcttcgtatccgtttggattgttcttctgccatctccaggagtcttcgcacatctctttgatgccgttctcagccttccagccaagttccttctctgccagagaagcatcggaatagcaggtggcgatatcgcctgcacggcggggtttgatcacgtaaggaatcttcacgccggtagctgcttcgaagttcttcacgatgtccagaacactgtagcccacaccagttcccagattgtagatcttcagtcctgcattctcctcaatcttcttcagagcctttacgtggccctttgccagatcaacgacatggatgtagtcacgtacaccggttccgtcgggggtatcgtaatcatcaccgaagacacccagctctttcagcttgccgactgctacctgtgtgatataaggcatcaggttgttggggataccgttgggattctcgccaatggtaccgctcttgtgagctccgatcgggttgaagtaacgaagcaggatcacattccattcgggatctgccttctggatatccgtcaggatctgctccagcatagatttcgtccagccgtaagggttggtgcactgtcccttggggcattcctccgtaatgggaacaaatgcggggttgccgtatacggtagcgctggaagagaagataatgctcttcacaccatgttttctcatgacatctaccagggtcagggtaccggcaatattgttctcataatattcccagggcttctgtacggactcaccgactgccttcagtcctgcaaaatgaatgactgcgtcgatctgttccttgctgaagatctcttccagagcttcacggtccagaatgtctgccttatagaaaggaaccttcttgcctgtgatggcttctactctggggatcactttctcacttgcattgcagagattatccaatacgactacatcatagcctgcctgctgtaattccactacggtatgactgccgatgaatccggcaccacctgttaccaaaattctcatacactctctcctatccgccgtgcataggacaatactatttgttcactatggcggctgcacaatctctcatctgtcagagccggatgaaattttttcttcgtttcttacagtatcagattactgtaattctatcgattcctcaataaccttatgttgtgaaaatctgtcgaaatgtttacagcgccacaccattctcggtgagcagttctctggcactttccacagagtccacaccgatcttgttcttgatcggcgcaaattcttttcttctgactacctcaaaaggcaggcagctgtccatctgatggatcatatccagcaccagactctcgaatttataaccattgggagtatccggctttaccaactctcctgcagcatccagataagggatcttcttctctacgatatgcagcggcatcttctctgccatgatcttttccagatcctgtaccttgaacagataattcaggatcacaccataattatacgcgggttctcccttctcatccttagcattcatcagttcatcggtcagctcgtagtactccacgatggaaggtctgccgtcctccaagcacataactcctactttttcatccggtgcattcttacggaccaccttggagcctacgacacagcctctctggatcgtagcaccaataaagcagggatcagcgatccgctgcagtacattgtctaccgcaaacacattcagccactcaatgccttcgttatgtacgatatccagcatgccgttatttttcatggaaatgaaccagccgccgttaccgttgggagaggtggacagcttgcccttctcctccagataaatcttgccttcataatcggttgccgcagccatctcctgtttgaagaagtggacataatccgcgttgtatccgaagaaatcatgctcttttaaaaatgcgatcgttgcgtcattgttcttatcgctggtcatcacaaacaggtggatccagctgtctgcctgatgcacgacttccatcaggttattgatcaggcattcaaagatgtacagttcacgggtcagacccacattgtacatgcccttgggattatcggaacccagtctggtacccatgcctccggcaagaagaacagctgctaccttgccctgtcggatcgcttcgataccggttgcggtaaattcctccctgtttgcttcgatttcgtctaactgcatggcagccaacggtgtgatcactcctttttttgccagatcttctttatgcttgcaagcttccagaatgctcatatccgtagtttcgatctgattcagaatcccctgcttctcttcctcgttgagctccccgtaatacttcagaacatgttcctgaccatactttgcaagcttctccttagcctgttccagtgtcatactcatattcctacctccgttttattttctccgactattccaccccgggtaacagtcaattttctctattatacttgatatttcctgtgattgcaaaccttactcccgggatcgttcccgcccgtaagtcctgccgttaagattctgtaaacgtgttgcaaagattttgtaaatatcccgacaaaatggtgttaagggtcgctcaaaactattcacccgggggtatctgtttactataatacggtatgtgaagtttttaaggacttcatcgaatgttgtacagaatgacagaaagttgaggaattcattatgaatattggaattttaatcattgcaatcgtaggcggtgttaccggacttttatccacagcatatctggcagtcagtttccctgctgtgctcctgtggaagctctatcgcagagtagttcacagaattcctctcacccaatagtaatcagtcagctaccaacactttccctctaaaaaggacccggaagcttttgcccgggtcccttgtcgtatgtatgtattctattttattcctgcaccgggttccaattttcgtccatcaaggtcgcagttactgtaattccctccggtgcattttctgcgcagatcacaagatagaacattccttcttccgaatccacggcatattctgacggatcctccggcaaaaagacagaaaatccctccgggtactgctgcatctccagaaatcccttttccagcagtgcagttttgtaggcttcttttactgcatcccggtccccacaggagtacacctttattgaagtaaaagttccatcttcgctgtctgtctccgtacaatctgaaatcacagcatcgggatagataatatcctgctgcaccgctttcagatattccgttgacatccggacactctgtaagatctcaaaagtatcttttccatcctcggaatgcgccatgagtaccagactcaaaaacaaaatgagcagataacttcccagtgctcccgccagtattttcgcaaaaggattctctggctgccccagatttgtataagaagtgatgatccagccaaaatttcggtagtccaccgcggtattacagtattcgcagactccgccgcccaaaatgtccacactgcctccgcagttggggcatttgtattcccggagtgccctgctgtgctgcgttaccacatcctgtctgccttccagttccagccggatctcctcataacggttccggatcttctttcctgtatccagtgtcaatcgggtcctcacttccacgctgattctgtaagactctccccgtgtctccgcctccagaaaacgcacaccgcaaatgcaacagtccaccacattctgataccgtgccaccaccgtatccagatcacaggatgcgaaaaagcgtacctgctctgccgtatccgccagatggatcattcgcagctggtattccagattctgaagaaaattacccgtggagaattccgggattgcggcctttactttcgattcgtcttgaattctcggctttctgcgagtctccatcacgatcaacattacaataaatataatgagcatgtaaaacaacgaccggaaaaataccggagccagaccaattcccagcatcatggctgcggctgcctttaccgcattgtatccgttcctgcccaacgccaacagcaaaaacataatgccgcccgcacagatggccagtaccgcaagagaaatcgctgtaattcccaccaccgcaccggctttcataaagttggaaatacttttctgtcttgcgtcctcctccagagaaaatccggatacctttgtctcaaaatcactgacgagaaactttgccccgcaggcatcacagccatcgatatagctggtcagttttccctcatgtccacagttagggcagataaccatatctccctgcacatccgctttcaaaaagcttgccgctgcaatctccggtgtctttaggaacgcaatcttttttcccttgcggtaataagtccgtctcatttttaccggctgggtacggcggcagctataatcatagccatccttccagggaccatcatagtccgccagtcgtgccggctcctgcatctccatatccaccgtcagttcccgctgccgcagtctttttctgctcaggcgcagactttgccagaaaggctgggttgtctgctccatcaggttctgttccgcttccccgttgccctgatagaatgcttttaattccccacagaagtcttctgtccgtccctcgatctctttccgtgcatcattcagaaactctgttgccatttcgttttttctctcctcataagtgatcctgctgcgcaaaggtcctgatatcttttgtatcttatgtcccaactactttgtcccatatagctatgtatccattatataagttggtacccggtatttcaagacactttcccgtatagaatgatttgcctcatcgaatatctagtgctggtgcagatacttctctctggtagccagtccgccgcggatatgacgctcggatttattcacatccaataccttccgcgcctgctttgccaacgccggattcacctgggccagccgctccgtcacgtccttatgtaccgtgcttttgctgatgccgaaggccttggcagtctgccgcaccgtggcgttgtggtcgatgatatagcccgctatccctatagctcgttcttcaatatagtctttcaaaggaaaacccctcaggatacttttttacagtgtatgaaagtatctgaggggttatgcatcctgacaattaagccgctatttgacaattattttgtttcaaaatataatagttgtactttgcaagtatccattttgaacatacgggagggtttttttgtgaaagagtcaaagctccggctgcgttccgccggtttactttctgttgcggcaggatttatgttgtttctttatgctccattggaaatttattttaataacaaatatgaattctggtttgatttttatgatctgatcccgctctgtctgttgatgtttgcggtatttacgggtgtcagcttcctgctggctttcatcgtttcgaagataaataccaggctatatcatggatttctcacagtttatctgattgcgttcctctgcacttatattcagggcaatttcatgataggcaatctgcctcatctggatggaagtacggtggattgggcacagtattccggattgcgtatcggctccgttgctctctgggtggcagtcgcggttctggtgatactgacggtgaaaaagctgtcgcttacaaaggtggcagatgcagcaggtgctgtcagcgggctgatcagtctggttctgttggtgactcttgtaacgctagggtttacaaaacagggcctggaacacaaattttctatgatcaacaccacctatggggaactggaaatgtctaccgatcaaaaccttgtacttctggttctggacacagtagacggagacatcatgtcacaggtgatcgaacaccatcccgaatataaggaaactctttctgattttacttattataataatacgatgtcggcctatccattcaccgtatattcaattccttacctcttctccggcgaatggtatgaggatcaggaagaatttatcgaatatgcaaagagagtctatcgggaagctcctttctttgatgatctggaagccagaggataccgcatgggaatgtatgaggaggacgcttaccgtctggaagaaagcatgttccgatttgaaaatatgatcgacacgacccccacgatctcttccattgcacaatttatgaaactggaaatcaagctggtcggattcaaatacatgccttttgatctcaaacgcttctgcctcaccatcccggcggaattcaattcactggagaagaccgatgatatcagtgattacgaactcttttcttccgacaatcaggtcttctatacctacctgaaaaagacaccggtaacactgaccgatgacaaatgcttcagattcatccatctggtaggcgcccacagtccctggcatcaggatgcacagatgaacgagattgaaaacggcacctacgaacaaagcattgaagccagcatgacaatcgtggctacgtatctgcaaaaactgaaagacagcggtgtctatgataatacggccattatgatcctgtcggaccacggatacaacattgaggatgatgacagttccgagaaacggcagcatcctattctgttcgtaaagggtgtcggtgagcattatgatgagctacagatttcctctgctcccatttcccaatctgattatctggaagcctacacacgacttctggatggcaaacagggggatgccatctttgattacaaggaaggagatgccagagaacgacgtttcctgttctatgattacgatgagcccactcatttttatgagtatatgcagaccggatatgccggagatgtagacacgatgtacttcaccggtgtggaaatcacaccataa

SEQ ID NO: 288 - DNA, 5716 bp, unidentified
  source 1..5716: mol_type = unassigned DNA
atgggagctaagaaaaattttgtgattgatacgaatgtgattcttcacgattataactgtttgaagaattttcaagagaatgacatttatcttcccatcgtagtccttgaagaactggacaaattcaagaaaggtaatgagcagattaatttcaatgcgcgtgagttcgtccgtgagcttgatttgattaccgatgacaatctgttcaccaaaggggcgccattgggagagggcttaggccgtctgtttgtggtggcaggcatggtggactctccccgagtacgtgattcctttcccgaacgcatccccgaccatcagattctgtcggtagtggactggctttccaccaaaaagcctaaaatgaaaaccatccttgtcacgaaagacgtgaatctgcgcatgaaggcgcgttccatcggtctgctgtgcgaagactacatcaatgataaggtaatcaatgtggatatattcgaaaagtcgaatgaagtgttcgagggtattgaccctgcgctgatagaccgcatttattcttccaaagaaggactggacatcagcgaattcgattttaaggacatcattcgtcccaacgaatgttttgtgctgaagagtgaccgcagcagtgtgcttgcgcgttataatccctttgcccattcgatttgccgggtccacaagacaaagaattatggcattgaaccgcgcaatgccgagcagagctttgcttttgaggtgctgaacgacccgaacatcaagctggttgccctgaccggtaaggcgggaaccggcaagaccctgctggcattggccgccgcattgggaaaacttaccgactacaagcagattctcctggcacgtcccatcgtggccctatccaataaagaccttggattccttcccggtgatgccaatgagaaagtggctccttacatgcagcctttgttcgataatttgaatgtaatcaagcatcagttcgctgccaattcctctgaagtgaaacgcttggaggatatgcaaaaaagtgaacaattggtcatcgaggcattagcctttatccgcgggcgcagtttgagcgagacctactgtattattgatgaagcccagaacctgaccccacatgagattaagaccatcatcacccgtgccggcgaaggtacaaaaatggtgtttaccggtgatattcagcagatagaccaaccctatctggacagtcagtccaatggacttgtctatatgatagaccgtatgagggaccagaacttgtttgcccatgtcaatctggtgaaaggagaacgtagccagttgagcgagttggcaagtaatctgatgtagcggataccgcattttccggggtaaaactatttctatcccgctttccgactgttaaaaacgggggaggtgggatggtttctttatagacgataaataattgttataacatttttttatcgatttattgtctgttttgactaaaatagtgtatctttgcctcgcctaaaacaaaactgtcaagcgaaatgaagcgaaatttttttcatcggtatctttccgcgaaagtgcttccgatatggactattctgttaattgatgtatttatcatcgtcatatccagtctgttggcctatgctctccgatatgatttcagaagcatttttctggaatcatctaccattgacaagaccattttatggacggttgctgtcaacctgattttcttccgtgttttccgtacgtattccaatgtactgcgcttttcctcctttgtggatatcatgcgcatttttgtgtcattgacggtgtcgtatgcactgctgatgataacgagcgtcctgacggaaagctatttggagtttaacctggctccggtcagcgtgctgttcatgtcctatatcatcagctttgccatgatggcatgctcccgtgtgattgtcaagactttcttcgaggcgctgaacttcgacggcacccacagtgccaatgtgtttatttacggtgccaaggaagccggggtcaacattgccaaggcattgcgtgtcaatctgcgcaaccactaccgtctgcgcggattcattgcggacgaacctgagcttatcaataaggtgatgatgggtgtcaaggtgttccccaacgatgatacgctgattgatgtgctgaacgaccgcgatgtgcagaccatcatcatttctcctgccaagatggaggaactgaagaagtctgacatggctgaccgcctgctggtgcacaacatcaaactgatgaccgcgcctcctttgagcgagtggaacggtcaggcgctgagccgcacacagttgaaggaaattcagattgaggacctgcttcagcgcaatcctatcgagatagatatccataaggttgcctctcatctggagggcaagcgtgtgatgattacgggcgccgccggttccatcggcagtgaaatcatgcgccaggtggcttcgttcaatccctataaacttattttagtggaccaggccgagacccctctgcacgacatccgtctggaacttcaggaccgttggcgcgacatcgatgccgagaccatcatagccgacatctccaatgccacgcgcatggaggatatcttcagggagttcaagccccagtatattttccatgcggccgcctacaagcatgtgccgatgatggaggacaacgtttccgagtccatccaggtgaacgtattcggcacgcgcaccgttgccgatcttgccgtgaaatacggtgccgagaagtttgtgatgatttctacggacaaggctgttaaccctacaaacgtgatgggctgttccaagcgtatttgcgagatttatgtgcagtctcttgcgaagaagttgcagaaggagggaggccatgccactcagttcatcactacgcgtttcggcaatgtgctgggttccaacggttctgtcattccccgtttccgcgaccagattcagcgtggcggcccggtgacagtgacccatcctgagataatccgttacttcatgaccattcccgaagcttgccgccttgttcttgaggccggcagtatgggcaacggcggtgaaatctacatcttcgacatgggtaagccggtgaagattgtggatcttgccaagcgtatgatcagcctttccggacgtacggatgtgaagattgaatttaccggtctccgtcatggcgagaagctctacgaggaactcttgaatgtgaaggagcttacaaaacccacctaccatgagaagattatgattgccacggtgcgtgagtatgactatgacgaggtgaaggagcgtatccagaagctgattgatgtaagttacacctatgaccagatgaaaattgttgctgccatgaaggatattgttccggaattcgtgagcaagaattcctgctttgaggcgctggataagaagaaataaaaagatagcggtatagtataaaatgaaagggtgataacgtcattgtagtgttatcaccctttcatttttattgtcttcttgtcagccttttgtctcattcatgtgaagagaagtatttcaagaactgtgtacgttcgaaagtattgactcccttcgggtcgtttacgttcagaatacctttgaactggctgatggtttccatacctttgcggtccatccacaagttgaggaagcggatgtattcttcaatgatggtagctgaattctgataaagcacactgcatatctctacggccgaagcacctgctaatattgccttgacaacgccttcgggcgagtggataccaccggaagcggcatagtccagcttgtttacggctgccgaagcgatgcctatccagcgcagggctttagataaatcggcttcgttgctgaatacgttgccggatacttgtatcattttctcaatgttgatgtccggctggtagaagcggttgaacagcactactgcggcggcaccgttggcatacagctggtctatcagagctatcggattggtcaggttgtcacccagcttcatgatgacgggtatcttgaccgtcttcttgatgtggctcagaatgtcgatgtggcgttgctcgaaactgcagtaagcatattgtacatccgtctgcagtgcaaggatattgatttccagtgcgtctgcaccggcctcttctattttggcggcaaattccacccagtcggcattctgatagcagttgatgctggctatgatggggatgttgcacaccttcttgctttccttaatcaagttcagatattcgcctaacttatgttcacggatatatcctacaagatagtcgctgccttcgggatacatattcgggtctcccagccagtcagcctccatcatgatttgctcttcaaagagtgattttagtacaatggcacctgcgccggcctcagatagtttctggttcttggcggcactgtctgtcagtccggagctgctgacgataatggggtttctgagtttcagccctgcaaaagtagtttctaatgttgccatgataatgattttttatggttaatagtttctttctccaaaaatcttgcttcctacacgtatcaaagtgctcccggctgcaatggcctcgtggtagtcgtgagacatccccatggacagttcccggaatgactctgcatcggcaaaccacttggctttcacttcattgaagaagctacttaaagaacaaaactcagttttgatttgttcgtcattgtccgtattcgtggccatgcccatcaatccgcatatccggatatgcttgagctctctccattcaccggctgccagcatttcccggcattcgtcaaagctgaatccaaacttggtctcttcccgggcaatgtgcagctgcagcaggcagttgacggtttttccggctttggcagcctgcttgtccacttcggccaacagcttgtaggagtctatgccatgaatcagcgctacgtaaggaacgatatattttattttgtttgtttgcagatgcccgatgaaatgccattctatgtctttgggcagactttcgtatttagcggtcatttcctgcaccttactttctccgaacacacgctggccggcacgatatgcttcttctatcgcctcgttggggtgaaatttggaaacagccaccagccgtaccttttcaggcagttcgctcagtacttgttttaaattctctgcaatcatcgtttttttgagttatgagttatgagttataagttatgggtcgcaataataactcataacttataactcatcactcaaattaaacttccggtttgtcgtcgggctctgcactgtacggatatacatccataatggcggtttccgctacagatgctatctgatagtcggccattgtgcctttcatgccctcatccagtttcttcactgcatcacgcaggtcggcagcctgcaccaatacctgggtagaggttttcttttccgcaccgcttttctcgtccagtgtgatgaaaaccagtttacatttaaaccagcggtcggcagattcctcttcgctggggaacaattcgctatagttggcacgtttgatgtccgatacggtgaactctcccgaaatgaacggcgtcatctcttcgatgatgcgtgcttccgcttccgtaaaactgagggcatccaccagatacggttcggtcaccttcttgttcattccattttccattgttttctcgtaacggatcttacattcaaaccatgtatgcattgccat

SEQ ID NO: 289 - DNA, 6547 bp, unidentified
  source 1..6547: mol_type = unassigned DNA
  misc_difference 2964: note = a, c, g, or t
  misc_difference 2965: note = a, c, g, or t
  misc_difference 2966: note = a, c, g, or t
  misc_difference 2967: note = a, c, g, or t
  misc_difference 2968: note = a, c, g, or t
  misc_difference 2969: note = a, c, g, or t
  misc_difference 2970: note = a, c, g, or t
  misc_difference 2971: note = a, c, g, or t
  misc_difference 2972: note = a, c, g, or t
  misc_difference 2973: note = a, c, g, or t
  misc_difference 5775: note = a, c, g, or t
  misc_difference 5776: note = a, c, g, or t
  misc_difference 5777: note = a, c, g, or t
  misc_difference 5778: note = a, c, g, or t
  misc_difference 5779: note = a, c, g, or t
  misc_difference 5780: note = a, c, g, or t
  misc_difference 5781: note = a, c, g, or t
  misc_difference 5782: note = a, c, g, or t
  misc_difference 5783: note = a, c, g, or t
  misc_difference 5784: note = a, c, g, or t
ctacactctttccctacacgacgctcttccgatctcgccgaacagctgcaggcagcggcgggtcacatcgcttgcggtgcgggctgcgatcagcttagcctgagcagcctccacgctgtaacggacctttgcgccgtccatggcctgctgcttcttcagagcggcagcgtagaccagatacttggcagcctcaacgcgggccttcatctcagccagctcgaactgggtgttctggaatgcagagatgctgcggccaaactgcttgcgctccttgacataggcaacggtctcctccagagcgccctcagcaatgcccagagcctgagaagcgataccgatacggccgccatccagggtagccatggccagctggaagcccttgccgcgcacgcccagcatacgatccttcgggatacggcaatcctcgaagatcagctcgcaggtggaagaaccacggatgcccatcttatcctcagccttaccgacggagaagcccggatcggtgcgctcaacgatgaaggcagagcacagcttggtgggacggcccttcttatccagaacgtggtcggtgacagcgatgacgataaagacatcagcgaaaccggcgttggtgatgaagatcttggagccattcagaacccagcagtcatcctcttccttggcaatggtctgctgaccctgtgcatcggtaccagcgcccggctcggtcaggccgaaagcgcccagccactcgccgctgcacagcttgggcaggtactttgccttctgctcgggggtaccgttctcataaataggagcagcgcacaggctggtgtgagcggagacgatgacaccggtggtgccacagaccttgctcagctcctccactgccatgacgtaggacagcacatcgccgcctgcaccgccgacagaggtggggaagtaaatgcccatcatgcccagcttgcccatcttctcgacggtctctttggggaagtactcttctgcatcaaccttcttagccaggggcttgacttcgttttcagcaaactcgcggtacatcttctgcaccatctgctgctgcttggacagagtaaaatccatcgctatatcctcctaacgggtgttttttatctcccggggtcagggttctcccctacccggttgcaaacaaattcctcctgaccgctttccccacggccaggagaaatgtttatcagaaattacagctggtcaacaggagtcttggtgcggtctgcgttgtaaacgtagaagcccttgccggtcttgcagcccaggttgccgccgcggaccatcttgcggatcagcgggcaggcgcgatacttgctgtcgccagtctcatggtacaggacatccatgatggccaggcagatatccaggccgatgaagtcgcccagctccaggggtcccatggggtggttggcacccagcttcatagcggtgtcgatgcctgcgatatcagaaacgccctccatcttgatgaaggcagcctcgttgatcatggggatcaggatgcggttgaccacaaagcctgcagcctcgttgacctgaacagggttcttgccgatggccacggagatctccttgatcttctcaacggtctctgcgggggtgttgcagccggcgatgacctcgatcagcttcatgcggtcagcggggttgaagaagtgcataccgaccagaggacggctcaggcccttgccgatctcggtgatggacagagaagaggtgttggaagcgaagatgcactcgggcttgcagatcttatccagctcgccgaaagtggtctgcttgaccttcatatcctcaaaagcagcctcaacgatcaggtcgcagtctgcgcacagattttccttcaggcccggggtgatggctgcaacgatcgcgtcagccttttcctgggggatcttgcccttagcaaccagcttctcgtagcccttcttgatctttgccaggccgttctcagcccactcctgcttgatgtcgcacagagcaacggtgttgccctcaacctgtgcaaatgcctttgcgatgccctggcccatagtgccagcgccgataacaccgatcttcataggaaatctctcctttaatatcaaaaattatgtaatggattagttgttggtgaacactgccttgggcttcggtttctcacggctcaggaagcaggccatgccctcctgctgatcgtgggtctcgaagcaagcaccgaacagcttctcctcaacttccacagctttctcaatgggcaggctgatgccaccgttgatggccttcttgcagttgcgcactgcaatgggagcgttcttggcgatcttgccggccagcttcagcacgttctccatcagttcagcctgcggatacacggcgttgaccagaccaatgcggtaagcctcatctgccttgatgttcagggcagagtagaccagctgctttgccatgcccatgccgaccagacgtgccagacgctgggtgccgccgaagcccggggtgatgcccagaccaacttcgggctgaccaaacacggcgttgtcagagcagatgcggatgtcgcagctcatggccagctcattgccgccgcccagtgcaaagccgttgacggctgcaatgacggggatggggaagctctcgatcatcaggaacacgtcattgcccagcttgccgaaggcctcgccctctgccttggtcatggtgctcatggagccgatatcagcgcctgcaacgaagctcttgtcgccttcgccggtcaggacgatgcagcggatggtctcctgatcgacagcctcaaaagctgccttcaggtctgccagaacctcggggttcagggcattcagtgccttgggacggtcgatggtgatgatctcgacagcgccctgcacctcggtttttacaaaagccattgtgaaaacctccaattcagattctcagtgtttcaaaacagctcccgcgccccggcagagtctnnnnnnnnnnggctgtcattcaattcaattccaaagggggaacttacatctcaacgatggtagcgcagcccatgccgccgccgatgcacagggtagccagacccttatgagcaccacggtgcttcatagcgtacagcagggtgaccaggatacgagcgccggaagcgccgaccgggtgacccagagcgatggcgccgccgttgacgttcaccttgctcatatcgaagttcagagcctggctgacagccacagactgtgcagcaaatgcctcgttggcctcgatcaggtccatatcagcaacagtcaggccggtcttagccatgaccttcttggttgctgcgatggggcccagacccatgacctcaggctcaacaccggccagagcgccagcgacccaggttgccagaggctcaacgcccagctccttggccttttcctcgctcatgatgaccagagcagcagcaccgtcgttgatggcggaagagttgcctgcggtcacgatgccgtccttggtgaaggcgggcttcagggttgccagcttctcgaccggggtcagacgggggccttcatcggtatcgaacacggtgtcgcccttcttgcccttgatgacaacaggaacgatctcgtccttgaaagcgccatccttgatggccttgtcggccttgacctggctgttgtaagagaactcatccagcatctcgcgggtgatggggctgtagccgtacttcttctggaaggtctcgttggtgcagacattctcagcggtcatgcccatgtgcttgttgaagccggtggcatcccacagagcatcgttgaccatggtatcaaccagctcgctcttgcccatgggagcgcccatgcggtagccgtaacggcccttcatcattgcaaagggagccatgtccatgttctccatgccgcctgcgaccacgatatcagcatcgcctgcctcgatcatctgagcagccatgttcacgcagttcagaccggaaccgcagaccacgttgacggtgacagcgggggtctcgatgggcaggccagccttcagggaagcctgacgggcaacgttctggcccagaccagcctggatcacgcagcccatgtaaacatgatcgacctgctcaggcttgacgtttgcgcggttcagagcctccttgatgacgatggagcccagctcagcagcggggacgttggcaagggtgccaccgaacttaccaatggcggtacggcatgcagatgcgataacgatctttttcatgtgaatagcctcctgattgtgtatgttgtgatttaagaaagactgttttatcaaaacgccgaagcgtttcttgcataaggaatggggggtcagacgttctctcccctgctgcgcagctcggccatcttctgctccacggcggcttccacattcggggtaacgaacttggagatgctgctgccgtagcgggcggcttcctttacaatggtagaggaaagatagctccacttgatgctggttgcaaggaacatggtctcgatgccgggcatcagcgcgtgattggtctgcgccagctggatctcgttttcaaaatccgttaccgcccgcaggccccgcaccatgaccgaagcgtggcgcttcttggcgaactccacggtcaggccgtcgaagctctccaccgtgacattggggatacccttgcagcattcctgcagcagggccacccgctcctccacggtgaacaatgggtgctttgcactgttgatgagcacggccacgatcagatgatcgttgatctttgccgcacgcttgatgatatcgagatgacctcgtgtgaccggatcgaacgacccggggtaaactgcagttgccatcggttttgtcctccttgcgcgcctttgaaaagcgcattggttctgacatgatagcactttccagtttgctgtgcaagatgttcttttcttctgctacggtgtatcgttaatttttaaacaatcttacccgcagtgccacgctgcatcctgctacgctataagtaaagcacatcgtcaaaattttatcaagtattttttgtgtaaaatttattttttgtgcaccaaagaatctctacaaaaagctaagatttttagtcatattgcatccggccctgttttttgccaggaaagtattgattctcccgtttgttaatgatataactaagttggaatttacaattcctttatgttattgtaagagaggatggtttataatggattttacggaattgtatgcgcagaagaaaatgacagctgaccaggctgccgcgttggtcaaaagcggcgactgggtggattacggctgggccgtgaacacccccgttgcagtggacgctgccattgcaaagcgtctgcctgagctggaggatgtcaacttccgcggcggcatcctgatgtgggtgcccgccatcttccagatcgaggatcccgctgcccacatgacctggaacagctggcacatgggcggcattgagcgcaaggccattgcccagggcttctccttctactcccccatccgctactctgaactgccccgctactaccgggacagctctgaccccgtggatgtggcggtgttccaggtgacccccatggacgagcacggctatttcaactttggtccctgtgcttcccacctgggtgccgtctgcgataaggccaaaaagatcatcgttgaggtcaaccggaacatgcccaaatgcctgggcggcaccgagaactgggtgcacatctcccaggttgccggtgttgtggagggcagcaacccgcccatcggccagatggccgctgccggtgccannnnnnnnnnccccagcgaggtggatatggccgtggctaacctggtggtgccccagattcccaacggtgcctgcctgcagctgggcatcggcggtatgcccaacgccatcggcaacctgatcgcgcagagcgacctgaaggatctgggcgtgcacaccgagatgtatgtggatgcctttgtggatattgcaaaggcaggcaagatcaccggccgccacaagaatctggacaagggccgtcaggtctatgcctttggtgcaggcacccagaagatgtacgattacctgaacaacaacccggagtgcatggccgctcccgtggagtacaccaacgacatccgcagcatctccgccatcgacaacttcatctccatcaacaacgcggtggacattgacctgttcggtcaggtgaacgcggagagtgcaggcatcaagcacatttccggtgcaggcggtcagctggactttgttctgggcgcatacctttccaacggcggcaagagcttcatctgcctgtcctctacctttatgaataaaaagaccggcaagctggagagccgcatccgtcctaccctggaaaacggcagcatcgtcaccgacacccgcgcaaacgtgcactacctgtgcaccgagtacggctgtgtgaacctgaagggactgaccagctgggaaaaggcagaagcactgatcagtgtggcacaccccgatttccgggacgagctgatcgccgaagccgaaaaactgcacatctggcgcaggagcaacaagcgctga

SEQ ID NO: 290 - DNA, 7030 bp, unidentified
  source 1..7030: mol_type = unassigned DNA
tcattgtttcttatagggcagacatcggtatcggggtttatttttgctccgacttccatattcaatcgcctgggcagggcagttgcagatgcaggccatacaatgtgtacagtgctttccccatacagggatttggttattgagtttcacgttattcaaagggcagtttgcaacacattttccacacccaacacaggagtcttttgcgtaaaagaggtctgcctttatcacaaagcggtaaaaggcacggttgactaagccacttttgatgcgatccacaatccctactttacgttgggggaagtccctatcctgggcgatccagttaacaccatgttgaaggacagggagtgctctctcaatgatctgctctgcctcctgttcttccggcacaggaaacaacgcaatataattttctggcattaccacctctagggttcctcggtaaataagcccctttgcctggcataattccgctagatatcgccctgcgccgccaatatcactgccacaagtcaggacaaaataggcccttttgtcccccagcagctctacggctctaagatattcctcaaagatatgaggaagttgccaaccataggtaggacttacaaaaacccaaggcccagtagaaaaaattgggcttttttcaccacttttgattcgttttcctagatctaggagtttttcattcaactgctctgacaaaagttcagcggcataacggctgtttccagttccggaaaaatataagatcattaggacttctcccccatctcaatagccacttttatcacgttatcccgccgatgttcaaagaggtcataggccgcctcgatctcctctaggtgaaaggtatgggtgattaacggcgtggtgtccagcattccctccttgatcagctttaatatctccgcacagctgcaaccatccacaccaccagtcttgaaggtcagatttttcccgtacatttcgggcaagggcagctgctgaggaccgtcatacagcgccactactgccacagtgccattgggtctggcacactgccaggccatacgaaaggtttccgctccaccagcgacctcgagcactacatccgcgccgccgtggtcgctgtttcgccgtacatagtccagtgctttttccggtgtggtcgccagcacctgaggatagtaacggtggagaaactggaggcgctgttcttcccgctcacatacaatcacacgttttggactttttaacaaaacacactgtaaggtacatatacctgtcgggccggccccgatgataagcacagtgtcatcagggctgatatctgatatctgggccgcccaataacctgtagacagaatgtcacctacaaaaagggcctgacggtcagtcacggaatcagggatcttatccaagctctggtccgcatagggaactctcacatattctgcctgcccgccatcgatgcggcagcccaaggcccagccaccatttgggtctatgcagttattcacccagccatgctggcagaaaaaacagtgcccacagaaagtctctacatttacggtgaccctgtcaccaggcttcactgataatacagcaggaccagccttctctactacgcccaccatctcatggccgaccgtaatacctggcactgctcttggtacagagccatgcttgatgtggaggtcactggtacaaatgctggctaaggtgacccgcacgatcgcgtctcggtcatccaaaatcactggtctctctttctccaacaatttgaatgttccttgttccaaaaaagtataggctaacatattcattatccgctccattgtagtttcttgattccagcatagcattttccaaaacaaaattcaagggaatcaaaacaaaggcagaggccctgtccccagacaaggcccctgcccttcatttgatcatagatttagattcaaaatcccaggccctgaatatagccctggatgcgctcaaagcccctcttaatattttcgtcagaggtggcgtaggtaattcggatgaatccttccccactgtcaccgaatccggatccagggacagtaacgaccccggtcttcttcagtagatccatacacaagtcacgggaattcatcccggtgaactctgtcagttccttggcattgacaaaggcatagaaggcgccctttggctttttaatagacagaccaggtgtctggtcaatcagtgaacagatcaggtcacggcggcgaagatagctctgccgcatattctcaatctcagactggcactgacgtagcccacaggcggccgcaatctggctgggggccggcagacaggaagctccgttctcgtgcagtttagtcatgttacggataatatcaggctgggagatcgcataaccaaggcgccagccagtcatggcaaacattttggagaagccgctaatgtacacagtcttttccatgattccatcaaaggaggtaatgctggtatagcccgcatcatcataaactaaccggctgtatatctcatcggcaatgataaagatatcccgctcgcggagcaggtcagccagggctttgcaagtatccttgtcaatcaccgcaccggtaggattagagggtgagttgagaatgatagcttttgttttaggtgtgatcgcggccttgatgtcatcaggatctgggataaatccgttttcctcacgtgctgggacacagatcattctggcgcccaccataccaatctgtccaaaataattaggccaggccggtgtgattacgatgacttcatcaccgggatttaccaaggtgaacaaagccatctggatcgcctcagtggcaccgcaggacaccataatctggtttgtgggatcaggcttcagatcattggcatggtactccgcaatcgcttggcgcagttccaacacgccactgttcggggtatagtgagtcataccggactcccagcatcggcatgcctcttcaatgatggggcgcggagtgataaagtccggctcgccaactgtaaagctgatagtatcctccattttcaaggcctcattgaacatctcccgaatgactgatccacccagattttgggccaaatttgacaactgcatcgttcattcactcctacaaatcagtttgttgtatatgcttaggcacccagataggctgccttcacacgctcatcagctagcaaatcctgagaggcaccttgcatggtaattttccccgtctccagcacataagcgtgggaggccgtattcagagctaaaaaggcgttctgttcgatgagcaagatgctagtgccagtttcattaatctgcctgatgacgcgaaaaatatcttctacaacaataggagccagccccatggaaggctcgtctagcattaacaggcttccgttggtcatcaaggcccggcctaacgccagcatctgctgctcacctccagaaagtgtcccagcctgctgcttttcacgctccttcagtcgtggaaagatagtaaatacccgttccagaccatcttttatgaaagctctatcttttatcagattggctcccatagtcaggttttcagtgacggacatcttcgaaaatacccggcggccttctggcacatgggcaatgccctgttctacaatcttatggggcttcatcttggtcaattctgttccctgaaacagaattgacccgctttttgcgtgctccagaccagagatggtgcgcagaatggtggactttccagcgccattggacccaatcaacgccacaatctcccctttttccatcgagaaggaaacgccttgtaccgcattaatggctccataggacacatgaagatcccgaatctcaagtagcgacattctgatagcctcctcctaagtatgcctcgataaccttcggattggcctgcacttcggcgggcaccccttcagctatggtcttaccaaagtctaagactttgatgcggtccgcaataggcattacaaagttcatgtggtgctcaatcaaaatgatagtcacaccaaagtccttgcgaatctgtgctaccaggttcgccatatcctccagttcagtggtaatcataccagctactggctcatccaacaacaggatcttgggatccgtcatcagggcacgtgcaatttccagacggcgctgatcgccatagggcagattttttgctagtaaatttgctttgtcggccagtcccagacggtctaacagacccatgaccttctcatccagctccctttcgctcttcaccatgcccggtgtacgcaaaaaacatttggctagattctggtcgttatgcatagtatgggccatctttacattgtccgccacactggcattagagaacaggcggatgttctggaaagttcgggtaatcccctgtcgcgcaaactgatagggtttaagccctaccatatccaccccatctagcttaatggtaccggtggtgggtttgtaaataccggtcagcatattaaatacggttgtctttcccgcgccgtttggcccaataatggcaattaattcgcccttttcaacttccaaattaaaattatccacggcgcaaagcccaccgaacatgatagagaggtttttgacctcaagaagactcatatcaccacttctcccttctcaggacttagagacacccgcaggctctttatccttctttgagccaaacagcggagtctcgtacagggacgcacgagaaatacgcataaagggaacttccttgccaccacaaagcccctctgagcgatagagcatcacaatgaccagaatagccgcatacaccgccaggcgccagtcggccaaaaagcggagaacctcaggcaggatggtcaacagtgtggcgcccaaaatagaaccagtcagagatccggaacccccggcatacaagtagaccaagaaatcggagctctttgtaaagctaaaggagtccggctgaatgaaggctagcacatgagcatacaggccgcctgctacgccggcaataaaggcagcgatacagaacgatgtgatcttgtagcgggtagtattgatgcccatggcatctgcagcaatctcattgtcccgaattgcgataaaggcgcggccgtagggagaatagataaggttacgcaatagatataacgtcaacgccataaagaataagatccaggcaaaattggagtaatttggaatgccaatcatgcctctggctccgccaatcggctggatcagacgaaggatagcgcggacaatttcaccaaaggccagagtaacaatggccaaatagtccccctttagctttagggagggcatcccaatcagcactcctaccaaggcagccacacaccctcctaccagtaggcctaacaaaaagacagggacctgggcaactaccggaatattcttaccatcaaataccatggtggtaatgaccgcggccccataagcacctagggacataaagccagcgtggccaatgcagaactgtccagtaaagccattgaccaagttcagactggctgtcatcataatgttgatgccggcaaacatcatgacttgaatataatagccatttaggatacccacagagcgcaggaccgttacaactacatataaaaggacaacaattaaggcggggtaaatcgacttaatcaatttctttatattcataaagatcacccctccttaaactttctctatgaccagcttgcccatgataccggcaggcttgaccaaaaggataacaatcaaaataatgaatccgacagcatagccgaaggtagagttcaaagcggtagcaaatatttgggcgatcccaaggataaagccccccaacatggcccccctaatatcaccgataccacccagaacggctgcgacaaatgacatattgcccagccaggaacccatatacacatcaacctgaggataggcactggcatagcaaataccagacactgcggccagagcgccgcctacgaagaatgtgatggaaatgacgcggttgacattgatacccatcaaagaagctgcatccttgtccatactgacggccctcatctgtccaccaatctttgtgccattcaccatgaaatatagtgccatcatagtaacagcagccaatatgatcatgataatctgggtcgaagtgatagacgcccctaaaacattaaaggttttgggcgtaaatagtgtggggaacgagcgaggattcgggccaataaaaggtaaggcccttggaaagttctccaaaaacatggagacacctacagctgtgatcaacgcgatcattctaggtttattgcgcagaggtctgtaagcaatcgcctcagtcgctacagcgattccgccagtgcccagcatagcaatcaatatgataatccctacaataagcattgggaatgttccatcaatctgatagctggagaaaagttgagcaataaaataggtgcccaatgcaccaatcatcaaaaagtcaccatgagcaaaattgatcatgccaacaatcccatagaccatggtatagcccaatgcaagcaacgcatatacgctgcccaattgcaagccgtaaactaagtattgtaggatcgtagccacaggaacgcctcctatcatgtctaaaaaatggatttactaagaaaggaaatgtgccggctggtatcaaacgcagccggcacattcagttatgcctaagaaagaattgctgccctatgtcaccgatgaaaaatccaaaagaaatcagctaggattgatggaagaaacataatgggaaacaccatcagcatcatactgcataaccacgccacccttaatggggttacgatcctcacccatcgtcataggaccagagggcagttgaagattctcaatagaagccagagcgtcacggacaccatcgcgggtcagctcttctgcattctgcaacgcatagagaaccatcatagtagcttcataagccagttcagcattggaattgggttgctcatcgggatgcagggcagtgtacttctcaacaaactcaacagc

SEQ ID NO: 291 - DNA, 8846 bp, unidentified
  source 1..8846: mol_type = unassigned DNA
atggggaaaccatttaacaatactcagggaactttgtttggcatagatgtaacggatccccttttagagaaaccgcagaacattgatgagtatcggttttgtgcaaaaacgcttaaaagcatgatggaacttttggtagaaagatacggcacaaacagacttcaggcggtgatttccgaaaacatgaacggaccaataaaacttagttttgaagaatatggatttgaaatagatatgttttgtgatgaagtcacgagagaagatggagtttgcttagtcttggaagaagaaaaagatacctttttcctcattataaacggatgtaagataaatcctttttccagaaacgatcaaaagggcaattgtgattttttatatatggaggagggaagttttcaagatggagagtggaaaagagggcgccgtttgaatggagacgaaatcttttcaccagtttttaatcaatttacactgctaaaagtcaaattattcgcgtattaggttgtaatttgtcaggtagtaacattacctggaacatcgcactaccggcatcaatggaacgaaatttctgctgtgactattcctggcagatgcgcccagccgctgacaatactgccagacggctttatttctcaaacagagatgacatcctgcggattaaacggagtattcctattagtaaaaagtctgaaagaaaagttctcgtcaataccactgtttctattagccaaaaatgaaaaaatattgattttggctaatagaaacagtataataagtacatactgtttgtgaaaggatgatgcagatgaagctgatagagcgtagacagtatttagataagttaatcaatgtacttgggactccggatatcaaggtcattaccggtgtaagacgaagcggaaagtcaaagctgctagaagcatttagagcatatattgaatcggagaacccggattgcaatattatacagataaattttaacctgcctgattatgacgatttactgacttatcgcgcattatacgattatgtaaacgcacattatgttgcaggtaaagggaattttgtctttattgacgaagtgcaaatgtgcaaagattttgagaaagcagtcaatggacttcatgccagcgagaagtatgatatctatattaccggttcaaatgcctttttgctaagttcggatttggctacgttatttacagggcgtacttttgaaataaaagtatatccgttttcctttcgtgagtatatgaagtactttggcttgaaagaccgctacgacgctttggataagtatgtgctagagggtggaatgtctggttcctatctttataaagatcaggaagcaaagtatgattatatagctgatgtgtttgatacactgatagtgcgtgatatacgcaaaaaatacaagataagaaatacgcagcttatggacagaattgtggatttccttatggataatgtgtcgaatctttcgtctgcgcgtaacattaccaatactctgggaagcatgcaggagaagatacaccatacgacggttggcaattatatgcaatacctgtgcaatgcatttgcgttctacaaggttaggagatatgatattaaggggaaaaagtatttatcgagcaacgacaaatactatttgagtgaccatactttccgttatgcaaagcttgggacaaagaatatggattacgggcggatactagagaatatcgtggcgattgagttgttgcgtagaggatatgaggtatatgtgggcatattatataagaaggaaatagattttgtcgcagtgaagcggagtgagaaaatctatattcaggtatctgataatatcagtgaagagaagacctttgaaagagaggtagctccacttttgcagattaaagatgcataccctaagtatgtgatagccagaaccaggcatgatgaataccagtatgagggaatcaaggttattgacattgcggattggttgttggacaaataaatctattagccaaaaatgaaaaaaataagaaattggctaatagaacaaagcgaaccaaataaaggataacgtataaggcattggtcataatcggctgatgccttttttgtgcacaattttaagcagatataaagtggtttataaggaaataattgaaaataaatcatatttttttgacccttttttgcaatcagctatttttgactccaaataaatgatagaagccagtaaataaaggatggcaacagaaaggagaagctgatatgcaggaacagaagaagtataacttggcggatggtaatattcgtaaacatttcgtaacgtacaagcaggctgcagaattatatagcatgggaatgaatcgaattcaggagcatgctaaggcagctggtgcgacttacaaaatgggaaatgagcgtgtcaaaattcatgcagctggcaaaagatgcaaaagcttgttacaaggtaaatcagttggtactggtcaatttagaaataattgataagtatctggagacattccatatagttgaggattgtctaacgcttcttccttccaattctctttgtttccacgaataagttttgccgcctcgttgataaaaggattaggttcagacatatgctgctgaaacatggacgtatgcaaagctaacctcacatatcaataaaactgctgaagcagctggatacacaagactatccaccattcataaaatcattacttttcattcctgtcaatctgtaaattattgtaatattgcattggagtaacaccatattctttcttaaatgctctaaaaaaatgattataccctccaaatccaccaagcgcatatacctcacgaatacttttcccctgctctatataatggcggcataaatcaagtctgctctttacaatgtatgaatgaggtgtctcacctgtcatttttttaaactctcttactatatgataacggcttacataaaattcattttccaagcgctccaacgagatatcttctgtcaaatgttctctgatataaataaaaatatcatccattacaacgtgttttttcttattcgtcttaatctgtacatcctcctgaacagatgagcgaagtgcaagtacaagaatcatagttaataggcttttctcgtataatgagcgggcaaatttaggcggctcattattcatcgaatagagctttttggatatattctttataagcatagccgattcactctcagaatgaacaatcttaacttgatacggaacaaaatcaaacgcttcatcaagtcttgtttcttcatctgacaatttccttaaaagttcttcacctatataaagaacataaacttcaagaggatacttatttttacgatattcaagctttactttattacctggcttaataaatatcaaatcctccatagtacatacaatattatcatcctcctggtgcatataccctatcccaccagctataaatacaattgtatagctcttcttttgcccaaagcttcgctgggtactatccaatattttcaaatattccattttgtagccttgctttttcatatgtctattttgcacactttcctattatattttttgttcattttgtcaaaatatacaatatatcaatttttcgtagtttgcaagcaatatttgtatatggatatcagcataaccacaatataataagattgtagctaccaaaacaatataaatttgggaggtaaattatcatgaaagaaacaagacctttttccatgaaggacaaaattggttacactcttggcgatttgggatgttgctgtactgagcagttccgtgccatgtatcttgctattttttatacactggtattaaaagttaatccagtacacgtaggaatccttatgcttattacaaagttttgggatgctataaatgaccctttaattggtgcacttgttgatagccacaaaaacaaaggaaaaggaaaatttattccttggattaaattctttgcttttccaactgcagtactctgtatattaggatttgttaacgtaagcaatttcgcttatggtgcacgtattgcttatatgttcattacatatattgtttacgaaattatgtacacatgtgtcagcgttccatttggtagtctttcaagtgtaatgactgatgatgttaaccaacgtactgacctttctcgtttcagaagtcttggcggtacaatttttatgacagttatcgttattgctggaccattattcttatataaagataaccagccagtacctagccatttccttattatgtcagcaatctgtgcagttattggattaatctgtcttatgtttacatctcattggtgtaaagagcgtattattacagagccagttgttgagaaaaaagaaaagcttaactacttccaggtaattaaagatattactaaaaacaaagcattactcggagttatgttatcaagctttatcggtattgttggagcaggtatggttaacggattaaatacttatttattccgcgattattttggaaatgttgccatcatggcagtttcaggtatgttaagtgtaatctggtcacttattgcatttgtaggcacaaaatttgttgctaagaaatttggaaagaaagaatggattatgtacagtgcaactttctcagttgttgtttatgctattttattcttcttcccacttgaaaatcctatgctctttattatcatcaacggaatctgctatcttggagtaagtggtttccaagtattagtttgggcacttgtaaatgatgcaattgattatcaggaacttcagacaggaaaacgtaatgaaggaattgtatactcagcatatacatttttccgtaaacttgctaatgctgtatcaggaagtatgagtagttttgcacttgcaattgctggattccaggttaatgaagctgtccagaatgaagcattctcaggacatctttggaaaacatatacaggtttatatgttgtaggatatttattagctgttctggtattaaaatttatctaccctcttacaaaagagaaaacagctgaaatgttacaggatttagctgacaagcgaaatgctgctactgcagaataaaattagaaacggaggtattttaaattgacaaaacaagtagaaatcacaaaccgtgatggacacatcttacgcggaatagttaacattccagaagatggcacaagatttcctgctattgtaaatgtacatggctttacagggaataaaagcggttacaaaagtatttatactcacacagccagattcttagctgaacatggatttgccagtgtccgttttgatttatacggaaatggtgaaagtgatggtgaattcgaggatatgacctttacaggtatcctacacgatatcgaggatattataaactggactaaaacacaagattttgccaatccagataagattatcttatctggtcagagtatgggaggatacgcagctgctactgcagctcctattgttaatccttatgctctcatgcttatgtgtccaggtgctggaatgtggtttggatgtaaggatcgtgctgaagccatggaagctcagggaatcaccaaagccgatattgaaggactcactttcccaacatcttttaatcatgatttatttaattatgagccattctcgtcagcagaaggatacaacggaccagtcctccttataagaggaactgcagatgatttggtagatgatgcaacatgccatagatatgagtcactttacaatggaaaatgcaattataaaacgattgaaggcgctaaccacaattttgccagtgcttttgcaagagcagaattagacaaattaatgttagagtttttaacaccacttaaatagtatactcactttgaaaggaagtatgaacaatgaaattattagagcctataaaagttggaaatattgagtttaaaaaccgtattatgttcccaccacttacaacaggatatgaggaaaaagatggttcaattggagaacaaagttttcgtttttacgagcgtctcgcaaaaggcggtgtcggatatatagtaattggagatgttgcaccacttccaacattctctcctacaccaaagctttattcacatgagcaggttcaaagcttcaaaaaacttgctgacgcatgtcatgaaaatggtgcaaagcttggaattcagttattccatcctgactacaatgtcaaagctttaaacgatatgttccatcagggcaaaatgcaggaagcaagagctaaacttcaccatgatatgcagcactttgtaaatgaagtaactgcagaagaacttgatgaaataataaagcatatggaaaactgtgctatcttagcacacgaagctggtgttgattgtattgaagtacatggagaccgtcttgttggttctctctgctctcctattttaaatcatagaactgatgaatatggcggtgacctggctaatcgtacacgttttgcattaacacttgtaaaaagattaaaaacaatcgtacctgacatggttatcgactacaagcttcctatagttactcctcttggagaaaatagttttagaggaaaaggtggtcttccatttgatgaggcttgcatttttgcaaaagaattagaagcttgcggtgttgacacattacatgttgcacaggctaaccatacaggaaatatgggtgatacaatccctgccatgggaacacagccatacggatttatggtttcttattctaaaaaaataaaagagcttgtatctattcctgtatctgtagtaggccgtatcgttacaccagaagctgccgaagcagttattgcaaatggttctgctgatatcattggattaggtcgttctcttctcacagaccctgactttgcaaacaaatgcgcagatggacattgctgtaatgtcagaacatgtatgatgtgcaataagggatgtacagataatattcagaatcgtgctttcttaagttgtgtacttaatgctgaaaacggttacgaagcaacacgacatataactcctgcagcatcatcaaagaaaatagctattattggtgctggtattgctggacttgaagctgcacgtgttgctgcattaagaggtcatagtgtaaccatttttgagaaatcacttcagattggtggtcagttacttattgctagtgtacctccaagaaaagaagaaatgatgagaagtattaattattatgcaaatgtacttcctgaattagatgttacattcaggctaggtgaagaattcacatcacaggattataattcattcgatgaagtaattgtggcaacaggtgcgaacaacgcaataatccctgttcctggcaaagatcttccaactgttacaagtgcatgggatgtgcttgccaagaaagaaatcgtattcggtaatgtttctgtaatcggtggtggtcttgtaggtgttgagacagctgaatatctggcttcacgtggatgtaaggttacaattattgaaatgatggaccagattgcaaaagaagaaagcaacactgttctacctactctaatgagtgaattagagcattataatgttcaaatagtaacatctgcaaaattatcagaaatcaaagatgattctgtagttgttgaaaaaacaatagacgacaatacatcaacagaagaaattgcttcagactttgttgtaatggctgttggtgcaagaaagaaccttccagagctttctgattgtcctctcccacttcactatattggtgattgtgctggagaacgtccaagtaatattgatcatgctattaaatcagcatatgatgtggcatgtgaaatataaattattaattaccccattaccacaaaatccatgttccaatttaaggaacatggatttttatttaagcattgctcgctactttatcaagaagtcttgcggaatctcgctttgcttttcttgttgagtgagcataaatattcattgtggtactgacatcggagtgtcctaacagttcctgtacatctttcggagcagccccattggaaagcaggttgctggtgtaagtgtgacataactggtggaaatgaaaaccatcaaatctaaacgttgatttgccgtctgtttcctaaccggagcaggcgtttttttattttagaaatgcacttgtccgcggaaactatacgaatctgcaaaaaggtattcacgaaacgacagggtatctggaagcatttcacagaaatctgcttttgaatgagaaaaatgagtttgtgcgactgtctgcataaacttaaaataactcaaaaaacttgacttttaacagcactaagttaaaatgaaagaaattaagttaaaaggggaataagaaatatccttacaagcgtatacggaatttctataaaatatgaagcagggaatcatcaggattctttgcctgtttatattgcagggagttatgattttcacacagcatatattggaaacagacgctgtataatgcttactccgacagaagaacttgccacacttccggcattgaaaaagcaaaagcatatttgacgactcctttcagaggataacagtgctgacgatagttccattattttatcttttggagatacaagcttgtttctcaccacctatagaggtgggagtcatctcccagctgatatatatagttaataaagagaggtgcatatgctatgccaggtatactcgtggttgaagatgatgaaaatttaaatcgtggaattacattttcactgaaaaaatccggatatgaggttttttcagcagaatcagtgaaaaaagcgaaaagaattgcaagtgataat

SEQ ID NO: 292 - DNA, 15903 bp, unidentified
  source 1..15903: mol_type = unassigned DNA
  misc_difference 10807: note = a, c, g, or t
  misc_difference 10808: note = a, c, g, or t
  misc_difference 10809: note = a, c, g, or t
  misc_difference 10810: note = a, c, g, or t
  misc_difference 10811: note = a, c, g, or t
  misc_difference 10812: note = a, c, g, or t
  misc_difference 10813: note = a, c, g, or t
  misc_difference 10814: note = a, c, g, or t
  misc_difference 10815: note = a, c, g, or t
  misc_difference 10816: note = a, c, g, or t
  misc_difference 10817: note = a, c, g, or t
  misc_difference 10818: note = a, c, g, or t
  misc_difference 10819: note = a, c, g, or t
  misc_difference 10820: note = a, c, g, or t
  misc_difference 10821: note = a, c, g, or t
  misc_difference 10822: note = a, c, g, or t
  misc_difference 10823: note = a, c, g, or t
  misc_difference 10824: note = a, c, g, or t
  misc_difference 10825: note = a, c, g, or t
  misc_difference 10826: note = a, c, g, or t
  misc_difference 10827: note = a, c, g, or t
  misc_difference 10828: note = a, c, g, or t
  misc_difference 10829: note = a, c, g, or t
  misc_difference 10830: note = a, c, g, or t
  misc_difference 10831: note = a, c, g, or t
  misc_difference 10832: note = a, c, g, or t
  misc_difference 10833: note = a, c, g, or t
  misc_difference 10834: note = a, c, g, or t
  misc_difference 10835: note = a, c, g, or t
  misc_difference 10836: note = a, c, g, or t
  misc_difference 10837: note = a, c, g, or t
  misc_difference 10838: note = a, c, g, or t
  misc_difference 10839: note = a, c, g, or t
  misc_difference 10840: note = a, c, g, or t
  misc_difference 10841: note = a, c, g, or t
  misc_difference 10842: note = a, c, g, or t
  misc_difference 10843: note = a, c, g, or t
  misc_difference 10844: note = a, c, g, or t
  misc_difference 10845: note = a, c, g, or t
  misc_difference 10846: note = a, c, g, or t
  misc_difference 10847: note = a, c, g, or t
  misc_difference 10848: note = a, c, g, or t
  misc_difference 10849: note = a, c, g, or t
  misc_difference 10850: note = a, c, g, or t
  misc_difference 10851: note = a, c, g, or t
  misc_difference 10852: note = a, c, g, or t
  misc_difference 10853: note = a, c, g, or t
  misc_difference 10854: note = a, c, g, or t
  misc_difference 10855: note = a, c, g, or t
  misc_difference 10856: note = a, c, g, or t
  misc_difference 10857: note = a, c, g, or t
  misc_difference 10858: note = a, c, g, or t
  misc_difference 10859: note = a, c, g, or t
  misc_difference 10860: note = a, c, g, or t
  misc_difference 10861: note = a, c, g, or t
  misc_difference 10862: note = a, c, g, or t
  misc_difference 10863: note = a, c, g, or t
  misc_difference 10864: note = a, c, g, or t
  misc_difference 10865: note = a, c, g, or t
  misc_difference 10866: note = a, c, g, or t
  misc_difference 10867: note = a, c, g, or t
  misc_difference 10868: note = a, c, g, or t
  misc_difference 10869: note = a, c, g, or t
  misc_difference 10870: note = a, c, g, or t
  misc_difference 10871: note = a, c, g, or t
  misc_difference 10872: note = a, c, g, or t
  misc_difference 10873: note = a, c, g, or t
  misc_difference 10874: note = a, c, g, or t
  misc_difference 10875: note = a, c, g, or t
  misc_difference 10876: note = a, c, g, or t
  misc_difference 10877: note = a, c, g, or t
  misc_difference 10878: note = a, c, g, or t
  misc_difference 10879: note = a, c, g, or t
  misc_difference 10880: note = a, c, g, or t
  misc_difference 10881: note = a, c, g, or t
  misc_difference 10882: note = a, c, g, or t
  misc_difference 10883: note = a, c, g, or t
  misc_difference 10884: note = a, c, g, or t
  misc_difference 10885: note = a, c, g, or t
  misc_difference 10886: note = a, c, g, or t
  misc_difference 10887: note = a, c, g, or t
  misc_difference 10888: note = a, c, g, or t
  misc_difference 10889: note = a, c, g, or t
  misc_difference 10890: note = a, c, g, or t
  misc_difference 10891: note = a, c, g, or t
  misc_difference 10892: note = a, c, g, or t
  misc_difference 10893: note = a, c, g, or t
  misc_difference 10894: note = a, c, g, or t
  misc_difference 10895: note = a, c, g, or t
  misc_difference 10896: note = a, c, g, or t
  misc_difference 10897: note = a, c, g, or t
  misc_difference 10898: note = a, c, g, or t
  misc_difference 10899: note = a, c, g, or t
  misc_difference 10900: note = a, c, g, or t
  misc_difference 10901: note = a, c, g, or t
  misc_difference 10902: note = a, c, g, or t
  misc_difference 10903: note = a, c, g, or t
  misc_difference 10904: note = a, c, g, or t
  misc_difference 10905: note = a, c, g, or t
  misc_difference 10906: note = a, c, g, or t
tcagatcgccacatcctgccactgtccgccgatcagttcgcgggtggatttgaacccggcctttttcagcagttcgaatgcttccgcacgtccgtcgttcaccaggtcgggatagtggcagtctgagtttaccatcaccggaatatccagctcacgtaagcggtgcagatagtcggtatgcgggtagacctcctgtttcttcacgaggtttttcgtgttgacttcgaccatcagtcccttttcggcgatcaggtgcagacagtcgttgaatggtttttgataccagtccgcttgcaggtcgaagccttcgcatttgtgcccgttcatgtatatcttgtccatgtgcccgacaatgtcgattccgcctgcctcgatcattcgccgtgtggaactgaaatagtgggcgaccagcttgcggatatctccgtcgtagtaggcgtcgacagacttctggtactcccggaaaggaccgtcgatacacaccatattctcttccgcaagcggctgtgcgatcggaagaaagtggatggaaccgatacggtaatcgagcggcagattgcggaagtaggggatggacgcgttgtagctctcgtctaagaaatcgatttccagtcctacgtatatttccaaccggtcactgtatttctttttcagtcgttctatttctgtcagatattcgggcatatcgtctttagacatgttccagaatgtttcgaacggcagtggtgaatgggatgaaaaaccgtaggcgcggaacccgtgcgcaacagcgaatttaatgaagtcttccggcgtgctccgaccgtcacagaatgtacaatggctatggtagttactgagttgcataaatttttacttgtaaaagggcaaagataatttttttatcccgaaagacaacctgtttgataaaaaaaggcttgattgctgcctaagggttagcggcagaatcaagccttgaaaaacacgtgaataatgaaaaatcgtatgttttattttattacgttcagttcttttccaactttgataaatgcagcgattgctttatccagatgttccgtttcgtggcctgcggacaactgtacgcggatgcgggcctggcctttcggcactaccgggtagtagaagccggtaacataaatgccttcttcctgcatcttggctgcgaaatcctgggataatttagcatcatacagcataacggcgcagattgcggactgagtcggcttgatgtcgaaaccggctgctaacatcttttcacggaagtagctgacgttgttcatcagtttcgtatgcaaagcatcgctttctttcagcatcttgaacatttccaggctggcgcctacgatagcgggagcgacagagttagagaacagataaggacgggagcgctgacgcagcatgtcgatgatttctttctttccggttgtgaatccgcccatggcgccaccgaatgctttacctaacgtacctgtgaagatatcgactcttccgtatacattatattgttcagccacaccgtgtcctgtcgggcctactacaccggcagagtgggattcgtcaaccattaccaatgcgtcgtatttttctgccagttcacagattttgtccatcggggccacgtttccgtccatagagaacacaccgtctgttgcgatgatgcgatgacgttgtgcctgggcttcttgcaggcaacgttccaggtcggccatgtctgcattggcataacggtagcgttttgccttgcaaagacgtacgccgtcaataatggaggcatggtttaaagcatcggagatgatcgcatcttcttcagtgaacaacggttcgaacagaccgccgttggcatcgaaacatgcagcgtacaggatcgtatcttcggttttgaaatagtcggagatagcggcttccagttgtttgtgcagatcctgtgtcccacagatgaaacgtacggatgacatgccgtatccgtgtgtgtccatagcttctttggcagccttgatcagacgttggttgtcagacaggcccagatagttgtttgcgcagaagttcaaaacgtcgcttcctgcgtttactttgatgtcggctctttgaggagtggtgatgatacgctcgttcttatacaatccggcagctttgatgtttgccaattcctgagtaaggaaatctttcagtttaccgtacataactttgttttttgttagtatttttaattaagttgacaattatatctctattatcgcagacaagtggcaaaatattattcttgaaaccatttttttctttgtctctgatttgtctgccgatgcggcaaaggtcatattttttttgaatatataggctaaaaaatacaagaaattcataccggaatgtttttattctctatacctttgccatcgaaaaaacttaaaagaacatcaaacgcaatgaagaatgtattagtaattggttctaccggtcagattggatcagagttaaccatgaagttgagaggtatctacggtggaaacattgtagcaggttacatccccggacaggagcctaaaggcgaactgctggaatcaggaccttctgcaattgtcgacattacaaacgaacagcagattgctgagactgtgtccaaatataaggtagatacgatttataacttggctgcactgctgtcagccgttgcagaagcaaaaccgcagcttgcctggaaaatcggtatgggcggtttgtttaacgtattggaagttgcacgtgaaatgcattgtgctgtattcactccgagttcaatcggtgtgtttggcaataacacgccgaaagacaagactccgcaggatacgatccgtaacccgcgtactatgtacggtgttacgaaagtttcaggcgagttgttgagtgactactacaacatccgtttcggcgtcgacacccgttccgtacgttttccgggacttatctcctatgtgacacctccgggtggtggtacgaccgactacgcagttgatatctattattcggctgccaaaggtgagaagtttgtatgtccgatcaagcagggtacattcatggatatgatgtatatgccggacggtctgcgtgcagctattgaaattatggaagccgattcgacgaagttcgttcatcgtaattctttcaacattgcatccatgagctttgatcctgaaattatctacaacaacatcaaaaagtatgttcctgacttccagatggaatatgatgtggatccgttacgtcaggctatcgcagaatcatggcctaactctttggatgacacgtgtgcccgtgaggaatggggctggaaaccggaatatgatctggattccatgactcaggatatgttggctaaattgaaagaacgtttcaataagtaagaattaattttccgatcattagcagatcggtaggaaagaggcgactgcccggtgagatcggaagagcggttcagcaggaatgccgggtgcgggcagtcgcctctttgtttggatcgtttttattcagtattgtaggctgtttcaatcataatgtgtctgttgcttgtgcagggaatgactaagtcaaaagtgtatgaaaaattatgttgtaaaacatgaaatggttaaatcaggttaagagaaagcttttttttgtggaaatattatgctgcataacataaactctctatatttgcactgtgtttttcatggtattagatttaaggttaacaatgaagattggctgtccgtgaggatagcctttttttatttatacccggttgatgttgtttcctccgagaagcgatcattttatccgaattgcccgttcttttggtattcttgattatatttgtatatctgaaaagattcattgtaataaaaatatctttatatggaaatgtacaaagcaaatgataaccggtatgccgatatggcttataggcgttgtgggcggagcggattgctattgccggtcatctctctgggattatggcataatttcggcagtgtagatgtgttcagtaactttattcagattgcgtatgccgctttcgacaatgggattacacattttgatcttgccaataattacggtcctgtgtatggatcggcagaggaaaatttcggccgtatcctgaagaaaggtctggggcaatatcgggatgaacttgttatttccacaaaagccggatatgacatgtggcctggtccgtatggcaactggggaagtcgcaagtatctgatggcaagccttgaccagagtttgaagcggatgggattagaatatgtggatattttctattcgcatcgtccggacccacagacgccgatcgaagaaacgatgggagcattggctgacatcgtccgccaaggaaaagccctgtatgtcgggatatcgaattacactgccggacagacggaaaaagcacttgccgtattgaaagaacatcgtgtgccttgcttgatccatcaagcgcgttattcgatgctggatcgcaggatcgaaccggacttgttgcctctgttgaagcaggaaggagtagggatgatcgccttctcgccattggcacagggcatgttgacggataagtatctgaacggtattcccgataattcgcgtgcggccaaatctacaggccatcttcaacgtgaacaggtgacggaagaaaaaataaataaagtaagacaactgaatgaccttgccaaacaacgcggacagacgttagcggaaatggcgattgcctggctgttgaaagacgaccgggtgacgagcgtcctggtgggagccagttcggttgcacagttgatagataacctgaaggcgttacaaaatacagccttttcagcggaagaaatacaaatgatagaaaatatattacagtaatatacactgataaatcatcatttattaatccaaacaattaatgaaaccattcttatatcaggttgcatcccttttttattctgaatacggggcggaagtgagccgtctggcctttgttttcccgaatcgccgtaccgggctgttcttccagaaatacttgtcggaagtatctgagaagcctcttttctcgccgacgatcctgacgatcaacgatctgtttgtacagttgagcggaaagcaggctgccgatcggatcagcatgctgtttaaactatatgatatttatttgagacatagcggttcttccgaaacgttcgacgagttcttgtattggggggaaatgctgctgaatgattttgacgatatcgataaatatatggcagatgcccgtatgctcttcaccaatgtgacggacctgcgtgagatagagaatgattttagttttctgagccctgaacaaattgcggctatccggactttttggtcttctttttacccgaaaggagatacgcccaaccaggaacaatttctggcggtctggcagattttatatgccctatataccgatttgcgggaagcgcttgccaccgaaggcaaaggatatgaaggtatgatttttcgggaagttgtcgaacagatggagaaagacgaatgttgcgacctgccctatacaaaggttgtatttgtcggactgaatgccctctcggtggctgaagaacgtttcctttccgggttgcaaaaacggggaatagctgatttttactgggattacgcctctccgaaagtgacggatccggataataaagcctcttacttcgtggagcgcaatttgcggcaattcccgtcgcaattaattgaaaatggacaattgactattgacaatgaagatgacgacaaaaagaagatcgaggtgatcggcatcccttccggaatcggacaggcaaagcaagtgtgcagcattctgaacgagctttgcaaggaagacgaaatgagtgcggaagaagcgttgcggacggctgtgattctgccggatgaacatttgttgattccggttctgaatgccattcccgaacagatcaaacggatcaatgtgacgatgggatatccgttggccggtacaccggtcgcatctttgatggaatatattctggctttgcaaaagaatattcgttatgtggaccggaggccggtgttctatttccgggatgtcttgccaatcctgaaccatcggtatatctcgactacttctccggagatggtttctaatctggtaaaagatatttcagaaaacaacaagatttacatatcgtatgacgatctgaataagacgccattgttgtccatcctctttactccggtgactgcggtggaaactttctccgattatttgattaacgtgttgcaggaactgaataaagcagttgaaggtggaaagttgaaagttgaaagtgtaaatagtgacacggagccactttcaactttcaactctcaactctcaactattaacgacatcgaacaggagtttatcttccattatttcgctacggttaaccggatgaaggaagtcatgcgggaggcgaatgtagaaatgaaaatcgacacctatttccgtttgctgaaacgtgtgacggacacaattacgattcctttccaaggtgaacctctttccggtttgcagatcatgggtgttttggagactcgtgcgcttgactttgaccggttgattatcctttcgatgaatgaaggaattttcccgttgaggaaagcggctaattcatttattccttataatcttcgtcgtggattcggtttgccgacatacgaacatcaggacagtgtttgggcgtatcatttctatcgtttgatttatcgtgccagccatgtcagcttgctttatgatactcggagtaacggattgcagacaggcgaggttagccgtttcgtgcatcagttgcattatcattatgaggagccgatacagaataagctggttgtttacaatgtctcttcttccaagactcctgccttgcaggtagctaagacggaggaagtcatgaaccgtctggctgatttccggagtggtgggacgcgggcgatatcggcgagtgcagtcaatacctatctggattgtccgcttaaattttatttctccgttgtcgagggaatacgtgaagaagaggaggtaagcgagacgatcgaaagtaatgtttttggaagtatcctgcataaggtgatggaagaattgtatcagccattctgcggaaagatggtgacggctgatctgctgaaagcgatccgaaaagatacgcctatgttgacgggagcagttgcccgtgcctttgccgaaattttctttaaaacggacattgttcgtccactcaccggacaaaacttcctgatcggcgagatgattcgcaaatatgtggagaaagtgctggaacgtgacgcaaaacagactcctttccgttatatcgaatcggaaaagaagataaaatgccttttcccattgacggataaaagcaatatccagttgaaaggatttatcgaccgtatagacgaagtacgcgatgtcgtccgcattattgactataagagtgggagcgggacgacgcagtttacctctgtagaagctcttttcgacaaagcagatacggatcgttccaaagcggttatgcaggtctttatgtatgcatggatgtttaacaggtcagttcagctttcaacagctattcagccgggtatctattatatgaggaccctcttttcttcctctttcgatcctggaatttaccatcgtacagaccggttcaaaacagaacaggttttggacttcgccaactattgcacggattttgaagacagcctgcgaaattgcttggatgaaatcttcgacacagaaaccccattcgtgcaaaccccgaacggcaaagcctgcatgtattgtccgtttaaggatatttgcggaaaatagtgtttttacagatttcccatatattcatccacaatttcattcaggaagcggttgaatggaagaagctttcgaaaacaatcgatggtttcttccatccagtccggctggctgaaaaaactgtcgggcttaatacctataacgctgaagtctttgtgccttaatatatgaccgtaaggagaatcggaggggaaacctgccgggatacgttttagcatgtccccttcgagtgacgggtacagagctttgaaggaaggctcttcgatgatggaaacaaattcatctatgttattgtatatttcacgtcgaaggactttcaatatttccggtttgggataccagataccaccggacagtacgcagtattccggttcaagatgaaagtagtaagctccccggatactatgacgtcctccttgagcaatacaggctgacatataagtcttgtaaggcgacttgtcgaggctgaagcggatgtcgcgattaatacggaacagacatttccgtgcatccaatccccgtatatcaggatcaaatacgctgattcgttcgattaactcttgtacttcgttgataaaagcacagcgaagtttgtcatatcgttctctattttcatggaaccaaacggtattattgttgcgtcgtaaatcgtctaagaatcggataatttctgcattcatattaggatattctttttttattgtattttgtatctccattgtttcggagtcatctgtttcatctttttgaaatagcgattgaagtagggaatgtcggtgaagccgcattgccaggctatttcgttaatgtccttatccggaaagttgcggagtaaagtgccaacggcctctatccggtattcgttgatgaagtttgtaaacgttttgcctgtttcacgtttgaaaaacgagcagaacgccgttgtgctcatgctgattacgtttgcggcgtccgaaagagttattttctccttgtaatgctcgatgacgtatttgaagatcagttgcatacgttgcatgtttttggtaatgccgttgaataccgtttcctgcaaaccgatagggattaaatcggttgtggttccgatttgttgcaggatgcggatcaacatcagcatcctttcgcttgcattcaggaggttcatttcttctaagcaggatttgatctttccggctgtttcgcctgtcagcaggatgccttgctggattgccgataaccggtgagcggcatattcccattcggtaaaaaaagacaggccggtttgtagcaagtcgggattgaattgcacaactatgcatctccgttttccatcaggctcgcagctttcggggttatacatccaacaatgtggttggttggtcgggaccagtacgacttctccctcctcgaacggctccagaaagtcgcctatcatccggtagcctgaacctttcacaacataacatatttctatttcgggatgaaaatgaagaggcatttcgtctttcgggtacaagctggaataatcgtagcgtaatgaggcacaactatcttttttgatttgttcgaattttagtttctcgtgcatgtcggatgaactttctgataaaacacagtaaaattagacaataattgcataatctgcgacaattacacttaataattttgttgtttctttgcggccggaaaaacagaaagattgaataggttatgaagaaaggtttgtatgcattgtcttttggcacatttgggttggggattgcagagtttattatgatgagtatcttgccggatgtggcggcaggatttgatatttccttatccgaagccgggcatcttatttcggcttatgcgttgggggtatgtgtgggagcaccgttggtagtggtggtggccaggagttggccgctacgtacgatcttgcttgctttggttgggctttttgttgtcgggaatctgcttatggctctgtcggccgattattggatggggttgtgtgcccggtttgtatcggggttgccgcatggggcttatttcggagtcggttcgattgttgccagccgtttggcggagaaagggaaaagcacttctgctgtagctattatgataatggggatgacgattgccaatttgttcggtgtcccggccgggaatttcctggggcactttctgtcctggcgtttggtttttgtgattgcagcgttgtggggtggcgtaacgatttggtttatccggaggtgggttcctgttttgcccgccctgccggcgacgaatctgaaagggcagtttcgttttttgagaaggccggaaccgtggatgctgattgctgctaccatgttaggaaacgggggagctttttgctggtatagctatgtcaatccgttaatgacggaggtgtccggtttcagtgtcgggacaatgcctgtattgatgttgctggcgggtgcgagcatgtgtgtcggtaactatttgggagggcatttgtctgatcgttttacacctggtatcgtagcgatgtccatgcagtttctgatgtttgcatcacttctgctgatttatttttttgcttcgtacggctttttgtccgctttgctgatgtgcgtttgtactggttgcctgtttgcagtttcttctccacagcaattgttgttgcttcaatattctcctggcggagagatgatgggcggggcgatggtccagcttgcttttaatttggggaatgccgtgggggcttattttggaggattgtcgatcgaacatggggcagggctggaaagtacggcattgatcggttcgttttttgccctgttaggaactacggtgtttctggtattcaactatatggtgtttaaacctcagaggaaattacttttaaaggggggaatataatttccgaggatcaagacggtgtttttggagataaaaaacagccgtccgaaatcgggacggtgtttttggagataaaaaacagccgtccgaaatcgggacggtgtttttggnnnnnnnnnnnnnnnnnnnnnnnnnnnnnnnnnnnnnnnnnnnnnnnnnnnnnnnnnnnnnnnnnnnnnnnnnnnnnnnnnnnnnnnnnnnnnnnnnnnnagataaaaaacagccgtccgaaatcgggacggctgtttggatttataatgtctcttgtttcagttgttcgacgaaacgatcgattcgctgtagttctttcggaatatcgattccctgcggacagtgtggattacattggttgcaactagtacaatgatccgcttggcggagtttcggtacactgcggtcgtacccgatcagataagcccggcgagcttcgcgatagttttcatcctgtccgctctgagggacattcccctcgttcacacatttattataatgaagcaaaattcccggaatatcgataccgtaaggacaaggcatacagtatttgcagtcgttacacgggatggtcggatactgcatcatcaagtcggcggtgtcgaacaagaaacggttttcctcttccgtcaacggttgcaacgggcagtaggtgcggagattgtcttgcaggtgctccatgtaagtcatgccgctcagcacggtgagtacgccgggaaacgagccggcaaaccggaaagcccaggaggcgacgctccgtcccggttcgcgttgcttcaggcgggcgacgatatggtcgtgcacgttcgaaagccgtcctccgaggagtggctccatgatgatggcgggaatcccccgtttctgcaattccccgtacagatattccgcgtcggtgtttcgcgggttgatctctttggcatgtttccagtccaggtaattcaactggatctggacgaaatcccattgatattcgtcgtgtttcgaaagcaaataatcgaacacctctatatctccgtgataggagaaacctaagtttcggatacgtcctgccttgcgttcttcgagcaggaagtcgagtatgccgttcttgacataccggttttcataggcttccataccacccatgccgatcccgtggagcagcatataatcgagataatcgacttgcagctccttgagcgaattgttatacatcgcgatagaggcttcgcggctccatgtgtcgggagagaagttcgaaagcttggtggcgatataatatttgtcgcgcggatagcggctgagggcgatccccatagcatgttccgaacgtcctttgcaataggcgggcgaggtgtcgaagtagttcacaccgtgctcgatggcatagtcagtcagccggttgaccatctcctggtcgatttcgtcatcgctgtctcttgcgctgtttttggcaatggtcggcaggcgcatgtatccataaccgaggatggaaactttgtcttttgtggacggcgtcgtgcggtatgtcatccggtccgtgggaataggggtggagcttcccggacctgaggccatcccgctgtccgaactgcacccggagagcaacggggcggtagttgccgtgctgattcctacaatcttcaggaaatcgcgacggtttatcgcttgatgattgtcttttttcatatatgatgattcttttatttcttgatcaaatattccggtgttgttcgtgtccttccacatatatggcgctgaacggacgcgacgggcacaggttttcacaggctccgcagccgatgcatttttcctcgtttacgaccggcagttgaggcgaatccgggtcgttcgggtcttttgccaccatcaagatcgcctgggtagggcaatggcgggcacagttgccacaagtgacgccgtcccggttgacgatgcaattttcctgaatcagtacggcatgtccgatctggatagccgtcttgtccgctttcgtgatcggacggatcgctccggtcgggcaaacttccgaacatttgacgcattcgggacgacagtatcctcgctcgtacgatacttctggctgcataaatgtttgaaggttccccgaaggacgcagcacatggttcgtacaaaccgatacacaaagctggcacgcggtgcaatgctgggagaaattggcagcgctcagcgagcccggaggagtgatcggggttgtccggtccggtttctttttatcttcgatgatggccagtccgccgtcgactttcttgtccgggagttgtactttttcctgggctttcagtgcggctgaagtggcaagtaatgccgatacggtaaagaatttgcgacgatcgggcttgtctacggccggttgggcggtctgtatttccgccttgtttgtttttctgcgtgtatatcggatggctccctgccggcatttgtcgatacaatccatgcaggcgacgcaacggctgtaatcgatctcgtgtgctttcgcattgatacaggctgctttacaattgcgggtacacaaaccgcaaccattgcatttggacgtatcgataaccggcttgaaaacggaaaaacgggagatcaatcccaaaaacgttcctaccgggcagatcgtgttgcaataggttcgcccattccgccaggcaagtatgatcagtataatgaaagtaactgtggcaatgataaaggttgggaggctccgtagccagacttccgtctcgtagaaagcataactgcccgcccgttccgccaagtaggccagaaagttgttcccccattgccagaggggtgcgaataagttagaggcgatacgcccgtaagcgctgtagggtgcgatcaaggccgcccatgcccctaacccactgatcatggcaaggataaagatcaccatcaccccgtatcttaaccaggacaaggcgggggaataccggaaacgatttttcttccgtttccccgccagccatgaaacgacatcctggaatataccgagagggcagattacagagcagtaaacccgaccgaaaatccaggtcaatgcaatgagcaacagcaccacgccgaggttgagtgccaataccgccggcaggaactgtattttcgccagccacccgaaccatgtatgcaacgtccccgtgaaatcgagaaacagcagggtgacaagcgtaaaacagataagtgcagttgtaagtctgatcgttcgcaacataataaactctttttagatagtctgttattttatgttgcaaacataataaaaggaaatggtttgcaacttacaggaattacggattgatgtaccaatattacggttttgtcaacttctgcaaaaagtctggctgacaaaccttagaacttcaggcaaggccgtccgccaataggtccagctatggccgccgtctcgtactcggaattcatgcctgatccctttctgcttcatgacctggtgcacctgcatgtttccgtccagcaggccgtcgtcatcaccgcaatcaatgtaataacgaattttgggcaagttgttttgattccagtcggaaaggatcttcaagacattgttttgcttccagtgttcgtctcccggcccgaacaggcggttgaataaatccttgtgcgatttgttttttcttgcctccatgactgtgtcgtcgaaaacggcggcactcaacggagcacatgcgcagaacatgtccggatgatgcaagctgtacaggaatgatccgtagccacccatcgacaatccggcaattgcccggctttctttgtcactgcgaatccggtatgttttttccatataggggataagttcttcaaaaaacatgtcttcataaggtacttttccatcatactggttgatataccaagtgtcccatgcgtccggcatgacgattatcatcggcacggcttcctcgtttgcgatggcacggtcggcaatcgttttcatttgtcccatctgtatccagttggtttcattgtccgtataaccatgcaagaggtagaggaccgggtaattccttttcgaggtgttgtagtcggaaggcaggtagatggagtaggaaactttcctacctaatttgttactttcgaaagagagcgattcgaaaactgtactttgcgaatatcctgcaacgttgaatagaaagcacaggatacaatagagataaaatttgtttttcatatactattaataattagatttgtttgtctggacagagtaagaataagagaagagagcttgccggaaaacccattaggtttcgacatactctctttcccttattgggaaattaatccgccaccggatagggaaattcggtcaaccctttgtacatgaattgataggtcggaacttcgattcccaattcttgggcagttcgtacgacatagcctgtcaatgtttccacttcggtgcgattgcctttttgaaaatcactgtgcatggaggttgtggagttgttaggcatgatcttctgggcgtcgatggcggagaatacttgaccgtccggcagacgaatccctttggcttctgccacgcttttgagttcataacctaatgtgatgaacagatcgatatggttatttaccacttcgccaatcgtttcattgaaataggaggtgatagtggcggcggtcgagatcatgaagaatttcttccagatttccaagtcaatgtcatccggtattgtggtaaggatacgggcgttggccaatatatcctgtaagtctttctgtcgtttcttgtttccttgtttacttccgaagaacatccggtcctttatggtgaacttttccactcttcccggtctgaccaagcgggaaccgatgtaaacgcatcctttccaaacctcattgttcggtaatagcttttgtatgcgttccgctatatccgctccgttcagcaggggaatgataaccgtattagggccgatgatcggagtcagctgaactatattctcctccaagtcgtagcttttggtacagcaaaacaggtaatcgactggtcctatttcagcaggattgtcggttgcgagggttggttttgctttgatcgtcaggaatgtatttttgacttcgatgccgttcttacgtatctcttccaggttttcaccccgggaaatgaaatagatgtcaatatcttcagagtctttgtaacgggcagctaatagtcctccgtagtagccgcctacagctcctataccggaaatcgctattttagttttattcat

SEQ ID NO: 293 - DNA, 10194 bp, unidentified
  source 1..10194: mol_type = unassigned DNA
ggtgatggaggcgcccatatccacacaagagttaatggcgttgaatggggcattggctcccagcgtgtagcaaccaatgtcgctgaacaccttataagtgggatattcttctttcaatacttgggtcagcaccgtgtacatgtcgcgatggccgcaaccctcgcacaaagcgggcgggcgcatctctaccagagaaggaacgctgaattcagccttgttctccttgcctacggcacgtgccacgctgtccgggttcagctctccgtcttgtgaaagagtgccgtccaaacggccttttactttgatgccgatgcccagatagcctttcagttgtttttctacgaacggttgtccgtcttccagtaccagaatctcgtcacatgcttctaccagctgcatcagctgtttcttgggcaacgggtattgtccgattttcagtaccggatattcgcaaccttcgggatagttttccattaggtagttgtagccgatgccgcatgccacgatacccagctttttgttggggccgtcggtatatttgttgtaagcggagttttcagaagctttgataaattcgtcctggcgttgcagcaatgctttgtagcgtttgcgtgcattacccggcaggaggatgaactgacgcgggtcttcgctgaaggaaatctcattctgcggttgttgctccttgcgctctacgccggaacgggagtgtgccaggcgcgtaaccatgcgcatcaggatgggttcgccggtctgttcggagaagttgaatccgttgtacaccatgtcgtatgcttcctgctggttgcttggttcgtacatcgggatgagggagaagtcgccatagaaacggctgtcctgctcgttctgagaggaatgcatgctggggtcgtcggcagcaatgattataagaccaccttttacgccggtaatggcagagttgatgaaacagtcggcagccacgttcatacccacgtgcttcatgcacaccagtgaacgcttgcctgcaaaggacatgcccagggcagcttccattgcagttttctcgttggagcaccagcggttatggatgttcttttcggcagtaatcggtgccatctgaatatattcggtgatttccgtagaaggagtgccgggataggcatatacacccgaaagtccggcgtctaatgcagcttgtgcaatggcttcatcgccaagtaagagttgcttgctcatatctgaatatttaagtgttagtcatggattaatatttgacgcaaatataggattttgcttttattttatcagcagattacttgaaaatctttctttcgtttaatgcattccaatattttcttgcatttttcatgtgctcggcataattggatgcaaagttatgggtgcccgagaagtcctctttggcacacatgtagaggtagttgtgtttcgtatggttcagcacagcatccagcccgatgggtgaggggatgcgtatgggaccgggaggtagtccggtgttgagataggtattgtagggggattctactgccagatgggcattcgtaattctccgcaagccgaagtcctgcaaggcaaatttgatggtagggtcggcttgcagaggcatgccggtgtgcaggcggttgatgtagagccctgccaccattggtttttcgggattgttgtttgtctcttcctcgacgatggcggcgagggtgcagacttccgtcggggtcattccgatggcggtggctttgtctaagcgttcctggttccagaacttctggtgctctttttgcattctttcgaagaactcttctgcactcatgtcccaatagacttggtaggtttcggggatgaagaggcagggcagggtctctttgttgtatcccagtttttgttggaatgcggagtcgttcatcaatccggctatttcggcggagtctatcatgagctgtttgcctacgctgcgtgccagccggtccagtgtgcgtacgctgccgacggtgaggttcgtaggttcttgatatccgcggtacagacggctgaatacgtgatatacgttttcccccggccggatggcgtagcgtccggtgtgtatattttcggaatatttcttgtattgggccatccagcggaagccggtgaagcttcgaggatggccttgttgttccaccttattatatatggagtcggcggtgtcgtcgcggtctatatagatatagactgtctttttcggatggaattgcggggcaaacagatagtagtatactgttcctgcacaagctgctccaataagaatcagtgcgacgaatgttccgataatgattttcttcttttccattttgttttactgcatctttagtcgggcaaagttagtaaaaaatggagtgaaaaccatcaagtcatatcagttaattcgatagctgacgaaggctatgcgtttgctgtccggtgcccatgagttgacattgatggtgccttgtccaccgaaaagctttaacaatgtcttgggttctccaccgtttgcgggcattaggcgcagctctacgttcttgtttgccaggtgctctcccggttccaggtcacctttgtagtaggtgatgaatacaacggattttccgtcaggggagatgtgggggaaccaggagttacgggtttcgtcaaaggtcatctgggtctgttcggagccgtctgccttcatgcgccagacttgcatgagtccggtgcgtacggaattgaaccagatgtattgtccgcagggggaatattccggtccgtcatccagaccttcggcagtggtcaggcgggtttcttcacctccttccgccgggatggtatagacgtcatagttgccgtttcgttcggcgcaataggcaagctctttgccgtcggggctccagccgtggaggtagctgggagccataggtgttattaaacggggagtgccgcccgtgatgggaagtgtataaatgcgcgatttatagtcttctttcgtcccgtggctgatggctatctgctgtccgtcggtcgagaggacgtggtcgttgttgcagttttgggcaaatccggtgtttatcagttccggttcggcaggcgaggtgggggaaaggcggtaaagctttccgtcgttgttgtatagcagccattgcccgtcgggcgtccaattgggagcttcaatccggtagggaaattcttttacgacagtccggttaccgttggttacatccagtatttcgaggacgctggtaatctcgtttttttgttgagcggttgcggtcagtgcaacagttgcaaagaaggggattagatagggtttcatgttcatatcgtatttaataaatctccgcaagatacattttttattggaaactacatagtcggagcatgcttttttcagagagaatctgtagtgatggtcgaatgcgtagtgcttatcatatgaatagtctccgggattcttgaaatagttgtccacatactgccagttgtcggtgtcgagcggcgtgtgcgaagtcatgtacgatagggagcttttatctctactatctcgctgtccagactaatcaggtctttgcccaagcggacaatgcgggcatcttcgggcatgtagtcggtgccgacttccccctttccgcctccaccgaatgacaaccatcctgtaccttcgtcatctatcacggcacccgggtcgaaaggagccctgcagtggcctaatccttgggtgaactggctcaccagcatacgtcttaccgtccgattccacccgcgatacgatggatggcgcccatgaggctataccccatggcgagagggcctttacgtcaatcagtccgtgataagtccaatttaccatgtcatcggtggacagcatgaccagtgaatgggatgtattggtatgtgtttttgccgtattttcccacactgtccagttgctgggtgtcattggttccatacacatagagccttccgttgtattccaccgatgtcgggtcggccacaaaaatgaaatccaacagcgggttggcgtttccactgaagaattggggtgattctaccggacgcgtgtctttctttcttgaatcggaaagcgcccacacatcatttcctgcggatatagctgccagcagcaaagccgctgtaaataacttgattctttccatttttttatagtatgttatagaaacctatggtagccttttgattttggcttgtgttcttcaatcacctcaatcctttatttaagattgaaaaatcgggttattgaaaagttgccgcaaatattgggaattactatgtataatataaggtgtattatgtttttaataatgtgcctatatgtttcaagttatcattgtaatcagatggtgctgttttaaactagctttacttgctttgggataattatgcggctatggattaaactgtttggaagggcattgtgttttatgcaaatatattcgtagaagagcgttttttattctaacaattcttgaaaagaaaaagcactgattattccagataatcagtgcttgaatatcgagccgctagccagacttgaactggcgacctacgcgttacgaatgcgttgctctaccaactgagctatagcggcaataagcttttgtttacggggtgcaaaggtacatctttatttgaaaaggcaaaaagaatctctgttttttttagaaatattttagtgggataattttctatttgaatgtcctgaactttattgccataaaaattggataataaaacgaaaagaagcatctttgtcgtaggtcctatagcaaataagtctgatactgattatgaatttaagaatctattataaatatctttcttcacgcatagcgtccaaatggacggtgttgttggtagatgtaattatcgttgtgatttccatgctttctgcatgttttttgcaatataggctttcgtccgtatcttatgaaatttctttgtatgtatggctgaccattttggctgtcttgtgtaatgtctgtttctttcatattctccgtacttatgtgggtgttatccgtttttcctcttttgtggatatttatcgtgtgctttggagtcttacgataagctatgctgtactgtttttagggaattactgttggtctgtttcggggcttggagaaactttgccgaacagcattctgtttatggcatatatgttcaccttctctctgatggcttgtatgcgcattgctgtgaagatgctttatgaagctattgcttttgatgcacgtcattgcgtgaatgtttttatttatggattccatgggactggagtcaatgttgcaaaatccttgagagttagtcgtaataatcattatcgcctgcgtggctttatttcggacgaacctgatatgataggtaaacatacgatgggatgcagggtatatcccaatgatgagcagctgtttgaccgtctaaagaaaaagaaagtggatacaatcattatctctccaagcaaggtgtcggatttggaaaattccggaatgctggataaactgttctctcatgatattcatgtaatgaccgttcctcccttaagcgattgtatggacgatggactgataaaggacattcaaatagaagattggctccgtagagaaccggtacaagttgacgtgcgtaaaattacggcccatatcgaggggcgtagagtaatggttacgggagcggcgggagctgtaggaagggaaatcgtccgccagttggctacactgaatccttatcagttgattctggtagatcaggcagaatccccattgtatgatgtacagttggaattgtctgatcattggaagaatctggaggtccgtgtattggttgcagatgttgctaaccgtacgcgtttggaggctatatttgaagaaacacgtcctcaacttgtttttcattctgctgcttataagcatgtacaactgatggatgattttgtgtcggaggcaattcaaacgaatatatcggggacagtgaatattgcagacctggcggtaaagtatagagtgtcccgtatggttatgatatctgctgctaatgcacgtcatccggaaaatgctatggaatatagtaagcgtgtggcggaaatatatgtgcagtcatctgattgcaggttgaaacgcgacaaaggggaaactgatatgttcatagtacgtttgggtgaggtgtatccgacgaatactcattgtttgattaccatgtctgaagcttgtatgctcaccctggaagtgggagtcatgggggatgggggagaagtgtacattgtgggagggcctggggatggacttttggattctgtaatcagtgaaaagataaagcgtgaaaagccatctgttgatgattatgaacatgtgcgggaagaagtgctggccttggtgcaatatagttatactgaaaaaaaggctattttgattggactaatgaaaaaaatagtgccaattttcccgctttcttctacccaatgaaaagacgtgaaagtgacagctttttaatgctttttctgaaacttagaggtggaataaatgtatattataaaaataatatattacctttgtgcccgatttatatttattacaagaactcaaaagattaatcagaatatcttatgcgtagattaataacactattctttttggtatttactttgtcaggggtagcttttgctcagcagatgtcagatgatcaggttgttcagtatgtaaaaagcgctcagcagatgggcaaaaatcaaaagcagattactactgaattaatgcggcggggagtgacaaaggaacaagttgaaagaattcagaaaaagtatgaaaactctaaatctggaagtccgcagagcaatacccaagatgagaagcgttctcgtcaacgtggtgaaatgagtggcgtagtcaaagggctgcgtacaacttcggaaacttattctgccagacaaacggatgttgcaggggattctttacaaatgatggataatcgttccttgtctcaagagaaggaaacagaggatccgacttcgcaaatttatggtcataatatttttactaacgataatttgactttcgaacccaatgtgaatgttgctactcccgagaattatcgtctggggcctggtgacgaggtgattattgatgtgtggggagcttctgaaacaacgattcgacaaacaatctctccggaaggaagtattcttgtgaataatttaggaccggtttatctgagtggcaaaactgtaaaggaagccaataattatttgaaacaagaatttgccagaatatattccggagtaaccggaaatgttccgtctacccaagttaaactgacattaggagaaatacgttctattcaagtaaacgttatgggtgaagttgtggtgcccggaacttataccctctcatcatttgcttccgtatttcatgctttatatcgtgcaggtggtgtgaacccgattggtagtttgcgcagtattaaagtgattcgcaatggaaatacaatagcggatttggatgtttacgatttacttatgaaaggaaaaatgaaggatgacatccgtctgcaggatggtgatgtaattcttgtggatccttaccagtcactggtacagatattaggtaaggtaaaacgtccgatgttttatgaaatgaaacccactgaaaccgtaggtacattattgaagtattcaggtggttttacgggtgatgcttataagaaagcattacgtataatccgtaaaagtggacgtgagcatcaaatttataatgtggatgagatggattattccgtattccgcgtagatgacggtgataagataacggttgattccgttttacagcgttttgagaatcgtgtggaaatccgcggtgctgtatatcgtgaaggtttgtatcagttggacggtacgatgaatacagtgaagcagctgattaagaaagcggaaggacttcgcggagatgcattcttaaaccgtgctataatcgatcgtgaacttgaagacttgtcgcatgaggttatacaagtagatgtgaaaggtttgctgaacgggacggctgcagatattcctttgcagaagaatgacattttatatattccaagtattcatgacttgaaggaagaagctacacttaccattcatggtgaagttgccaatccgggtacatatctctattctgataaaatgacagtagaggatttggtgttgcaggctggtggcttgttggaggcggcggctacaacaaaggttgaagttgcacggcgcatgaaagatccgaagagtacatctttcagtactacagtaggccagaatttctcttttgatttgaaagatggcttattggtgggagaaggaagccaggatttccatcttgaaccttttgatgaagtttatattcgtaagagtccgtcttattttaaacaacagaatgttatggtgggaggagaagttctttttagcggtaattatgcactatcgaaaaaaaatgaacgtttgagtgacttgatagctaaggctggtggagtgactcccgatgcttatataaaaggagcgcgtcttatacgtaggatgaccgaagaagaattccgccgtaaggaagatgctctgcgtatggcgcaagcgggaggcggagattccatatctgtaaaaagattggatttgtccgatacctattctgtaggtataaatctgggagaggccttgaaaaatcctggttcagatgctgatatggtgcttcgcgagggagatgtattatttgttccggagtacgtaagtacagtgaaaatcaacggtgctgtaatgtatccgaatacagttttatataaaaagggtgaaagcttgaaatattacatcaatcaagctggtggttttggtaatgatgccaagaaacgtaaggtctatgtaatatacatgaatggtacagtttctcgtttaaaagcagggaacaagaaagccattgaacctggttgtgaaataattgttccaagtaaagaacagaaaaagaagatgactactgctgaaattctgggaatgggaagtacgacagcttctattgcagcgatgattgcgactatggttaatctctttaagtaatttgaattatgagcgaagaaagaatacaaaacataacctctccacaacctgaggaacaagaaatagatttgatagaactggcccagaaagtatgggctagtcgcaaattggtttttaaggcgtgtggtatcgctgctcttgtaggactggttgttgcatttagtattcctaaggagtactctacaagtgtgacattggctccggagagtggtggcaaatctggtggtggaagtatgggagcccttgcagccatggcgggtatcaatttgggcacttcttctggtgaggatgctttgtcacccgaactttatcctgatattgtaagttctactccttttctgattgaactgttcgatgttaaagtcaaggatcagaaagcaaaagtagacacgactttatatgcttatttgaaagaagaacagcgttctccttggtggagtgcaattttctccgctccttttaaggtgttaggatggacattgtctttgtttaaggatgaaccggaagagggggacgcaaagctggatccttttcgtcttactagagatgagtctgccattgcagatgctttaagtaaacgtatctctgtttccgtagacaaaaagacaggtgtgacaaccttgtctgttactatgcaggatcctttgatatctgcttcgctgacggataccgtgatgcattgcctgcagaactacatcacagattatcggactaataaggctcgtcatgatttggcatttaccgaaaaactttatggagaagcaaaggccagttatgaggatgcccagaagaaatacgcaaattttgtagatgcaaaccagaatataatattactgagttatcgcgcagagcaagagcgtttacagaatgaaatgaatttagcctatcaagtatatacacaagtgtctcaacaattgcagatggcaagagctaaggtgcaggagattacaccggtatatacggttgtccagccggctacggtacctttgaagcctgcaaagcccaataaattgatgattttgatcggcttcatgttcttggcaggtgtcggcagtgtgggatggatattatttgtaaaagatttattaaagggatggaaaaagcaaacaatatga

SEQ ID NO: 294 - DNA, 21490 bp, unidentified
  source 1..21490: mol_type = unassigned DNA
ttacagggattcaagttgttcccttgtgacggtgtagaaacgaccgactctttttatcggctcatatcggcactcccgattgtaattgaattggtaagtggtatatgtaagcccgttagaggcaggagtaagtttccaacattcctgcaatacctttctgacttggtgcttctccacctttacctgcgaatgtaccagcaaaagaagaatgtcgttgtggcagaacgagaatgtgtccgtgccgacactttccataatgtcaaggataagttcgcacatctctatctccaatcggttgcggttgctgcggataatcttctgcaaggcttcggtatgcagcaaagagggcgcaaaccacatacggctttccttttcggtggaaagttgtctgtattgcaggtaatacagaaaggcaggtatctcagctttcagcttttgcaggaagtctgtgtcatcggattgcagacggtctatcttgcgcacccaatagcgtgtttcacctgcatcaatgataacaggcagatactcgttgttggagcatagcacgaacttggcaaagaacgctatctcgtcacggtctttgcctttggcttccaccttgtaggaaagtgtggtgctgaggttcttcaaccgctcgctgtcctccctgcggttgagcaatacctcgtccaccacgatgagcagttttcctgcccagtcggaattgaactggctgcggaagtcctcgttggtattgaaagtgacattgttttgaaacacagctttcaggaagttcaggaatgtactcttgcccgtgttgcgttcttctgataccaacagcaggataggcagtttctgcacgggttgcaggtagagcaattgaagatagtccatgcccaattcatactgttcaccgaagatatggcgcaccaatgaccggatacagggaaactcgccttgttgcggacggtgtcctatcggctcgtagaggttcaggaacttgtccaccacgggacggtagtccacatggtcggggacggtgcagaagccgtcgtacttcggcacggtggcgagatagtccttgccgtagtcctgccgcagtgtttcgttgttccacacgatgcgcttcttcacatagcctccgttcagacggggctggttcactaacttgtagagggtagtacccacacggataaactcctcattttcaaagttgccttgtttcattagcacttcatttttttgtttaatcagtgcaaaactcggcaattagcgcagaacggattaacaactcacgcatacctcacgtaagattttcttggatttggctttatgacatacaacaaaagcccgaagaaatgccattctaatggatttttcttcgggtttgtcgtaatcgtacgtatgaatggcaatacacctattcacatactcgtataaatacattgttggcaatgggaatacgcataggtctcactacttcatgtcgtcatatcattagaacttatgcctgataattagacatatcccaaccatttatacccagcgaaaagaagatatttgttttctcttttcgcaagtacagccttttaaatatggcattgcgcacctgttccgcaccgaagctgtcaatgcggaaagcaagtgcgactatcatcggaaagctgaacacatcggcatgatacccgttctcctgccgaacatacttctgtacctcgtattcttttaatgctccactgttatagatgtttctgatggcagaacgaagtgtcggagcaattactccgaacagttccaccaattccggctcgctcatccaaatgtttgagacattctccggcatgatgatattgccggattcattcactgttatgctgtttcttctcatactcatgacatcgttattccgttaaacgtcttactcagtttgtcgccgaacatggtcaggtcgttgtcgagcttctgcgtggttatctttgcgtagagttgggtcgtgactatattcgtatgtcccaacacacggcttacgctttcaatgggcatccccttgctcaaagctaatgttgcgaagccatgacgactgcaatgaaatgatattgacttggttatgccacattcccttatcatccgtttcaacggtttgcagatagaccaatagttcaagccggggaatatacgattgtctttctgcatcggtcggtagcgttcgactatctgcaagggtatatccagcagcttcacttggaaggcgacttttgtcttgtggcgtttggacaatatccacttctcgccgttcacctccacgatgttgtcattcgtcagttcctgaatgtccacgaatgacaaggcggtgaaactggcaaagatgaaaatgtcacggatgtatgcgagcttgctgtctgcaaactcatgtgtcatgaccgctttcagttcatcctccgtcagatattcccgttctttcacattggggctgatatgaaactggatgaaaggattgcgcggtatcaacccgttataatgcgctttcatgaccacgcctttcagccacatacagtttgcccatatcgaaccgttccgcaatccggcttcagtcgagaggtatgcggcgaactccttgatgaaatcgggagtaagttccaacatggacatatcgctgcgtctgtaaaacgacttgataaaggcggctacatggtttcttgcccgtacacgtgcccgataggtagccattaccctgtctttgcctacccgtttcttgaacacttcgttctcacggtcgaatgcttttagcagcgtctcatactcgctgccgattccctgataggcgttgcgcaccatctcagccgtaacaaatgcctcgcggtctgaaatgcgctggtaatgtttgatgatttgcgccttgatgttgtcaagggcaaggttgatgtctcgtgcctcgcggctcttgcctttcgccttgtttcctttcacgtcccaaagcgttttcgggatgttctgcttacaactgaactgcgccacagtcccgttgattgtcactcgtcccatgatggggacaataccgtttttctccttgctgccgttcacgtagaacagaaccttgaatgtgcttcttgccatactcgttttttgtttgcaaagttattactcaacgagttagaccttgatatgccaacctgtgccacaagctgccaaatacaacacggtgtgttaaaaatcaccattcggcgggtaatgatttggagaccgttcttcttcataaatccgctttcctttacgttacctcgatttttcgcctgtcctcatttgtcttcgcaaacgccttattgacaggcattacgaagacatttgtccctttttattcgtcttttccagagatttattgtaaatttgtgcgcttaataagagaacacagatttatcaaacttatctaagtaagcaaaatgaaaagagacgatttaattttcgatatcatcgaaaaagaacatcaacgtcagctcaaaggtattgaactgattgcatcagagaattttgtaagtgaccaagtaatggaggcaatgggctcctgtctcactaacaagtatgcagaaggttatcccggtaaacgttactacggaggttgcgaagtagtagaccagagcgaacaaattgctatcgaccgcataaaggaaatctttggtgcagaatgggctaacgtgcaaccccactcaggcgcacaagctaatgcagctgtattcctcgctgtattgaatccgggtgacaaattcatgggattgaatctggctcacggcggtcacctctcacacggttctttagtaaatacttccggtatcatctatactccttgtgaatataatctgaataaagaaaccggtcgcgtagactatgaccagatggaagaagttgctttgcgcgaaaaaccaaagatgattatcggtggtggttcagcatattcccgcgaatgggactacaagcgtatgcgcgaaatcgcagacaaagtaggtgctatcctgatgatcgatatggctcaccctgccggactgattgcagccggattgctggaaaaccctgtgaagtatgctcatatcgttacttctaccacacataagactttgcgtggtcctcgcggaggtatcatcctgattggcaaagatttccctaatccttggggcaaaacgacaccgaagggtgaaatcaagatgatgtctcagttgatcgactcagctgtattcccgggtatccaaggtggtccgttggaacacgtcattgcatcaaaagctgttgcattcggtgaaatcctgcaacccgaattcaaagaatatgctgcccaagtgaagaaaaatgcggccgtactggcacaagcattaatcgaccgtggctttacaatcgtttccggtggtacggataatcactctatgctggtcgacctgcgtagcaaatatcctgatctcacaggtaaagtggctgaaaaggcattggtatctgccgatatcactgtaaacaagaatatggttccgttcgatagccgttctgcattccagacttccggtatccgtttgggtactcctgccatcactactcgtggcgccaaagaagatctgatgctggaaattgcagaaatgattgaaacggttctgtccaatgtagaaaacgaagcggttattgccgaagttcgcgcacgcgtaaataagacaatggaaaaatatccgctgttcgcatattaagaaatttgtttttacgagtcagccggttttgttttttccggccgacaggtatatacatttttgagaaaaaatgtatgtatataaatgattaaatatatagttaaattgtaaaatggtccgtagcctttgtgataaaggctacggacctcttttttttacgcattgacactatttttgttgtattgaaaggatactcctgcttgcatttccctatttttggaaactacatttattattcactttaaaactttaattactatgtcagaaaacattggagtagctacaggtaagattatgctgaaaattgttatcgctctttttaaaggtgtatggaatgtactgaccttcgggtttaaagcttacaaaggtcaccgggacaaaaaagacgccgaaatgcgtgaacagttaagacaggtacaagcaaacaacaattcccaaactatttaattctgcaatactatgagctcagcaaacaagaaacacatgcagggtggtatgaacaccacatacagcaatgtaaatactgaagacgaaagaaacaaaaaagcggaagaactattgttccaggcatgggaaacagccggatatcatggacagccggatgaagattattatcctcgaacagcccaggaaacaagggatatggaagatctgctgacacaagcggaagcagccattgatgacccgtcggataccgaactaatggaggtaatggctgacacacgcgaagtgctggaatggtccaaacagcggcattggacattcgcatggtggatcatcatctgtgtagccattatgggatgttattatttctatcaggccggaagcgaacaggattatgtagcaaagagacaggcgctgactgatgagcaagtgcagactgaacttagcgaagccatcacccggcaacaaagttacattgatacttatagccaaaagttggcagtagataccatttctgaagaaacacgtagcctttatgaaaaatatatggaaaatgccactgaagaaataaaagaactgaaagcatataatgtggaaacttataaaaagcacctggtagatcgtgccgatgccggagtatggcgtgaaagatgggaagcgatctggtgttttatctggatcgtgctttatattttcgcctgccgtccacgtggatatatgattactaaacgtcgccgtgaagacaaaatggctaccggtctcaaaaagatattattcggcattgcaggagctttagtgggtgctgccggcgctttatatgtgaccaccaccataactaaatggagcgatggaagtaaaacccgtgatgatgatagcatgattatctatgccatgaagttcggtcttattgcactggctgttatcatcgttctttgggcagcacgtattgttatcgttattgctacacttctgggactattgagaaactacgactggaaacagttggccaaagacccgaaagccatgttgaatgatttgaaataaatggaaaggggatgcaagtatataccggcatcccctatttctatatttatttccgatggttagctcaatccttctatatttccatctacaatgtcgatgtgcatagcttgtggctctttgggaagccccggcatgcgcagaatttctccggcgatggcaacaatcatttccgcaccgttattgattacaatatccttgatatgaaattcaaagttgttcaccgcaccgtatattttcggatcggcagagaaagaatattgtgttttggcaatgcaaacgggataatgaccaatgcccatcttctctatcaatttgatgattttacgtgaatggatactgtaagtcaccacactggcaccgtaaagattgcaagctatcttctctatcttttgttctacactgtcattttcactataactgaagttcaagggttcagaaggtttcttctcaatagtatccactaccagattagcgagctccacagccccctctcctccttctgcaaaggcattattgacagcgaaccctacacctaacttctcttcgcaatgccggcggattgcttctacctcctcgtccgtatcactggcaaaacgattgaaggcaaccagtaccgtctgaccgaatgaacgtagattgcgtatatgtttatcgagattaccgaagccttgttgcaatccttccatattgggttctttaatacgatccagactgacacctccatgcatcttcaagccttgtgcagtagccacaatcactgtcagtttaggttgcaatccacttttgcgacatttgatattataaaatttctccgcaccaagatcggcaccgaaaccagcttccgttacaacataatctccaaaagtcattgccattttcgttgcaagaatagagttacaaccatgcgcaatatttgcgaagggaccgccatgaacaaaagctgccgatccttcggttgtctgaaccaagttcggattgatagcatctttcagcaagacagtgatggctcctgctactcctaactccttcactgtgaacgggcaaccatcaaaacggaaaccaaggatgatattctcgatccgtcgtttcaggtcgtctatgtcctttgccagacagagaatagccataatttcggatgcaggggtaatatcgaagccggattcttcggtaataccgttcgtactggggcctaaaccggtgacaatgctacgcaaagagcggtcgttcacatcgagcacgcgctgccagatgatttctttcagcccgaatccgtccgcctgatgctgataaagataattgtcgagcaatgcggatatcatattgtgcgccgaagtgatggcatgaaaatctcctgtaaagtgcagatttatcttttccataggaagcacttgggcataaccgccacctgccgctccacccttcatgccgaaacaaggtcctaacgaaggttcacgcaaagcaacgatggctttcttgccgatcttattcaaccccaatgccagaccgatggaaaccgtagtcttaccaatacctgctttggtagcagtaatggcagttaccaaaatcaggttacttttcttcactttttcttcatcaatcagatgtgtagggatcttagcaatataccgtccgtagttttctacttcttcacgtggaatacctacattctcggctacctgcttaatcttcttcagctctatgctgcgggctatttcaatgtctgatttcatacagagaacttctttaaataaaactttctttttgaaagctacaaaagtacgaaaaagagtgcagatagcaagattttagggaaagaaagcctctgttatcttattcaagtgtcaaagcgataccttctacacgatccgggtttgaaccttccggctcaaccatatcgaaagaacgtgttccggcaggcagtggagcgaaataaagagtataatcggcctctccactttccggcatatagaatttctcccctaaaggaataccttccgaacgaagaaccggacatacagttccattgtccgctactaactggatattcttcataatttgtatccaatatttgggtatataataggcacgaatccgcaagaccgtagcagtatccgtcaatactacctggcggatttcaggaatatcgttattgcttttcttcaccgtcgggaaattcaccactttatgtccattctcttcccctaagctcatcacatattcgtctgcattcagcaggcggcggagttttcgtttcaggctctgtttcccgtatccgaaccatttttccacaatgcgcccttcaggtgaaataaggacataatttggaattccacgtactccgtatttggcatataatccattgcttcctttcaagtcacttagattctgccaagtcatttcatgcgttttagaggcagtttcccaacctttcttggtatcgatgctcagacttactatcgtcaagcgatctttgtacatctcagccacttccttcatttcgggtagagccataaggcacggaccgcaaccacgactccagaaatccaacatgatatatttacctttaaaatcagccaggcggtgtacatttccttccaggtcgtacaaatcagcatctgccatttcatcacccacttctactacttggggaggaaatagatatgtatatgtgttcattgcccaattggtctgtttttctccatcagtcagtccttcataaagagcaatcacttcttctttataaggataattttcagtatactttgctgacattgccaacttctccaactgctccagccaaatatcgtcaacaggaatctgcttcatacgttttatagtgttggcatcaatacggatactaatttcatcctctaccttccgcaaactgtcaacttgtgcacgtatcatctgtctttcttcgtccaccgcactccccgcatacttccggcgatatgcacgctgcaacaaagaattgcgctgatattcattccacaattcgcgtgagtcgtttataaaagcctgattagccacttgttccggaacagtgcttttcacatcccaagttcgtatcaatgtattttcaccgcttatccgtatattatctcccggacgcacccaaagccttaaactcatggaaggaaacttgtcacttcttcccatcatatccactatttctgtttcgttccccaatgtttctgcctgaaaacgaaaatgtccgttacgaatcgtatcaacaccgatactgctacccacatttccatctaaacgaaacaaagtgattaaagctccgtcttctacattctttacttgcccttctattgtaaaagtcccttgagcttgtgccgcccaaacacttgtcattaagaacagcgttgcaatctcttttttcatatacgtgctgtttggttataaaattatatatctacgcacaaaactatatgatttctccgagatcagcaaataaaattacgattatttcgtaataacctgttttctttaatattaagcatctcttaccggatatttttactttatccgtccatcactcccactatttcgctgacagatatacacctctctcttcccaacattccgttgcgcttgattgcagataaagagcaagtagaacaagtacttatcaacctgatacggaatgcccgcgaaatcatgcaccagcatcatggcaacattacagtacaatcaaaagtgggagaaggaagcacgtatatacttctgttcccgatagtttaataagtgattaggggttagtgataagtgattaatgctgcgctataatgcagcaaggagacttatcactaacccctaatcacttattacaacgcttttttgtataaatccagaataatctccttcgtcacctcgcgaggattacccggtgtacaaacatcggcaatagcagccgtagccagcttatcgagatcgctttccttgatacccaattcagaaaggtgttgcggaatacctactcttactgacagtgctctcaccgcatccacggcagcacgtgcagcctcttcctggctcattccttctttatatactgtcatcgccttagcaatttccacatacttatcaagcgcagcaggagcattgaattccataatgataggcagcaacaacgcattagccacaccatgaggtatatcgaaaatagcacccaacggatgtgccatgccatgaacaacgcccaaacctacattagagaaagccatacctgcaatatattgtgctaccgccataccattacgcgcttctgcatttgtcggctcaaacacagccgtttccagataacgggtaatcatctcgatagctttaatttcaaacatatcgctcatttcccaagctcccttagtaatcaggccttcaatagcatgtgtcaatgcatccagtcccgtagaagcagtcagccctttaggcaaagtgtacatcagttcggcatctacaatggcgatggcaggaatatcattcggatctacacataccatcttcttttcattcacttcgtcggtaatcacgtagttgatagtcacttcggcagccgttcccgctgtagtaggcagagcaatgataggcacggatttcttctgagtcggcgccactccttccagagaaaccacatcactgaattccgggttattagtgataatgccgatagcttttgatgtatcgatggaagaaccaccaccaatagccagaataaaatcggcaccggattctgcaaacgctttcacacctgcatttacattactaacggtaggatttggtttaatatcgctgaatacaacatagggtatgcccaccttatccagtacggaaagcaccttgtcggctacaccaaatttaatcagatctttgtcggtagatacaaaggcttttttcaagccgagacgtttaatttcctgtgggagcacttcgcgggcacccggtccgaagtaggatacttcgttcaagacgaatctgttaatcataatacgataatttaggttccgcagtgtcattttgagattgagtgtgcggaaggttgatacttcattttgtttccgacaaaattaagaaatatagaggaggaagggacaaaagattctgatttttttaatgtgtattatgctggtgggggtacttttcttttgtcttgagacaaaagaaaagataccaaaagaaaaactcaaggctgcacttccggggctactccggtagcatttccagctaaagggcaggaactcgcttcgctcaaacagcctgcccttctttacgctgaaaatactacctacgcttgacgcccctacagtgaggccgggggaccatgcggcatatggcgagagagaattgattgttttttctgatggggttgaggtaaatacggatttttgaaacgctatccaataaaatgataatagaatggttatatttgcatcttgattataagaaacagattacaaaccattaatcagtaaacaatgagattcagcaacgtaagattattagtaaaagacttcgccaaatgcttcaagttctacaccgaacaactcggtttagaaccagcttggggagatgaaaatagcggatacgccagttttaaagtagccgacggaatagaaggcttcgccctctttgtatccgactggatggcaccttcagtaggcaatgcagataagcagcagcccgttgcaatgcgtgaaaaattaatggtttcattcagtgtagataatgtagacgaaacctttaccgccctaaaagcaaaaggcgtaacgtttatcagcgaacctacagatatgcccgattggggaatgcgtaccctgtacctgcgtgatcccgaagaaaatcttatagaactctttacccctcttgctgtagaacaatttagccaagaactcctcgaagaagataaaaaattttagcgcagcgcccctaccgcgcagctctccggcataggtgtaggtgcgtaagcgtaggcactgtcaggcgcaggtaaggggcgatctgtctgagcgaagcgagttcgagccccgtctgcgaatgacagtgtcggagtagcaccggagacgtagccggggtccctttctttttggtatctttttctttcgggacaagccgaaagaaaaagtacacacgcgttacttaaacctcgacgtatccacctcctccctcttcttctccctgtatcctccgaacttatacgtaaacgacaccccgatttccctgaaacaagcataatcattcgtcacgttctgcgtaccaaagcggatacgtggttttatctgtcccgtctcaaagatgtcattgcaataaagattcagaatagcctttcctttggcaaagccataccgcaaagcagcatttacataccctgaagacggcaaatcataaattccctgagtcgctttactacgagccattcctgtcaatgtcagcttcagatcaggctttttagagagagtgaaagtatttgtcagtacggcaataccataacaaatattccggttaaaaggaatatcccagaaatcatcatccttctcatgatgccacacaccaatcaaagttaaacgagagtttaaccattgctttatatcaaatggtatagaagcttgtactcctgcttgttgctggtaattaaaattcaaatgcttatagatttccaccagacgttcggaagattgataaagagtctgggtagaataatctttcgtatgggcaaaccatgcgctaaagatgtatttactcttcaaaatatgtgtcaactgaagttgatattcctgagccggtttcaggaacgggttcccatgtatttcagaatatccaccgcccagataagagatagcgtcctgcaccgcccaataatcaggatagtccttatcactgctcaaagccaattgccaaacatagccgggggcaggcatataactcaggttaatggtaggataccaatcccactgattccatactggcgtcttgtaatgttccacagcaagcgaagcgtccagggaaagtttatcaccgaaacttttattgaaacccgcatagaagttcaaagtttgttcgcgacggcgggattgcatattatcgggaatacctgtgctcacacctgtctttgttcccgcatccttctccgtatcataataatattgataactgtggtcgatactggtcgtataaacggcaccataattcaatccccatccacgacccagattatgctcttgggcaaggaaaaatttccagcgattgatgcgctgacagtcttcggtataaaaggcaagctcttcatcttgcatgctgctatgcaataactgatcggacggagaacggtaataagtcagttcagcaccggctttcaatccgaaaggtgtacggtaatccagacgcccgttgtgcagccaatcggtactgttgctacgggtattggactgctgagtaccgtaaatatccatcagactatgatgagtcgaataacttccattataaacaaagctcagctgatggtccttggcaatattataatccgttcctacccggaaactatgagtatgtgaacggcttcggcccatctcatcggttgtgatgtgatgaaccgaaccgtccgccaaagagtgcatagcttctttatcggttaaagaatatccccgtccgtggttgtgtgagtaaagaaaatctgctgagaatttatttccgttatagatcaggctggcacgttcgttgaagccctcgtaatgtttctgattatatttgccataaagctctccctgccaggaagacgggcctccggtgctttgtttcagtgtgatattgatgagtgcaccccgcacctgatagcgtgccggagcattgtacatcacttccgccttctcaatgcgactggacgggatgcttttcaataaagaataaagctgttcggcactcatggtggtaactttgccatccaatattacagttaccccctgccctgccaacatcaacccgccattcatctcggttacgcccggcaattccttcacagcgtcataagcattatctacgggtagattaccgataagacgcggaagatcgtacaccagtttaccttgctccgctttcacgatgggacgttgtccggtaatcattacttcaggaagagattggtaaagactgtccagctgcttgtcttgtgttataatactgtccgcactgagcgtccgttcgctctctacatccgtactctttgttatttcctgagcggaaactcctgcactcaatgcacatagcatcagggaaagatagtaataagacttcatgttcatttgttttagatacgacataaatgtgttcagacttagagatgattgggtgtcaaccttggttgacaggtcgattaagcttggttgacagatccgttaaccttagttgacaggccagttgaccaaggttgacacccaattatgcaagggactgcacaagattctctctataccttttgcaaaagatgccttgtgcaaaaccgaatcatcccttaagctcttgcactgcaaagtacggtgaaatcttccggactttgtgttatccggaacttacgtagtcttatctagtgttatctgaagtgttatttagtcttaccgtccatacatgtaccggttatctttcctatctttgtccatataaatacaagagctacatgaaactgccattcaaacctattgccatattagtcataatctctctgctgggtatctttatttaccaggcatattggatcacggggctatacaaaacgatgaagcacgagctggaacaaagcatcgtagaagccatgcgcatgagcgattataatgagatgatgcttcgtgtaaaggcaatgcaaaaagaaaataaagcccacggttccgtagaggtttcagcagggtacaattccgattccggaaaatcatttgtccgcagcagtacaactgttaaccaaacagacagtgccggaagtcgttcacttttaaaagaaggtatccccatgaagtatgacagtgtatcagtaagttacccgaatgactcgacaagagatatccttttcacacgaggacaggaaggcacaaatatttcagtctgggcagaaagagattcagtaaaagaggtcctggaaaatacagtgattaatgaggatgaacctcaggcttctttaagagccgaaggtggaatagacatgatgctgcgcgatcaaagcagtatggtggaacttgccactttcatccagcgtggaatgcactcgggactggatatttttatagaacctgatatagccgtttatgacagtctgctgaatacctatctgcaagaacgggggcttaaacttccctaccgattggagcgtcttcattccggtgccgatccggactcaacgctggtttacactgatacgcttgccattgtcgggactcccggatacatacccagtgaaaaagcaaaacaatataattatgctttcgacattcactccaatcaaagttaccgcctcacaatagaacctatttataagattgtattgcgacagatgagcggtattcttaccacatcattcgttattcttattatattaggtttctccttctggtttcttatccgcaccattttgcggcagaaaacactggaagagatgaagagcgactttaccaacaacatcacccacgagttgaaaacacctattgccgtggcgtatgccgccaacgatgctttgcttaatttcaatctggcagaagacaagcaacaacgggataagtatctgggtatctgccaagaacagttacagcgattaagcggactggtggaacaaattctctctatgagtatggaacgccgtaaaaccttccgtctgcatccggagacgctcagtttgcacgatctgttcccgacactcatcgaacagcataaactgaaagcgggcaagcctgtagaaatcaatctcgacattgcaccggaagacctgacaatcattgccgaccgtacacacttcagtaatatcctgagtaacctgatagataatgccatcaaatactctccggataaagccgacataatgatctgttgccggaaaaaggaaacggaacaagtggaaatctcagttacagaccacggtattggtatccctacggataaacagcctcacattttcgataaattctaccgggttccgacaggaaatatccacaataccaaaggctacggactggggcttttctatgtaaagacaatggtagaaaagcacggtggcatggtaaccgtacgaagtgaagcgggaaaaggaagtacttttacaataagaatctgaataacattgcttattatgaaaatgaatcaagatatggacaaaatcaaggtactgctggttgaggatgaacaaaccctcgccatgattatcaaagatacactggaaggccagaacttcatcatccatactgctgccgatggcgaagaaggtctgcgtatgttcttcgacttacgccctgatgtactggtagccgatgttatgatgcctcgtatggatggttttgaaatggtacgccacatccgtcaaaccgacaaacgaactccggtactttttctcactgctcgttcttccatcaatgatgtggtagaaggctttgaactcggggccaacgactatctgaaaaagcctttcggcatgcaggaacttatcgtacgcattaaagcgctggtgggcaaagcatttacattcagagaggaaccgaagaaggaagagacctgtttcgaaataggcgattaccatttcaactctgtcacacagatattgtcccataccggaatagagcaggaactctcccaccgcgaggccgaaattctgaaacgcttgtgcgaaaaccgtaatcaggtagtgaatacccagaatatcctactcgatctttggggtgacgacagcttcttcaattcgcgcagcctgcacgtgttcatcactaaattacgacataaactttccaaggacgaacgtatccgcattgtcaatgtccgaggtatcggatacaaacttatcatcaactgaaacttccgttaacacataacgacttatgaaaaaactattcatcattctgttccttctcactgtttcctttcgcgttgctgcacaaaacgagcaaacaaaggacagcacattattgaatcgttttcccacggaaatgggaaaagagccgttgtctcctccacccggaacagctgccgctcctaatcgggatatgtcggtaaagacttctctcagcacggatagcacggacttatacatcactcttccgacttattatcccaacttttcgtggatggatacttactccggtgattcatctcaatagaaaaaagaaatagaaaacgggctgcatttccacacgagatacagcccgttcatttaccggttagagaggaacaaatagattgcttataaaaccaattcaattatttacgctccaaagataacaacaatactcaaatatcagcatataatatacaagttttattttaataaatgctatatatttccataattcatacttatttcttatattcgccattaaataaagaccattaagtgatgaaatatataggactaatcatacttttctgtcttctttctttcagggtaaatgcccagaatgaagtacccgctgacagtgttcgcagtatgaatatgccggcaacaaagaattttgatggattccttttggatatgaacctgatgaaaatggcagctcctcaaatgcccaaaatgactttagacattcccgatgccagcaaagattatagttttctgtttcgcttggacccgaatgtgacctactcacaaggctactcacacttattcagtttaggtagctccaccatatacagtatgaaccctttcggactgacaggtttcggatcatctccccaaaacctgcaaatgggaagtttccggctgaagaatggaatgcgcatcaatacttatggagagtatgacaaggacggacggaaagtccctaatccttctgccctgccgtgggaacggaataacttcaaaggcgctttcgaactgaagtcggcaaacggatcatttggaattagaatcgaagtacaacaaggaagaaatggaccttactaaaaaagactacagtcaagggattatatactgaaataatatgaatatgaagaaaaaagtattggtaataggtgccaatggcttcacaggacgccggatcttgaatgatttgtcacgcaatgacgagtacatagtaacaggttgttctctgcatgacgacattgctcccgattccgggaattatcgtttcatcagtgcagacatctgccagatgggggaacaaagcgcactgttccgggaagtacgcccgaatatagtgatcaacacatccgcattatccgttcctgattattgcgaagcacaccgtgaggaggcagacagtatcaatgtcaatgctgtgggacaattggcattccgatgcgaagcatccgctgcacgctttatacatctatctactgactttgtatttaatggagatacagggcagctttatacagaagaagacactcctgaccccgtcaactattatggggcaactaaactgaaaggtgaaaaacgggtagctgagctctgtagcaattatgccatcgcacgtgtggtagtggtctatggtgccgccttgccggggcaacacgggaatattttgcaattggtagccaatcgtttaagaaataatgaagaaatacgggtggtttccgaccagtggcgcacgccaacctatgtaggtgatgtttctcaaggaatagagaaactgataaatcatcccaataatagcatttatcacatctgtggctcggaatgtctgactatagccgatattgcttatcgcgtagcagatactttgaatctggattattcattaattctgccagtcactaccaagcaaatgggagaaacaactccccgtccccgtttcagcggattaagcattgaaaaagcacgcagagaactgggataccaaccacatactctggaagaaggaataaaactaatgttcaatctttaaataagtgattagtggtgagtgccactaatcactaaataacgtttctgcaatcccactctccttcttatacacccgcaccatctccaacaactcatccccatacttttccactccttttttaccaaaataagggattcggagaagagcggatttatcttccggtaataaattggtgatacctaaaatagctttctgttggattacggtatataccggtaatcctaattgagacgcttccgcattacgccatgctaccagacgcctgtataattcgggatgcagaatatccgaaggaacttccactgctgccgtttttttccgtgcaggggtatttccactttcttcggttccgcctttccgttttcttctttcggtagaattaccggaacgcttttcccctttgcctttagtcgatgccgtatcgtcaatggaaagtaccgccttttgtttcagatattctcctacatgaaagcctttactgataacaaattccaacaagtcaacttttaacagaagtagatcatccaattcctcactggcagtcttcaactgtttctttagttctttattatctgtttccacaatggtactactcctgatagcatccaaaggttctaattgttctttaaaatattccgcccccaaatgaatacgttcctgcaagcttttatccgttgcataattttcggcaccatcaaccaggcgtgtgtattgaaggctgaacttctgggcaactttcgttaccttctcatgaaaacgttccgtttctgatttatattcagtcaatagtttggggtagagcttatacaagtgttcatccaccaatctcacaaaacgcttcaatgtcaactctaacggtaagaaatcaaacaatcccgatagcaattccagaaagtatgcttgttgcaatctcctataacgcgtttcatcaggttcgtttctacgcgcatcttccgtaaaagtatctacagcactgtcactgataaccgctcttgccgacagtggagcgctcaataccaacccttccaatgttttacaacgacttaatgccacataagtctgtccgtgtgcaaaagaagcactggcatcaattattgcacgttcaaatgtcagtccctgacttttatggatagtaatagcccatgccagcttcagagggaattgtttgaagactccttctatatcttcggtgatttccttagtctcttcatccaacacgtattttgcattcgtccattcttcctcttgcagcataaaagcatcctcacttcctttactgcgtacttctatacccaaagctgagacattgaccacttcaccaatcataccattgtaataacggtgctcaccggatgaatcattcttcacaaacatgacttgggcaccacgtttcagttcaagcacttcatctgtgggataagaatattcaggaaactttccatctatctgggcacgaaaggtgaaggaacgaccgggtaattgtgccagttcatgttcattgatgcgttgcgcctgatagttatgggtagtcaactggatatatccttcctctttcgaagggttgaaattcggaatgtacctacggttcaattcatccagcaaagttttatcacaacggttctcccgaatacggttcagcatatccagaaagtgagtatcactctgacgatacaccgttttcaattcaagcgtacaatattcagactgtctcagtgcacgactggaaaagaaataaggagtatcatagtagctgttcagcatctgccactcttcatcttttatcactggggcaagctgctgcaaatcgccaatcatcagcaattgcacgccaccgaaggatttactgcgatcacgaaaacgtctcagtacatcgtctatcgcatccagaagatcagcacgcaccatactgatttcatcaatcaccagcaggtctatactacgcataatgttgagtttatcttttccgaaacggaaacgatattgtgctttgccatccgcactgaatgaggtatcaggtacgtaaggggcaaaaggtaactgaaagaaagagtgaatggttacgccgcctgcattgatagctgcaatacctgttggggcaagaacaaccatacgctttggactttcggacttcagccgccgcaggaatgtagtttttccggtccctgccttaccggtcagaaagagatgtgtgcctgtattttctataaattgccacgctaatgccaattcaggattctgttccat

SEQ ID NO: 295 - DNA, 9035 bp, unidentified
  source 1..9035: mol_type = unassigned DNA
atggaaaaattcagtgtcaaaaagccgttcaccatccttgttgcggtcatcatggtcctgctgctgggcttcgtgtccatcacgaacctgcagacgaaccttctgcccgacatcagcacgccatacctcatggtggtcaccgtctaccccggtgccagcccggagcgtgtggagtcagaagtctccgatgtgatggagaacgcgctgggtacagtgtccggcgtcgagagcatcacggcgacctcggcagaaaactacagccttctgctcatgaaattcgccgaaggcaccgacatgaacagcgcgatggtcaagacctccaacaaggtggatcagaccgcgaccagtctgcccagcacctgtctgaccccctccatcatcgagtacagcctgaacatgaacgcctttatgacggtggctgtcagccgggagggcagcgatgtctacgatctgtcggattttgtggagagcaccctcgtgccttatgtgggccgcaccagcggcgtttccagcgtgtcggccaacggcctcatcgaaaagatggtgcaggtgcagctgaatcaggataagatagacgaagtgaatgcccgcctgctggaactcatcgacacccagctggccgacgcccgcgcccagctcgatgacgccgaggcccagatcgccgcaggtcgtgccgagtacgaaaaacagctgaaaaactttggcgacacggtctctgacaccgtcatggcccagatgggtacggaggtggccgacgccgtcaccgtcgtgcgcgaccaggcgcaggctttgctgagcagcatcaaccagctcatcggcgtggtcaatgagccggagatccagcaggccctcatcgacgtccgcgacggcctgcagcgcgtcgtggaccagttcaaccagaccggtatgcgggacatcgactccctcatcgagatcgtcggcgagctgcgcgacatcaccgataagcttaccaacgctctgcaggagctgcagggccgtctgggtaccagcgacggcaccgtctccgaccttgccgacgagctggaagtctccaacagcctgagcaccatttataagactctggacgaggtcatcaaagccatggacaatgtccccggcctgatgaaccagttctccgtcgctctgggcagctattccagccagcagctcagcgcctatatgcagttcaccgaggcccgggagaagctgaaggactacgaaaaccagctggaagacgccaagcagctctacgaggagaccaaggaaaaggcccttgccagcgccgatgtggccaagcagctggacatcaagaccctcgcccagctcatctacgcccagaacttctcgatgcctgccggctatgtcgccgataagagcggcgagtcctggctgctgaaggtcggcgaagagtacgacagcgtttcggacatcgagggcgcacttctgctccacgtcgatggcttcggcgatgtccgcctctccgatgtggccgacgtggccgtcatcgacaacgccgaggccagctacacccgcctgaatggggagcgggccgtggtgctgaaaattttccgcaacgccaattccagcgccagcagcgtctcggacggctgcctgaacgccttcaaggagctgcaggctcagtattctgaccttcacgtcgtcgtcctgtccaaccagggcaactacatcaccatcatcgtcaacagcatcatcagcagtatgctggtgggcgctgcgctggccatcatcgtgctggccatcttcctgaaggacatcaagcccaccctcgtggtcggcgtcagcatcccgctgtccgtcctgttcgccgtcgttctgatgtacttcaccggcctcgacatgaacatcatgacgctggcgggcctgtcgctgggtgtcggtatgctggtggataactcggtcgtcgtcatcgagaacatctaccgtctgcggggccggggcgtaccggcggcccgcgccgccgtgcagggcgctcgtcaggtaggcatgtcggtcgtggcctctacccttacttcggtctgcgtcttcctgccggtggtgttcgcctccggcacggtgcgcagcctgctgcagcccatgtccatgtgcatcggctactgcctgatggcctctctcatcgtagccatcaccgtcgtgcctgccgctgcttccactgtcctgaaaaaggctgagccgaagcggctggtctggttcgaaaagattcaggataagtatgcccacagcctcgagtggtgcctgcagcaccgtgctctgccgctgctggccgctgtcgtgctgctggccttctgcggctggaaggtcttctccatgggcgtcgtccttctgcccgaaatttccagcaatgaggccaccatcgccctctccaccgacgacggcctgaccaaagaggaatcctacggtgtggccggacaggtcgtcgaggccgtcatggccgtggacggcgtggaagaggtgggcgtcaccaccgataccactgtggccggcatcgacatcggccagctgggcctgcccagcgctattaccgacctgctgagcgccgccaacagctacggcagctaccagttcaacgtcatgctggacgagtcactgtcctctacccggatcgccgccgtggagcaggccctgaatgatgccgtttccggcgtcgagaactgcaccggcaccgtcgagatcagcggtatgcaggacctgaccagccagctgagcagcggcctctctgtcaagatctacggccccgacgccgataccattaccgcactgggcgataaggtcgtccagatggtcaacgacaccgagggcttcgccaatgccgccaccggcctcggtcagggcgatgcgaccatcaatctggacatcgaccgcgacaaggtccgcgcctatggcctgacggttgcgcaggtctaccagcagatcgccgccaagctcaccaccaccacgacggcggagacgcccgtcacggtagacggctccaccatgaaagtccagatcagcgataatcttgaccctgtgaccaaggaaaacatgatggacatgaccttcaccaccagtgtcatggacgccaccggcaccaccaccaccggcacctgcacgctgggcgatattgcttcctggacgacgggtactgcccctgactccatcaccagcgagaaccagacccgctacatcacggtgacggcagacacgctggacggctacaacaccacggtccagtcccgcgtgctgcagaagacgctggacgccttcgccctcaccgatgagatgcccgagggctgctccttctcgctgggcggcgagtcctccaccgtcaacctgatggtcgacgagatggtgcagtggatggctctggccctgcccttcgtctatctggtcatggtggctcagttccagagcctgctgtcccccttcatcgtcctgttcaccgtgccgctggccttcactggcggcctgctgggtatgctggtcaccggccagcagctgaccatgatctccctgatgggcttcatcgtcctgatgggtaccgtcgtcaacaacggcatcgtcttcgtggactacgccaaccagctgcgtctgggaggtctggagcgccgtgcggcccttgtcgccaccggcaagacccgtatgcgtcctatcctcatgaccaccctgaccaccgttctggccatgctgcagatggtgttcagcaacgatatggcgagccagctcatgagcggcatggccatcgtcatcatctgcggcctgagctatgccaccctgatgaccctgtacatcgtccccatcctctacgacatcctcttcaagaagccgccgctggtggtcgatgtaggtgacgacggaatggacgacatccccgatgatgccgccgagtatatcgcgcagtcgaacgccgccgaggctcagccagaagcataattttatacagattcaaaagggagctgttgcattttgcagcagctcccttttctgtttcgcaatatgtccaaaaaactctcgaaattttggaagataaatctaaaagcattctcacacaagtctggaaaactgtgctataatcataattatggacgaggtcggggctgcgctgccctgaccgaaaataatgaagaaggaggcgagccttatggcacagttccgctccaagccctttggtgtgaccaaaaacggcgataaggtggatgaatacatcatctccaatcccggtggacttgagatcagcgtgctgaactatggctgtgtgatcaaaaatctcttcgtccctacaaaaacgggtctggtggacgtggtcgtcggacacgacaccctcgccgactatgaggcggatttcaactcatccggcagcacctgctgcggtgcgttcgtgggccggtacgccaaccgcattgaaaatgcggaattttctctcagcggcaagacctacaagctggaagccaacaatggcaaaaatcacctgcacggcaccttcccccgcaaaatttacgatgtgaaaatgttcggcgacacccttttgatggagaccgaaagcccggcgggcgaagacggtttccccggaaatctgaaggtcagtgtgcggtatatcctcacgccggacaacaccctgcggatggactaccgtgtgtccaccgacgaggacaccatcatcaacctgaccaaccacacctacttcaacctcgacggcggcggcaatgtgctgggccagaagctccgcatttacgcttccaactacctcgagggcaacaacgagacctgccccacgggtaagatcctgtctgtggacggtacgccgatggacttccgcaccggaaagcctctgggacgcgacctcgacaccggcttctaccagaccaccatggcgggcggcggcttcgaccactgctatgtcctcgaccggccccggggtgccagccagagcctctgcgcctgggcgtccagcgacaagaccggcatcagcatgaagatgtacaccacccagccgggcatccagctctacaccggcaacttcctgcagaactgcccctcccccggcaagggcggcgtcccgctggaaaagtacggcggctttgcccttgagacccagcatttcccctgcagcccctctcacccggagttcccgacgacggtgctgcgggcaggcaaagtcttccgcgccaacactacgctccgcttcttcaccggccgtcagtgcggccgtttgtaagcaaatatcagccgcagcaaagggcagctctcttgcgggagttgccctttgctgttttttgcgtgtcctctccatgctttgcggactaaaaatctttgcagttcatcagactggctgaaaagatgcaacaaaaatacattttcataaaaaagccggtacttgattctctgtgcaaaaagcggtatcctttaggcagacagagcacaagggttttgtgcgaagcaacatttggaacaagagaggtactggacatggctattttggtttccggcggcgcaggctacatcggcagccacacctgcatcgagctcctgaatgccggctacgacgtcgtcgtggcggacaattactataatgcatcccctgtggtcctcgaccgcgtcaagcagatcaccggcaaggacttccgcttctatcaggccgatatgaccaaacacgaggatgtggagaagatcttcgccgagtgtcccgacatcacggcggtcatccagttcgcagcctataaggccgttggcgagagcgtgtccaagcccatcgaatactactacaataacctcaactgcacgctggtcatcctggatgtgatgcgcaagcacaactgccacaacttcgtgttcagctcttccgccaccgtctacggcgaccccgccagtgtgccgatcaccgaggacttccccgtgggtgccaccaccaacccctacggcaccaccaaggccatgaccgagcgcatcctcaccgatgtctgcaaggctgaccccaccctgaacgtggctctgctgcgctacttcaaccccatcggcgcccacaagtccggcctcatcggcgaggaccccaacggcatccccaacaacctcatgccctacatcgccaaggtggctgtgggcaagctggaaaaggtccatgtcttcggcaatgactaccccactcccgacggcaccggcgtccgtgactatatccatgtcgtggacctggcccgcggccatgtctgcgccatcaagaagctggaaacgaactgcggcctcttcatctgcaacctcggcaccggcaagggttacagcgtgctggatgtcatccatgccttcgagaaggcctgcggcaagcccatcccctacgtcatcgaggcccgccgccccggcgacatcgccgagtgctatgccgaccccaccaaggccaggaatgagcttggctgggtggctgagtacggcatcgaggagatgtgcgccgacagctggaactggcagaagaagaaccctgacggctaccacaccgcgaactgaataaaaaacgataagagcctgtacggcggggacttcccgggtacaggctcttattttttgcattttttctgatattcgaggaaggcgacatgattttttttcagagagcagttcagaacagccccgtttctcttgacaacgccggaaagttagcctatattactgttgttaatgcaaactaacaaacacgctcgagaggaacattccatatgacgttgaaagatttgaacatcggcgagaccgccgtggtcgggaccgtgggcggcgaaggcgctctgcggcagcattttctggatatggggctgatccccggtgaggaggtcacgctggtcaaatttgccccgatgggcgacccgatggagctgagcatccacggctacgagctgaccctccggctggacgatgccgcccgcatcggggtcactctggccaaagccccggcggtgaaaaaggcagcggcagaaagtgacaagccggtggagcatccgggcctcggcgaaggcggacgctaccacaccaaaaaaggcgagaaccctctgcccgacggcacgacccttacctttgcgctggcgggcaaccagaactgcggcaagacgaccctcttcaaccagctcaccggctccaaccagcacgtcggcaatttcccgggtgtgacggtggaccgcaagagcggtgcgatccggaataacccgaatacggaggtcacagacctgcccggtatctactccatgtcgccctataccagcgaggagatcgtgacccggcagttcatcatcggtgagaagcccacgggcatcatcaatatcgtggacgccaccaacatcgagaggaatctgtacctcaccatgcagctcatggagctggatacgccgatggtgctggcgctgaacatgatggacgagatgcgcggcaacggcggcactgtccgcatcaataagatggaggccatgctgggcatcccggtcgtgccgatctctgcggcaaagaacgagggcgtggacgagctggtggatcatgcgctccatgtcgcaaagtatcaggagcggccgggccggatggatttctgcagcgaggaggatcacggcggcgcagtccaccgctgcatccacggcatcatccacctgatcgaggatcatgccgtggccgcaggcatcccggtgcgctttgcggccacaaagctcgtggagggcgaccagcgcatcgaggcggccctgaagctcgaccagaacgaaaaagagatgatcgagcacatcatcgtccagatggagcaggagcggggtctggaccgcgccgccgccatcgcggatatgcggttccacttcatccaccagctggtggaacagaccgtcgtgaagccccgccagagcaaggagcagctccgctcggcccagatcgaccggttcctcacgggccgctataccgccatcccggcctttgtgggcattatggcgctggtgttctacctcaccttcggcgtcatcggtctggcgctccagaacctgctggaagtgggcattgatgccctgaccgccgcggtggactccaccctcacggcgtggaacgtcaacgaagccgtccactcgctggtcatcgacggcatcttcaccggtgtgggcagtgtgttgagcttcctgcccatcatcgtgactctgttcttcttcctctctctgctggaggataccggatacatggcccgcgtggcattcgtgatggataagcttctccgccgcatcggcctctcggggcgcagcatcgtgccaatgctcatcggcttcggctgcaccgtccccggcgtcatggccagccgcaccctgccctcggagcgcgaccgcaaaatgaccatcctgctcaccccctttatgagctgctcggccaagctgcccatctacagcctgtttgcggcggccttcttcccggagcacgcggctctggtgatggtcagcctctatttcctcggcattgcggtgggcattctgatggccatcctgctgaagagcagtgtctttaagggcgaggccgtcccctttgtgatggagctgcccaactaccgcctgcccggcctcaagaatgtggtccagctgctctgggaaaaggcccgcgatttcctccagcgcgcctttacggtcatctttgtggcgaccatcatcatctggttcctgcagagcttcgacctgcggctcagcctcaccgctgacccgcagcagagcatccttgcatggctggccagcggtatcgcgccgctgtttgcgccactgggctttgccgactggcgggtgtctacggccctgatcaccggctttatggccaaggagagcgtcgtttcgaccctcaccatcctctatggctcctctgcggcctttgccgccgcgctgtccccggcggcggctgcacccctgctggtgttctgcctgctctatacgccctgcatcgcggcggtggcctcggtcaagcgggaactgggcggcaagtgggcgtttatcatggtggcaaatcagtgcatcgtagcatggctggcggccttcggcacgcggctcatcatgatgctgtaa

SEQ ID NO: 296 - DNA, 6866 bp, unidentified
  source 1..6866: mol_type = unassigned DNA
gtggtggcattcagcggcggactggacacatcgttcaccgtcatgtacctcgctaaagaaaaaggttacgaagtatatgcagcttgtgccaatacgggcggtttcagcgaagaacagctgaagacaaacgaagaaaacgcctacaaactgggagcagtgaaatatgtaacattggacgttactcaggaatactacgaaaagagtctgaaatatatggttttcggaaatgtgctgcgtaatggtacttacccgatctccgtcagctcggaacgtatcttccaggcgttggccatcgcacgttatgccaacgaaatcggtgcggatgccattgcccacggttctaccggagcaggtaacgaccagattcgttttgacatgactttccttgtactggctccgaatgtagaaatcatcacgctgacccgtgatatggcattgagccgtcaggaagaaatcgactatctgaacaaacatggtttcagtgcagactttaccaagctgaaatactcttataacgtaggtttgtggggtacatccatctgtggtggcgaaatcctcgactccgcacagggattaccggaaacagcctatctgaaacatgtggaaaaagaaggcagcgaacaactccgtctcactttcgaaaagggagaactgaaagctgtcaacgacgaaacattcgacgatccgatcaaagcgatacaaaaagtagaagaaatcggtgcggcatacggtatcggacgcgatatgcacgtaggcgatacgattatcggtatcaaaggccgtgtaggtttcgaagcagcagctccgatgttgattatcggtgcccaccgcttcctcgagaaatacacattgagcaaatggcagcaatactggaaagatcaggtagccaactggtacggaatgttcctccacgaaagccagtatctcgaaccggtaatgcgtgatatcgaagctatgcttcaggaaagccaacgtaacgttaacggtacggcaatcctcgaactccgtccgctttctttctctaccgttggcgtagaatcggaagatgacctcgtgaaaacgaagtttggcgaatatggcgagatgcagaaaggctggacagccgaagatgcgaaaggctttattaaggtgacttctactccgctacgtgtttactacaataaccataaagacgaagagatatgattaaagcaggaatcattggtggcgcaggatatacagcaggcgaattaatccgtctgctgctcaaccatccggaaactgaaatcgtatttatcaacagcagcagtaatgccggaaacaaaattaccgacgtacacgaaggactatacggagaaacagacctgagatttaccgaccagttacccctggacgctatcgacgtgcttttcttctgtactgcccacggcgacacgaagaaatttatggaaagccacaacgtgccggaagatttgaagatcatcgacctctcgatggattatcgtatcaagagtgacgatcatgatttcatctatggtctgccggaactgaaccgccgtgctacctgtacggcgaagcatgtagccaatcccggttgttttgccacctgcatccagctaggtttgcttccgctggccaagaatctgatgttgacagacgatgtttcagttaatgctatcaccggaagtaccggtgccggcgtgaaacccggtgctaccagtcatttcagctggcgtaacaataacatcagcatctacaaggcattcgatcatcagcatgtgccggaaatcaagcaatcactgaaacagctgcaaaacagcttcgattcagagatcgactttatcccttatcggggcgatttcccacgcggcatctttgccactcttgtcgtgaaaaccaaagtagcactcgaagagatcattcgcatgtacgaagaatattatgccaaagactccttcgttcatatcgtagataagaatatagacttgaaacaagtcgtaaatacaaataaatgtctgatacacctggagaaacatggtgacaaactattgattatctcctgcatcgacaacttgctgaagggcgccagcggacaggcagttcataacatgaacctgatgttcaacctggaagaaaccgtaggattacggctgaaaccttccgctttctaaaaacagaagaattatgaaattattcgacgtatatcctttatataacatcaatatagtcaaaggacaaggctgtaaggtatgggatgagaatggtacggaatatctggacctttacggaggtcatgccgtcatttccatcggacatgcgcatccccactatgtggagatgatcagcaatcaggtagcaacccttggtttctattcaaactcggtgatcaataagctgcaacaacaggtagcggaacgactgggaaaaatctccggttacgaagactattccctgtttctgatcaacagcggagccgaagccaatgagaatgcgctgaagctggcttctttctataacggacgtaccaaagtagtgtccttcagcaaggctttccacggacgtacttcgttggcagtagaggctacgaacaatccttccatcattgctccgatcaataacaacggacatgtgacctatcttcccttgaatgatatcgaggcgatgaaacaggaactggcaaaaggagacgtatgcgctgttatcatcgaaggaatacaaggagtgggcggtatcaaaataccgactaccgaattcatgcaggaacttcgcaacgcttgtaccgaaaccggaacgatcctgattctggacgaaatacagagcggatacggtcgcagcggtaaattctttgctcaccaatacaatcatatccagccggatattatcactgtagccaaaggtatcggtaacggattcccgatggcaggtgtactgatcagtccgatgttcaaacccgtctacggacaattgggaactacattcggaggaaatcacctggcatgctcggcagctcttgccgtaatggatgtgattgaacaggaccatctggtggaaaatgccgctaaagtcggtaattacctgctggaagaactcaagaaatttccgcaaatcaaagaagtacgcggacgcgggttgatgatcggactcgaatttgaagaaccgatcaaagaactgcgcagccgactcatctatgatgagcatgtatttacgggagcaagcggtacaaacgtacttcgtctgttaccccctctctgcctcagcatggaggaagcggacgaattccttgcccgtttcaagagagtactctgatcgctcatttgattaataaacagccgacaaaaaagcagcctcatacagaaatatttttcttatccgggctgctttttgttttttcgcaatttaccgttacctttgtctgtaagaatccataaaaaataagcgcatatgaaaatagctattatcggtgcaggaaacatgggtggttctatagcccgcggcctggcaaaaggaagtctgatagcagactcagatatcattgtatccaatcccagcgcaggcaaactggaaaagctgaaagaagaatttccgggcatctccacaactcagaataacgcagaagctgctgcaggagcagatattgtcattttggcggtcaagccatggttcatggaaccggtgatgcgtgagctgaagctaaagagcagacaaactctcgtctctgtagcagccggcattagctttgaagagcttgcacactttgtgatagcccccgaaatgccgatgttccgcctcatccccaacactgccatcagcgaactggaaagcatgacacttatcgcagcacgcaacacaaacgatgagcaaaaccagttcatgctccggctgttcaatgaaatgggaatgtctatgctcatccccgaagaaaagatagcagctaccacggcactgacttcctgcggcatcgcttatgtattgaaatacatccaggctgccatgcaagccggtatcgaaatgggcatccgtcctaaagatgccatggagatggtagcccagtctgtcaaaggagccgccgcattaattctgaataatgatactcatcccagcgtggaaatagacaaggtgaccactccgggcggaatcaccatcaaaggaatcaacgaactggaacacaacggatttacttccgccgttatcaaggcgatgaaggcatccaaataataccgcaaaattattaattataaaaaaataaccacttgtatgaatgatcaaattaaacaaatcgcagagcgtcttcgcggattgcgtgacgtactggaactaacgtctgaagacatcgcccgcgactgtgacatatctgccgaggaataccggctcgcagagacaggagattacgacatttccgtcagcatgttacaaaagatagcccgcacctataacattgcactggatgcactgatgtttggcgaagaaccgaaaatgagcagttactttgtcacccgtgccggcaaaggcacgagcatcgaacgcaccagagcctacaaataccaatcactggcagccggttttatgaatcgcacagccgatccgttcatcgttactgtcgaacccaaaggagacgacgagcctattcattacaaccaccacaacggacaagagtttaatcttgtgctcgaagggcgtatgcttatcaacattgaaggtaaggaaatcatcctgaaccaaggtgacagtatctatttcaactcaaaacttccacatggcatgaaagcgctcgatggcaaaacggtacgttttctggcagtaattatgtaataacattatggtagaaagatttttagcaaagactaactttgcctcacaagaggattttatcaagaacctgaaaataaatgttccggagaacttcaacttcggttacgatgtagtagatgcctgggcagccgaacaacccgacaagaatgccttactctggaccaatgaccggggcgaaagccgccagttctctttcgccgacatgaaacgctatacggacatgacggcttcttacttccagagcctcggcatcggtcgcggagatatggtgatgctgattctgaaacgccgctacgagttctggtacagcaccatcgccttgcataagctgggagccacagttattcctgcaacccacctgctgacaaagaaagatatcatctaccgctgcaacgccgccgacatcaaaatgattgtagctgccggtgaaggaatcgtattgcaacacatcaaagatgctcttcctgagtgtccgagcgtagaaaagttagtcagtgtaggtccggaagttccggaaggattcgaagatttccatcagggcatcgagaacgctgctccgttcgtccgtccgagacatgccaatacgaatgatgacatctcactgatgtacttcacctccggtactaccggtgaacctaaaatggtagcgcatgactttacctatccgttaggtcatatcgttaccggtagcttctggcacaatctggacgagaacagtctccatctcaccattgccgataccggttggggaaaagcagtatggggcaaactctacggacagtggattgccggagcaaacatcttcgtttacgaccatgagaagttcacccccgcagctattctggaaaagatacaagagtatcaggtgacttcactctgtgcacctcctactatcttccgtttccttattcatgaagatctgaccaaatatgatctgtcctcattgcggtattgcaccatcgccggagaagctctgaaccctgccgtattcgagactttcaagaaactgacaggcatcaagctgatggaaggcttcggacagactgagacgacattgacagtagctaccatgccttggatggaaccgaaaccgggaagtatgggattgcccaatccacaatatgacgtggacctgatagacaacgaaggccgctctgtagaagcgggagaacaaggtcagatcgtaatccgcaccagcaaaggcaaacctctcggactcttcaaagaatactatcgcgacgcggaacgtacacacgaagcctggcatgacggcatttactacacaggtgacgttgcatggaaagacgaagacggctatttgtggtttgtaggacgcgcagacgatgtaatcaagagttccggttaccgcatcggtcctttcgaagtagaaagtgctttgatgacacaccctgccgtgatagaatgtgctattaccggagtgcccgacgagattcgcggacaggtagtgaaagcaaccatcgtattgtctaaagactataaggcacgcgccggagaagaattgatcaaagaattgcagaaccatgttaagaaagtcactgcaccttataaatatccgcgtgtgattgagttcgttgacgaactgccaaagacgatcagcggtaagattcgccgtgtggagattcgcaagaacgacgagaaataagcaaaaaacagccgactcatcgataaaatcctccttatctgttcctcaaacagcatagggaggatttcttttggtaccaatgctacaaactgatcaatttatgctaaaatcagaccaatgcatcatttctatacttttatgactcaaaattgctctcatatataatttccccttcttatatttgccggcagtaaaaaccaaaacacaaaagaatatgattacaagtagaaagatttctcaggtcaatgtttttgctggtagtccctgggaggtggccagcgtgaagagtcttctgaaagcagcgtatatcgaggcttcaatgaaagacaacggattgaacggtatactcgtttcagttccatgcgaatactataccgcagcaatgcgtgtgattaatagcagaaaggttttatag

SEQ ID NO: 297 - DNA, 6813 bp, unidentified
  source 1..6813: mol_type = unassigned DNA
atgcgtattattttctgtctgatggttttcttgttcataggaaagaacacgatgctggcacagcagctgtcctcattcgtagaatatggagcagccctgcataccggtgacaatactcctctttggcaggtcagcaaccagcaaggactcacttcgctcgacaacaatacttacatacgtggaggaatatcctacaaacaccaacttggaaaatggaagtttgaagaagcactggatttggttgcagcagccggattcagcacgacctccttcattgtacagcaggcttacgtagacatccgttacaagtggtttggattctttgccggaagccgggaacagaattctccattgctgaatcaagagctgagcagtggcggcatgacctggtcgggtaatgcgcgtcccatcccacaagtacagataggcatacccgagtatgtacagttgctgccccgtttaggcctgaaaggagaaatctcgtacggatggtttacagacaacaaataccagcgggagcaagtcggagaaaaatactggtacaccaagagtatcaaataccatcataaagaagggttcctgcgtatcggcatacccaaaggaaaatggcaactggaactcggaatgaccctcgacacccaattcggaggatacaagattggaggttccgaatcgggagacttgggcaacggatggaaggattacgtacgcgtattcttccccggccacgggcgtgaggacggaccggtaggtgaacatctggctttccaaggcaattttctgggtagcgaatatatcaaaatgacttatcgtcctaaggaagatttctccatcagcgcctatctggacaatcattttgatgacttctccgccatggccaaactcaacggttgggatggcttatggggtgtggaatataaatccaaccatagacaagccatcaacggaatcgttatcgaatatctccagactaccaatatgagcggtccactgcacggtttgcaaaattctgtagtaggtaagaccggaggagccgacaactactacaacaacggttactacccaggatgggcacattggggtatggcgatagccaatccgttgatagcatcgcctatctataataaggatggcgatatgagtttcaagtacaatcgcgttaaggccctgcatctgggatggagcggcgacatcagcagtgagtggagatatgtggcaaaattgtcccacaacagaacttggggaactcctcatcgtccaatacccgatatattagaaaatttttctacttttgcatcgttttactatattccccgtaaatggaagggctggtgcttcaacgcgtcccttacattggatatgggagagatatatggagacaattttggattccaactgaaagtacataaaacattttaagaaaatgaactacatacaaacagagattgacggcgtatggctgattgagccgaaagtattccatgatgcccgcggatactttatggaagcatttaaggaagaagagttccgtgcacatgtcggaaacgttcacttcatccaggacaatgagtccaaatcctctttcggtgtattacgtggtcttcattaccagaagggtgattgcagccaggccaaactggtacgtgtcattaagggaaaagtgctggacgtggctgtcgacttaagaaaatcttctcccactttcggaaagtatgtcagtgtggagctaagtgaggagaacaaaagacaattcttcattccgcgtggttttgcccacggttttctggtgctgagcgatgaagctgtctttacatacaaggtagacaacgtatacgcaccacaatccgaggcatccatccgttttgacgacgaaaccatcggtattgaatggcccgttgctacggaacagcttctattatcagataaagacggacatgccgtatcgttcaaggatgcggtctattatgaataaaatatgaaaatagccattgtcggtacaggatacgtcggtttggtaaccggaacctgctttgcggaaatcggtgtcaacgttatttgcgtagacacgaacagtgaaaagatagagtcactgaaaaagggtgttattcctatctatgaaaatggactggaagaaatggttagccggaatgtgaaagcaggacgcctgcaattcaccacgtctctggagagttgtctgaatgaggtggaagtggtattcagtgccgtaggtacaccacccgatgaggatggaagtgccgacttgagccatgtgctggaagttgcccgcaccattggacgcaatatgcagaaatatgtgttggtggtaaccaaaagtaccgttcccgtaggtactgccagaaaagtgcgggctaccattcaagaagaacttgataagagagggatgaacattgacttcgatgtcgcttcgaatcccgagtttctgaaagaaggtaatgctatcaacgattttatgagtcccgaccgtgtagtggtgggagtagagtccgaacgagccaagaagataatgagcaagctctacaaaccattcctgctgaacaacttccgtgtcatctttatggacatcccttctgcagaaatgacaaagtatgcagctaactccatgcttgccacccgcatcagcttcatgaacgacattgccaatttgtgcgaattagtgggagcggatgtaaacatggtgcgcagtggtatcggttcggatacccgtatcggacgcaagttcctctatccggggataggttacggcggttcatgcttccctaaggatgtaaaggcactgattaaaacggctgaactgagcggctacaagatgcgtgtactccatgcagtagaggaggtgaacgagaaacagaagagtatcttattcgaaaagttgcagaagcatttcaacaatgatttggagggaaagaccattgccatttgggggctggcctttaaacccgaaacagatgacatgcgtgaagccccggctctggtattgattgacgagttgctgaaggccggttgtaaagtacgtgcctacgacccggctgccatgaacgaatgccgacgccgcataggagaaagtatttattatgcgacagatatgtatgatgctgcgctggatgcagatgcactgatgctggtgaccgaatggaaagaattccgcctgccttcatgggcagtcatcaagaaaactatggagcagccgttggtattggacggacgtaacatttatgacaagaaagatatggaagaacaaggtttcacatatcattgcatcggaaaataaagttgcagaaaaaagaaaagaaataaatagggacgttatgacaataaaaggaagtgcgattctcattgtacttgttgtctcattggcctcatgcagcaacagacaaacaggagaggtttccgtaaaggaagacctcattgcaaaacaactgttacaaggcatctgggtgaacgatgaaacagaaatgccgttgatgcgcatcgaaggggatacggtatattatgccaacccgcaaagcgctcccgtacctttcaaggttgttcacgatacaatctacatatacagcaatgaaccggtggcctataagatagaccgtcaaacggaatacagcttctggttccactcgctggccgacgaagtaattaaactgcataaatcagagaatgcggaagattctttggttttcaccagtcgagaagtggaggtcatttctactactccggaagtgataaagaaagacagtatcgtaacatacaagaatacaagatataggggatatgtatatatcaacccctcaaagatgaaggttttcaagacttcctattctgaaaatggaatcagtgtggacaatgtgtattatgataatgtaatccacatctgtgtatacgaagggaagaagatgctttacggccaggacatcaccaaaaagatgtttgcggatatattccctgccgaaatactgaatcaggccattcttgccaatatgaacttcatgggtgtggacagtaaggggtaccattaccaggcaacccttggcatacccgaaagctccgtatacagtctggtaaatatgattattggttttgactgtacaatgagcatagaaaaagcggaataaatccgctttttctatgtcttttcttcaccacaccacagtgtttatttcttctcaccgccattctgtggccgtttggcactgggctttccgcctttattgttgttacggccattcttatttcctcctggcctacgtccgtttccatggccgccccgtcttcctccgtcaaatgctctcggcttgtattctggtgcttcacccagctcttcgggaaccggtatcttatagatatccctatccaggaatttttcgatatttttaaagttaccctgctccttttcggaaacgaaggtgatggctacgccgtcattattggcacgcgccgtacgtccgatgcggtgcacataatcttcactgtcgtggggaacgtcgtagtttatcaccagacggatgtcatcgatatcaatacctctcgcaacgatatctgtggctaccaggatattgatacgtcctgccttgaactcatacatcacttcttcgcgctgtgcctgctccaagtcggagtgcatttcaccaacgttcagtttcatctgcttcaaagctttggtcacttccttcactttcagtttggaagaagcaaagatgataacgcgttccggcgtctcctctgcaaagaggctacggatgatgcccagcttctgattctcgtagcagacgtaggctgcctgcacaatcttttctgccggtttggaaacagccagcttcacctcggcaggattgttcagaatgttaccagccaactgttgtatcttagcaggcatggtggcagagaacatgattgtctgccgctctttaggaaggaatttgacaatttgcataatatcgtcataaaatcccatgtccagcatccggtctgcttcatccaaaataaaataagagacacgggaaagatctacataaccaaggctaagatgggctatcaaacgccccggggtagcaataacgacatcagcacccagtgtcaaccctcttttctgctgctcgaacagtattccgtcattaccgccatacacagccacgctggaaaccggcatgaaataagagaaaccttccatctgttggtctatctgttgcgccaactcgcgggtaggagccatgacaatgcaattgatggcatcggcagggtgtccgccctctgaaagcttgttcaatataggcaacaaatatgcggctgtttttcccgttccggtttgtgccactgctattaaatctcgaccttcgagtatgacgggaattgatttttcttgtatgggggtgcactcttcaaagcgcatggcatccagtgcctccagcacatcgccatttaaatgtagttctgaaaacttcatgtatctcttttaaatttgcgtacaaagataggaaaaagacttataaaatagactcttacagtaaaaaaataagcccttgggacaataattatctcaagggcttgcaaatttgtttcaagcatctgccttcaacggggaatatcaatgtatgaatccttaaatcccagaaagtaaagtacgccatctaagccgatggtgttgatggattgcttggcattggcaactactttgggctttgcatggaaagcgattccaaggccggcaattcccagcatgggcaggtcgttggcaccgtcgcccacagcaatagtctgcgcaatatccactttctccacctgagctatcaaacacagcaactctgccttacgcttaccgtcgactacatcaccgagatagcggccggtcagtttgccatcctctatttccagctcgttggcatacacatagtctataccgtacttcttctggaggtactgcccgaagtaggtaaaccctcccgaaagaatagctatcttgtaaccgtatttcttcaaaacatacatcaggcgatccacaccttccgtaatgggaagattctctgcaatctcctgcatcacggactcatccaatcctttcagcaaagccactcgttcgcgaaagctctcaatgaaatctatctcaccacgcatggcgcgttcggtaatggccttcacctggtcgcccacacccgcacgtatggccaattcatcaattacttctgtttcaatcagcgtagagtccatatcgaaacaaatgaggcggcgcatccggcggtacatattgtccaactggaaagagaaatccatttccagttcggttgccagtttcattaactgttcttgcatggcaatacggtctttcggagtgccacgaacggaaaattcgatgcaggcgcgtgtacgcgattcgcattcgtccagcgggatacgtcctgtaaggcgcttgatggcatcgatattcatgccttgctctgcaagaatacgggtaacggcagatatttgacaggcagacaacttacgccccaataaagtaagaatatagcggttctttccctgcatattcacccaatcctcgtactctttggtagtaatggggtagaaacggacagtcactcccagggaggaagccttgaaaagcagttccttcataatgaaccccgagtgttgttcttccgtcttgcacaaaatgcccaacgaaagagtattgtgaatatctgcctggccaatatccagaatggtagcatcatatttcgccagaatttccgtcacggaagctgtcagtcccggacggtcttcacccgtaatacgtatcaggatgagttcagtgttcaatggttgcat

SEQ ID NO: 298 - DNA, 9669 bp, unidentified
  source 1..9669: mol_type = unassigned DNA
atgtgtggaattattggatttacaggtaaattaaaagctcaggatgtcttattgacaggacttgcaagccttgagtaccgtggatatgacagtgcgggaattgcatactttaaagataccggaaaaatttcacttcggaaaactgtcggaaaagtaaaagatcttcgtgcaatctgcgatgatgataacaattctacgtgtggaatcggccacacccgctgggcaacccatggtggcgttaccaatgccaatgcacaccctcataaggtcggacaggttgcattgatccacaatggtatcatcgagaactatcatgatctcgccaccaaatatgatctgacggatgaactgatttccgagacggataccgaagttgccgccgcattgatcaataaactctacgaaggagacccaaaagaagctcttcgcaaagcagtagccgaaattgaaggttcctttgccttctgcgttctgttcaaggatcatcctggtgaaatttatgcggtaagaaatgtcagccctatggttgcaacatactgtgatgacggtgcttttattgcatccgatctgactgcttttatcgcatacaacaagcgttatttcatcgtgccggaatatcatattttaactatgaccgcggacggcattacgttagaagatttagacggtcattccgtagaaccggaatatatggaagtaaactgggatgttaccgcagcccagaaagatggttatccgcatttcatgatcaaagaaattcatgaacagccggctgccatcacaagaaccattaccccacgtatcaaagatatgcttccggatttttcggaagatgccattgcggattccttctttgaaaatgtaagcgacattacgatcgttgcctgtggtactgcaatgtacgcgggaatggtaggaaaaaccatgatccagaaccgcctgcatattccggttaccgtggcaatcgcatcggagttccgctatgaagaaccggtaatcaatgaaaaatccatggtgatcgtcgtatcccagtccggagaaaccattgataccttagaagctcttcgccttgcaaataaatatacaaagaaaacactgtctattgtaaatgtaaaaggctccagcattgcacgtgaaagcagctatgtattatatacacatgccggtccggaaatcgctgttgcaagtacaaaagcatacaccgttcaggttgcttctttttacctgcttgcatgcaaacttgccatgacacagcaaaagatttctgtcgaagaagcacgtacatttattggaacactgcaggaaattccaaattacatcgaggaagttcttgcacaggctcctgatattgaacagctgaccaaacgcatgatcaatgccaacaacgcgttctttatcggtcgtggactcgattataccctttgcatggaaggtgctttgaaattaaaggaaatttcttatattcatgccgaagcctatgctgccggtgaattaaaacacggaaccattgccctggtcagtgaaggggttcctgtcattgccgctgctacccagaaacatgtatacagcaaagttatttccaatatccgggaagtaaaagcccgtggtgcttatgtcattcttttgtccaaagacaaagaaatcacagatccttctatctgtgatgtacacatcaatcttccggatgtatccgacgaatttacgatttttgaatctgttgtaattttccagctgattgcatattacacatccgttggaaaaggcttaaatccggatcagccacgtaacctggcaaaatctgtaacggtagaataagaaaaaactgtcgcgcgaaaattcgtgcgacagtttttttgacatagagcctttctaaaacttttgaaggcaaaaaaagaaccccagaagctctctaaaagcctctgaggttgcccctgccaaggattctctcacccatgtaccggaatccttgtatcgtcggcgcgacaggatttgaacctgcgacctctgcgtcccgaacgcagcgctctaccaagctgagccacgcgccgtttcaactgcccaattatagtaacacattctccggtgtttgtctagtgaatttttttaatttatggtacaatacaaaaaaagaatggagaagaacaatgaaacatactgctttgattacaggtgcatcccgtggaatcggtgcagccctggcatgtcgatttgccgctgaaggctatcatctggctctttgctgccataactcttatgaaacgctgcaggcacttgccacaaaacttgaaacaacctgctccatacaggtgcttggcttccgtggtgatgtaggagactatacttttatctgtgacatggtgcaaaaaacactggataccttcggccagattgatgtgttaatcaacaatgccggcatctcttatatcggtctgctcaccgacatggatattaccgactggaaccggattgttgcgacaaacctcacatccgtcttttccacctgcagacaggtcatcccctccatggttcatgccaaatccggacatatcatcaatatttcttctgtatggggaaatgtcggagcttcctgcgaagttgcctattctgcatgcaaaggtggagttaattcccttacacgcgctttgggcaaagaacttgcccctagcaatatccaggtaaatgccatcgcctgtggggtaatcgatacggatatgaaccgttgtttctccgaggaagaacgctctgcactcatcgaagaaattcctgccggtcgtatgggatccccggaagaagttgcttcactggcatattctcttgccacagcaagcagttacctgaatggacagattctcaccttagacggcggatggatttaatttcttatctttttggaaatctttttccatttatttaagaattaaaacgcaatacgcgttttctctgttttttatatcaactttctataaaatcatttgtatgaaaacgaatgataaaaataaatacaaagattttggtgaccgtctgagtctgattatgtataaacaaaatatttccaatatccagctggcaaatgcaatgtttgtttcgccgtccacgatcagcggataccgtaccggtcgtcgttctccgaccgttgcggatcttgcagccatcgtgcagattctgaatgtttctgcagattacctcatcggaaccagtgaaattacaaccagacccgataccaccgaaaaaaatagttgagcacgccctgtttccagagcggtgcccaactcttttttataaatcatgttctgccagtaaaattaccgtagaacgttccggaacacgcacacgtgtctgatctccctgtgtctgggcttcaaaatctgccccatcctggtattcacagaaagtatttactacaagtttccaatgataagactccggcaacgaaggcaggcgcatctccaaaggctcccaatacgcattcattccgtaaaagatcatatcatcatccgtatcatcggcatttcttcccgcatacatgattccaattaaatgtgtattatagtccgtataattccggttcggctctccgttatggatacttacggaaggtaacccgcagactgccggctttgtatcccttcgcagaatcggatgctttgcacggaaatggatcataaaacgggcaaaatcatgaatctcctgaaattcttccagtctgttccagtccagccaggaaataatattatcctggcagtatgcgttgttatttccatactgcgtattacaaaattcatcccctgcaaaaaacatagccggtccacggctgcataacaacgcggcaaatgcattcttcacgagtctgcgccgcaggcccataaccaccggatcatccgtctcaccttccaccccgcagttccagctcaggccgttgttatccccgtccgtattgttccatccgtttttctcattatgcttttcattatatgaatacagatcatacaacgtgaacccatcatgacaggtcagaaaattgacggatgcactatatccgcggcttgccggatcatacatgtcggaggatccggtgatacgtgtaattgcacgccctgcgacgccactgtcgccctttaaaaagcttctcatatcatcacggtatcttccgttccattcggcccagcggttccaggacggaaaacttccaacctgatacaagccacccgcatcccaggcttctgcgatcagcttcatatcccccagaatagagtcaaatgcaagggcttccagaatcggcggattctccatcggtgcaccattctgatctcttcccagaatcgatgccagatcaaaccggaatccatccacccggtactctactgcccagtgccgcagacagtctgtgataaaccgccgtaccaccggatgattgcagtttaagacattgccacagccgctgaaattgtaataatatccatccggtgtaagcatataataaatattgttatcaatccccttaaagcaaaaacatggaccgttttcatttccctctgccgtatggttgaataccacatcaagaatgacttcaattccattttctttcagttcgcggatcagacgctttaattcatcaccctcatgattatgctcctgatgaaatgcataacttgtattcggggcaaaaaaggaaaccgtattatagccccagtaattgtacaactgcacgccatccaccacacgggcactttccatttcatcaaattcaaaaatcggcatgagttctaccgcattgattcccagatctttcaaatacggaattttctgtcgcagaccttcaaatgttcccccaccttttacaccggaggacgcatctttggtaaatcccctgacatgcatctcatagatcaccagatcttcaaatttgtaattcagattccgataccgcccccagtcaaaatcactttgcaccacacgggctttatagacaaaatcctttccgccttccggtttttctccccagtttctctgaccggtaacagctttcgcatatggatcaagaagcgtatgttttctgttaaacagtaaccctctcgcctgatcggcaggaccgtccatctgataggcatactcaaaatcctctgcttttaagccaaaaacaaggatagaatacgtatttccaattttataactttccggaatgcggattcttgcatacggttcctgtgccgccggccggaataacagcaggacacagctcgtagctccatgggagcttacggtaaaacttaccccttcctctgtctgatatgcaccattcatctgataaaatcccggacgtacatcaaatccaccgatattatcgagtggatgaatgacttccccgagactttccatttcttcgtctatcggccagcttttctgttttgacggataattccaaaaacttgcattcatgtgctgattcctcttatcattattatttacttgccacataaaattatagtatccccctactcttccctgatgattaccctgccatttgcgtcaaatccgattttactgtacttttccgaatactcattcatatgatcaataatcgtctgttttctgtcgccttttgctatggcaggctgaaaattatttctttctgatgtggaagaaatgctgcatggtatcatatcggctgatatatctgtctgcagtaccccatccacaaaggtaaaggtctgttcatagatcgccgtatctttgtcttttggattcctgttccccccaaagcagaaatttccaagactgtagcagatcatttttccgttgtataattccattccctgcaatacatgaggatgtgtaccgaccagcagatctgctccccagtcaatcacctggtgtgccagcttctgctgataatcattcggataatgatccccctctatcccccagtggcaacaggcaattaccagatccgctccttcttcccgaagttctgcaatcccatcccggatataattggcatgtttttcatctgcagacaactggcttgcggagacaattccgattttgataccatccttcgtggtataggtatccacatgatcattgaatccgaagataatccctgctttatttaacacttctctggtatcatcaagtccctgctgcccataatcaaacgtatgattatttcccagacttgccccctccacagaactgtctgtcataataccaacatactccggttttccttttaagttccacgttttttccacacgctcggtcgcatttgacaacacacattccagattgatcagtgtaaaatcatcctgctcaaaaatacttctgatatttttaaaaaaataatcctgcccgtatttatcatagtattcatgaaaggaacctgcatacccatgcgtctgtgttgccccaagcgtacagtcacctgtcgccgtaatttttaccgtctgtatcaccggttcctgctgcgtttcagttgcagtcccggtttccgtttcttccagcgtacccggttcttccgtcatctgtgtctccgtgattttttccgtagaagagggcaaagccgatgacgttgctgcaggagaagaacatcccgtcagcaaaaatcctgccattaggattggcaatatccattttttcatacgttttcagactcctctttcacaagaatatccaccgtgtgaccgcttgcacccataagatccatccgttcacaggttgccagatgatactgcagaaacgcatcaaactcttcttccgtcagcgcatttaaaaacggacgcatataatttgctgcaccgtctgccgctatgatctgccggcgcctgacctctacctgccggtccaatgcttcaatatcttccagacgaaccatggaatacagaggattggcttttgaagtacagtgataatcctctgtgagcattccctcctgaagtgcttcaagaatatgtttttccttaaacgcatacgtgataacggaaaattcattcataatatacgccacgagaatcctgcctccgggttttgtcaccctcactgcctcccgcagcgcagcaagcttgtccttttcctcatgcagatgatacatcggcccaaacaacagggttacgtcaaaggaatcatcggaaaattttttcagattcattgcatttccctgatatgcatgcacgcctgcacccttctgtttcaagcgtcccagattatgctttaccagttccacggccgtcacatcgaacccttcctgtgccagcggtacgctgtatcgtccggttcccgccccgatatcaaggatatgaatttcctcttttgcacgttctttcacaatttcatccagacactgatggatataatgcatacttgtcacaaattccaccctgccgtgtcggctgtccagacgcttctcttcattaaatttattataataggcttctaagtctgtcatattttaatactaacacattttctttaaaatttcactcacaatcgctgatgcgacatccgctttgctcattatttccagttccctgcagtcatctgccgtaatcagcgtcaccacattggtatctgtaccaaatccggctccggctaccttcaggttattcgccacaatcatatctgcattcttttttgcaagttttgcacgggaattctccagcatatgttccgtctccatggaaaatccacacagaaactgtcccggttttttgtgcgcgcccagatacgaaaggatatcttccgtgcgttccatcgtaagagtggcattcccgtcttttttcttgactttctcatcgaccgggtgatccggacgataatccgccacagctgccgctttgataataatatcctgttgctctgcggtctcctttacggctgctgccatatccgccgcagatacaaccggaacgacctttacaaacggcggcggagtgattgccaccggtcccgtgatcagcgtcacttccgcgccacggcgcatgcagttttccgcaattgcatagcccatttttccggtagagtgattcgtaatataacgcaccggatcaatcttctcctgtgtcggtcctgctgtgaccatcactttctttccaaccatgtccttttcgcaggcaagatctttcataatataagaaaacagtgtttccggctccggcatctttccggctccggtatccccgcaggcaagataaccactcgccggatcaatgatatgaaacccataatgctccagctttttgatgttatcctgtacgatcggattttcaaacatattggtattcatggcaggggaaacatacttcgggcattttgccgcaagaatcgttgttgtcagcatatcatctgcgattccgtttgccatcttgccgatcacattggcagaagccggcgccaccataaaaatatctgcacgctttgccagtgccacatgctcgacattgaactggaaattccggtcaaatgtatcgaccagacacttgttgcttgtgagcgtctcaaacgtgataggattaataaaattggttgcattttccgtcatgatcacatgcacatccgcatgctgcttgacgagcgcacttgccagataggcgattttataggcagcgatacttccggtcacaccgagtaccacacattttccttttaacattgtctcttactcctttgcagaaaaaatcacatcttctgctattttatcacactttttccctaaaacaattgaatttttgtcatctgttccagtatggaatctttgacagaatcgttcagatatgctggatttaattttctttttgcatatgcaaggtaagaaccatttgtctcttcaatcaaaactgccgtaaaaaaccgctcccagctaaaatatgttttgctttccacatattcccacggcttttccagcacctgatctgcccatttgctttttactacttttgcctttaatatcagccattcaaatgactccggcaaataaagcaccacttgatcttttccaccaatcaactgcatcactctgtcaatttcagaaccaaatgccgcgccgtctgcaattacaagtatgcgttcatttttatgcatatttaaataatggaaaacatttgactttccattcattgtctcacatttcaattgctgttgcctacatacagaattaaaaaactgataaccggaattactgtcttccgttattacaacctctggtttgatatccttctctaaagtctgtgctccatatattctgtaaaactcatgataacacggttttaatgttccgtattttcctgaagtacgaattccatagatttcctccacgctatacggcaaagaaggcaaggattccctggaaataatgacataataattatctgttttctgaatagtatctgcgaattctactgtcttgataaattcgtttccctcatcaataaatacaatactatcctgcattgctgataactgttctttccacagtgagccttcgagcacataacattttttgtcacacgtcagttccacaggggtcccggatggattgtttacgtattcccgaatcatatctaccaatgtggtttttccagttgcgctgtctccccggatgaccgtcagatttcttcgaatttcaaaatcatattttaagcgctttgttgatacaataattctatgttttcccttcat

SEQ ID NO: 299 - DNA, 12113 bp, unidentified
  source 1..12113: mol_type = unassigned DNA
tcactccctccaccgtacggtcaggctcccctctttcagcttccgcaggtcatcgctctccgagaaatcttcccggtcacgggtgaggctggggttgtagtaggggtcgtccagaatcttctctttgccgtggatggcatacagccgctgctgctccgaggcaaagcgggccgccttggccgggtctttctcgtcgccgccgcggctcttgctctcgtaatgggtcagccgggcgtagggcgtccaggcaacgcggtaacccgcatcccgcacccgcaggcagaagtccacatcgttgaacgccacggcgaacttttcgtccagcccgccgacttcgtcccagacactggcttttaccagcaggcaggcaccggtcacggcggagaagtcctgcaccgtcgcggtgcggaacatatagccgctgccgccggccttcttgtacttgtggctgtggcccgcgtagccgcccagccccgtgaccacgcccgcgtgctggagcgtctcgtccgggtagtagagcatggcaccgcagatggccgccccgccggggtgggcacattggcgcagcagctcggtgagccagtcgccgttgcgcacctccacgtcgttgttcagcagcagcaggtagtccccgctggccgctttccggccaaagttgttgatgcccgagaagttgaagcccttttccgggtaggtgaccactttcaggccctcgtaccgcttccgtgcttcttcatagtaggcaaaagtggccgggtcggcagagttgttctcaatgacgatgacctcgtaattgtcccactccgtcttgctccagatgctgtgcaggcacttttccaggtcgtcggtgtggtccttattggggatgaggatgctgactttcgggtcgctctcaattttccacaagacgcggtaggtgctggggaacaatccatcggtgacggtgcccacccggcccgtgcgggtcaggtggtcggccagcgcctttttggccgccttggccacatagggcttggcgtcggtgccgccggaggtggagcccgcatggacccgccagtagtagagcacctggggcagatgggccgcgccgcccactttttcgatcaggcggaggaagagatcgtggtcctggctgccgtcgcactccgggcgctcgccgcccacttcctcatataaggcccgccggaacacggccaaatggcagatatagttgcagcagagcaggtagtccggcgcgtagtccggcttgaagtgggccaccagcggccgctggatgctcttgttgaaaagagcttcgtcgctgtagacaaaaccgtccggtttgccctgcgccctcaggtccaggatggccctgcccatggcgtacatggcgtggggagccaggatgtcgtcgtggtccgccagagcaagatattccccgctggcaagggcggcagcagcgttggtattggctgcaatgcccttgttttcgatctttttgtatacgatatgttgattctttgcctgatattcccgcacgatctccccgacacggctgtgagcggcatcggaagcatcggcaaggcagagctccccgttgggggcggtctggtccacgaacgaatccagaaactcccgcaggtaattttccggggtattatacagcggggtgaggacggaaatggtcggaagcccgcagtcctcgaacatttttccggccatctcggcccgctgggcttccagtacctttttggcgggcaggtagcgggcttttttgccgaagaaccggcgcttgacaaagcccgccccccgcgccatcatggtgccaaggccctcgtcccgggtcagctggacagcatagcccgccagctctttggcgcgtttcagtcgcaaattcatcccttatgcctcgccgcgctggacggccttgtacgcgttgcagaccgtcatggtatcgccgttcatcttgaggtggccgtggctcagccatgccaccttgctgcacatccgctcgatctgctcgatggagtgggacaccagaatgaccgtggtgccgcccgccatcagctcctgcatccgcttttcgcacttctgctggaacaggaaatcgcccaccgaaagcacctcgtccgcaatgaggatgtcgggcttggtgatggtggcaatggcaaagccgatgcgggccaccatgccggaggagtagttcttgagcggcacatccagaaagttctgcagctcgctgaactccacgatctcatcaaacttttcgtccagatacttgggcgagaagcccagcaccgtaccgttgaggtagatgttctcccgggcggtcaggtccatatcaaagcccgcgcccagctcaatgaggggggcaatggtgccgttgaccgtcactttgcccttgctgggcttgtacacacctgcaatggtcttgagcagggtggatttgcccgagccgttcaggcccaccaggccgtaaaaatcgccgggcatgatgtccaggctgacgtctttcagggcataaaattcatcgtactgcagccgcccctgcaccatggccagaagatactctttcaggctctcgtgcttttcggtggagaggttgaagcacatggaaacattgtccactttaataattggttccattttctcccctccttaaatgtgcagcacaaagcggtcctgcgttttgcggaacatctgcacgcccaccagcatggaaagcagcgcgcacacgccgcacaccgccagcatgttgaaatccagcgggatgccccacatcagagtgcggcggaagcccgtgatataccagtacatggggttgagcttgatgatctgctgcatgttgaacccgccgatggagaacgtcatctgggtggggtcatagaagatggcggagaagtagagcagcgccgtgatgaacacgctccagatgtgcatgatatcccggaagaagacggtggccgccgccaggaacaggcccacgcccaggctgaagaagaagagcgtcaccagcgggtagagcacttccagaacagtccagtggagggggctgcccgtaaacaccataaccagcgccagcgccacaaagctgaacacgcagttgaccatggcaaagcagcatttttccagcgggaagatatacttggggatatacacctttttgagcagcggggccgccgacagcacgctggacatgctggaggaggtggcctcgttgaagaagttgaagagcagctggccgcacatcaggaaaacggggaagttgtcgatgccgctgccgcgcatatccatcaggctgctgaacacggcccagtacaccaggcacatgagcagcgggttgagcacgctccacaccacgcccagcacgctgcggcggtacttgagcttaaaatcacggctgaccagattccacagcagatagcggtagcgccagaagccgttgaacattcccttgatttttgccacgggcgatcaccacttttcaaagaattcaaacttctgggaggcaaaggactcatgcagcttgtccttcgcgctggtcttgtgctcgcagccgcagtccggccactgcacgttgacggtggggtcgtcgtaggggatgccgccctcgctggtggggtcgtagacatcggtgcacttatagcagaactccgccacgtcgctcagcacgaggaaaccgtgggcaaagccctccgggatatagaacatcttcttgttctcctcgctcagggtcacgcccacccacttgccaaaggtcgcgctgtgggggcggcagtccacagccacgtcgtacacttcgcccttggtcacgcggaccagcttgccctgggtgtggttcttctggaaatgcaggccgcgcagcacgccgcgggtagagcggctctggttgtcctgcacaaactccttatcaatcccggcagcagcgaactggtctttctgataggtctccataaaataaccgcggtcatcgccaaacacctggggctcaatgaccacaacaccggggatctcagtttccgtaaacgtaaatttacccatttttcattttcctctctgttttttcgttattgtttttgacattttgttttttatttggaaaagccggaatggcttttgcgcagtgttagaaaagacgttgcgtggattgccaaagcctctcctactaggagaggtggcattgcgaagcaatgacggagaggttggacagagcaccgccttgtccatatgcggatgtcatacaacctctcagtcgcttacgcgacagctccccttgtaggggagcccttggcaaagagggtcagtgcctcgattttttcttcgctttcgagcggagccttaccacaacaaatgcaactcccgccgccagcaccgtgcaccccagcgagatgccgatgagcaggcccgcggtcttgccggggctgcgggtgccgctgcccagctggacaccggtgttccgctccaatagctcctccagtcccgtaatcgtggccggcacccggacgctggcggactcctgcttgtcctgcccgttgacggtatacacggcgtacaccgccgggctggtgcccaagacatactgttccggcagctccagcgtcacggacacatcccctgccgtcaggccgtcagccaacagcagccgggtgccggggtcggtcaccgtgaccatgcccagcggggcaccgcctcccgccaccgtcagctcccgggtcaggccctgggccgggatgtcggtatagtttgtgtagtgggcaaaggcgtaatccagcagggtgcggacatcgttgtacttgtcggtcttgatgttgctctgcatggtgacgcagatgagccggacaccgttctgctccgccaggcagacatagctgtagcgggcaatgttggtgtagccgatcttggagccttgaatggccgggatgtaatacctgctggaacctacccgcattttgtcctgctggtggaaataccgctctttgggctggatgtccgtgggcttcatgggatacatctcgttgcgggtaaacagcgtctcaaaccccggctgggtcagggcccagcgcaggatctgcgccatatcatagcagctggtatagtggtcggtatcgctgatgccgtgggggttggcaaagtgggtgtgcttgaggcccagttccgccacctgggcgttcatggccgccacgccgtccgcaatggtgccatccccgaaatattcggacagcaggttggcgccatcgttggcgctggccatcatggtggcatagagggcatccgtcaggggcacatgctccccctcctgcagggcaatgtggctggaatccgtccccgcgagggaatagacatcctcgtgggtcacttccaggctcacaccatcccactggccctgggctttttcacaggcaaggcccagcgtcatcaccttggtgatggacgccgggtgcagctcttcgtccatattctgctgggccagcacaaggccggtgtccgcgtcgatgatgcagtacgcctccgtggccgacagcgccgggcccgcggcccgcgccatgggtgcaaacaccgcgcagacccagagcagcaccgtgcaaagcacggcgatctgttttttcatctggtcatttctccattggtgatttagataatccttttcacgggcttgccctctccgtcattgcttcgcaatgccacctgttccccactttgtcacctacggtgacatttctccccgcaccggggagaatctttcccaaagtgggaggccttggcagtccacgcaaagtacatctctttgccaatggctctccctttgggagagctggacgcgaagcggcctgagagggctaggacgctatcatacattatcttgttcagtataccacacttttcccttgctgaaaagacattccgtgcccggcggcggggcaaagaacgggctgcagctgccgcccctccagcgccgcgtccagtgcggcgggcagcagggcgaaccgggctttcaggctctgcggctttgcctgcgggtcatcctggccgtagggcacaaagtaatagtgcttgcgctggtacagccgggcaatgttttctcccgaggcccccagcccgtcgttggtggagacggcgatcactaccggccgccccacccgcagcaggctctttgccgccagcgtcaccggcgtgtccgagaggcccgccgccagccgggccagcgtgctgcccgtgcagggggcgatcaccagtgcctcggccatgtttttgggccccagaggctccacggcctgcaaactgtccagtaccgggtgcccggtcaaggcttccagccgctgccgccagctcccggcccggccaaaccgggtatcacaccgggcggcggtattgctcatgacgggcagcagctcccagccccgggccgtcagttcctgtgcctgttccagcgcggtctccagcgtgcagaagctgccgcagaccgcaaaggcacagcgtcgtttctcgttcatcgtgctccctccctttcgcgcagcatctcgcgcaccgtccgggccacgatctccccggctgtttccggcgcgcaggcagcgggcaggctcaacgcatggatggccttgtggccgcagcgggcggcggcatcaaaatccgtcccaccggggcgggaagccagatccacgatcaggctcccgggccgcagccgggccagcaccggggccgtgagcacctgcgccgggatggtattcaccaccgtgtcaaaggccggggccagccgggccagccgggccagttctgccccctgcatccccaggctctctgcctgtgcccgctgggccgggcggcgggctgccactgtcacatgggcccccaatgccgccagccgggtgccaaccgcctgccccaccgggccaaatcccagcagcaggaccgcgctgccccacagggtgcgtttgcgctgggccagcaaaacgccgatgcacccctccgccgtggggatggcgttgcggatggccagctcctcccgggcaaagtaatccaccagctccaccccggcttccgctgcaatggcctttgcttcttccgagagcatcccgcccagcgccagtgccccggggcgtgccgcccgcagcagctccgccaacggggtgcgggccgcgtccagcggcaacggcagcaggatatagtctgccagcgcgatctcttccggcccctccaccgcataccccgcccgggccagcgcccggcctgccgccagctgccgggcatcgctgccgatcaccgcaaagcgtttttgtcgttccatccaaaagccctcctccccaaagcctgcgccattctatgcacaggtagggaggagggtgacggacgcaaacaaaaagccccggagcggggccgcaaggcttactccggggcaaatgtgcggttttgaaaaactaaagcttacttcttagcggctttagcaacaatagcaacataatcgtcgccaacaaccttgacaccgatctcaatcttcttgtcgctgttcttcacagaggtcttcagaactccgtcagccgtcttagccttctcgccccagctgttcttctcggtggctttgctgggcttcttgacgatcacatagttgtaagcaactttatcattgccaatgagaatgatgccgctggtttctttcttgttctcgtcccaagctttctgagcctcgtcgtccagatcggtcttgtgcttgtaagagacagcgctgacatcgttcagcttgttgaccagagctttctcaaccaggttgtcgcccactgcacagccagtcagcatggtcagagccataacgcaaacgagggcagcagccatcagtttcttaaatgctttcattgttgtatcctccgtaatcagatagttccccagcaacggcccgccttgtgcggacagtttgctatgttaaattcagcatacccctttttgtggcaattgtcaagatttcactgcgttttcatcatttttaccaatcggtacggtgagaaaacagcgatatgaccagtttcgccccggggcctccaaggcattttccacacggacacacgcaaaaaactcccccggcaaaacgccggaggagcctgcgattttattgggtttttttatctgatctctcggggcgtccctgactgtgcgcacgccgggagattacttcaggaactttgccaccgcgcgggccacgatgccgcccagaatgccggagacgaggaactccatcacaccctgcacgccgaccagcagcaccacgaacatgaacgggttggccgcgcccttggcagccacgatgttctggatgtaatcacagccgtagaatgccagcacgatgtagcccatgaagaacagggtgttaaggccgggagcgcacatggcggaaacgatgtagctccaggtgccgggcttgtcgaaccgcttgaggccgttgaagacgaggcccacgcacaggcccatcagcacacgcatccccacgcagaggatgaacgtgttgacagggctcacctggaacagggcgcccgtcatggccgaagcgccggtgacagcgtcatagaagctcaccgcgccgaacacgccgcccaggatggcaccagccgccgggcccatggtgatggcacccacggcgatggggagcgtcagaaagctcatgtaaagcgggcccatgggcacgctgcccaggccgatggctttcatgaccagctcaatggcgaccagcagtgccagccgggtgagagtacgaagatcgttattctttttcataaaaatatttcctcctgctgccgttccgccctagatgtcggatacggcgcaaacctgcccgcaaaaggtgcggggccgtttttctattttactttggaatgctttgtcagggaacgttccaaagggagagaacttattgatcacacgggaagcggatgcctgccgagcggcgggcggcggtcagcacccggctgacggcaatggaggtatccagcatccggctgcacagctcctggtcgccgccctcaatggcgcgggcaaaggcctcaaactccgcggccagccgggggcggccgccgttgaggttgtagtgttcctctttgccgtcgttgaggtgcagcgtcaggccgccgcagtagttggccgtggatttctgcagcagatagcccttggtgccctgaatgacataccgggccggggccccgcagtcttttgccgccatgctcacggccttgaagccgctgtaatccatggtcaggatgccgctggtgtcaatgccgtggtcgatgttggccgcgtagttcacccggttgggctccccgaacaggcccacgatgtagctgatgttgtagacattcaggtccatgagggcaccgccggcgcaattgggatcaaacgacggggccacctgccccgcgcagaacgcatcgtaccggctggaatactggctgaaattgcactgcaccagcttcaccgtgccaatgcggggcagcagctcccggatcttatgatagttttccagatactgggtggtcagtgcctcaaagaggaagacccgtttgtggcgggagagggcggccagctcttcggtctgggccgccgtgggggccatgggcttttccacaatgacatgcttgcccgcttccagcgccactttggcatagcgggtgtgctgcaaattggggacggccagatagaccacatccacccactgcagcagctccaggtagttggtggtgcactggggcacatggtaccgggcgcagagctccgccgccagcggcgcgctccgctgggtgctgcacagcgcctgcacctgaaacggcgagtccgccccggccagccagggcaaaaactccttgacgatcatcccggtgcccaggatgccaagcttcatcttctgttccattcttcctagttcctatcctgtttgctcgtgtcagcccgccttggcctccgtctcgtgccgctcccggcggatggcggcggaagttctgcccgtgaggcttgcggcctccggcggggtgatggtgctgctggggcgcgttgagctggtagagcagcgccagccccttgagcagcagctcggggtcataggtcagcgggtggcggcagaggggggtgacatactttgccagcccgccggtgaccaccagcgtggccgggcggcccagctcctcttcaatgcgggcggcgatgccgtccagcagcaccgccgtgcccagcaccgagccggagagcatacagctctcggtgttggtgccgatggcgtttttgggcgaggagagatgcacctgcggcagctgggcgcagcgctcccccagtgcccgcaggcccgtggagagccccgggcagataacgccgccccggaacacccggttctcgtccaccacattaaaggtggtggcggtgcccagatcgaccgtgatcaccggcagcgggaaattggccgccgcgtaggccgcgtccacaatgcggtccttgcccacggcgtgggggtcgggcacccccatggtcagcccggtgcggatctccggcgagacgatgacgggctttttgcccgtgtagtggcgggcgcactcggccagcgcccccgtgatctggggcacgacactggtcagcacggccccctcaaaccggacgggccgctccgggtggcggcggtgggaaaatactttctccatttcggcacggtactccgccgccgtgcgggtgcgtaccgtgtccatgtgggccacaaagcatacacgtccgtccttgatgccccccagggcgacggtggtgttgcctatatcaatggcaagaatcatattgaaacctcattcagcaagggtttttaattcaagttattttaccgcattttcccgcaagatacaagcccatgcaaagattttgttgtgctggcggaacttttgcattatactaaggagaggaatcccaaaacacaggaggttttttggatggatctgcacggaaaatgcgtccttttgggcgtcagcggcggcattgccgcctataaaatggcaaacgtggccagcgcactcaaaaagctgggggccgacgtggaagtcatcatgacccggaacgccacccagttcatcacgcccctcacctttgagaccctgacgggccacaagtgcatggtggacacctttgaccgcgattttaagtttgaagttacccacatctcgctggccaagaaagccgacgtcatcctcgtggccccggccacggccaacgtcattgccaagatggcccatggcattgccgacgacatgctcaccaccgtggtgctggccgccaagtgccccaagctggtctccccggccatgaacaccgggatgctggaaaatcccatcacccaggacaacctcaagacgctggagcactacggctttacggtcatcccctccgagagcggcctgctggcctgcaaggatgtgggcagcggccgcctgcccaaggaggatgtgctcattgagcacatcctgcacgccatcgccaagcccaaagatctggcaggcctgcacattgccgtgaccgccggccccacccaggagccgctggaccccgtgcgctacctgaccaaccattccaccggcaagatgggctatgccgtggcccgcgccgccgccatgcggggtgcggacgtcaccctcatccacggccccacggccctgcccccggtcaagttcaccgaggacgtgcccatcaccacggcgcaggacatgtatgaagctgtcaccagccgctttgcggacatggacatccttgtgatggccgctgccgtggccgattaccgccccgccaccgtggccgacgataaaatcaagaaaaaggacggcgacctctccatccccgtggagcgcaccgccgacattctgggcaccatcggcccccggaagaccaagcagttcctctgcggcttctccatggagacccgcgacatggtagagaattccgccgccaagctgaaaaagaagaatctggacatggtggtggcgaacaacctcaaggtctccggcgccgggttcggcgtggacaccaacgtggtcacgttcatcaccccggacggcacccgggagctgcccctgatgagcaaagccgacgtggcagacgccatcctggacgaaattttaaagcgccgcggccactga

SEQ ID NO: 300 - DNA, 8602 bp, unidentified
  source 1..8602: mol_type = unassigned DNA
  misc_difference 2099: note = a, c, g, or t
  misc_difference 2100: note = a, c, g, or t
  misc_difference 2101: note = a, c, g, or t
  misc_difference 2102: note = a, c, g, or t
  misc_difference 2103: note = a, c, g, or t
  misc_difference 2104: note = a, c, g, or t
  misc_difference 2105: note = a, c, g, or t
  misc_difference 2106: note = a, c, g, or t
  misc_difference 2107: note = a, c, g, or t
  misc_difference 2108: note = a, c, g, or t
  misc_difference 2109: note = a, c, g, or t
  misc_difference 2110: note = a, c, g, or t
  misc_difference 2111: note = a, c, g, or t
  misc_difference 2112: note = a, c, g, or t
  misc_difference 2113: note = a, c, g, or t
  misc_difference 2114: note = a, c, g, or t
  misc_difference 2115: note = a, c, g, or t
  misc_difference 2116: note = a, c, g, or t
  misc_difference 2117: note = a, c, g, or t
  misc_difference 2118: note = a, c, g, or t
  misc_difference 2119: note = a, c, g, or t
  misc_difference 2120: note = a, c, g, or t
  misc_difference 2121: note = a, c, g, or t
  misc_difference 2122: note = a, c, g, or t
  misc_difference 2123: note = a, c, g, or t
  misc_difference 2124: note = a, c, g, or t
  misc_difference 2125: note = a, c, g, or t
  misc_difference 2126: note = a, c, g, or t
  misc_difference 2127: note = a, c, g, or t
  misc_difference 2128: note = a, c, g, or t
  misc_difference 2129: note = a, c, g, or t
  misc_difference 2130: note = a, c, g, or t
  misc_difference 2131: note = a, c, g, or t
  misc_difference 2132: note = a, c, g, or t
  misc_difference 2133: note = a, c, g, or t
  misc_difference 2134: note = a, c, g, or t
  misc_difference 2135: note = a, c, g, or t
  misc_difference 2136: note = a, c, g, or t
  misc_difference 2137: note = a, c, g, or t
  misc_difference 2138: note = a, c, g, or t
  misc_difference 2139: note = a, c, g, or t
  misc_difference 2140: note = a, c, g, or t
  misc_difference 2141: note = a, c, g, or t
  misc_difference 2142: note = a, c, g, or t
  misc_difference 2143: note = a, c, g, or t
  misc_difference 2144: note = a, c, g, or t
  misc_difference 2145: note = a, c, g, or t
  misc_difference 2146: note = a, c, g, or t
  misc_difference 2147: note = a, c, g, or t
  misc_difference 2148: note = a, c, g, or t
  misc_difference 2149: note = a, c, g, or t
  misc_difference 2150: note = a, c, g, or t
  misc_difference 2151: note = a, c, g, or t
  misc_difference 2152: note = a, c, g, or t
  misc_difference 2153: note = a, c, g, or t
  misc_difference 2154: note = a, c, g, or t
  misc_difference 2155: note = a, c, g, or t
  misc_difference 2156: note = a, c, g, or t
  misc_difference 2157: note = a, c, g, or t
  misc_difference 2158: note = a, c, g, or t
  misc_difference 2159: note = a, c, g, or t
  misc_difference 2160: note = a, c, g, or t
  misc_difference 2161: note = a, c, g, or t
  misc_difference 2162: note = a, c, g, or t
  misc_difference 2163: note = a, c, g, or t
  misc_difference 2164: note = a, c, g, or t
  misc_difference 2165: note = a, c, g, or t
  misc_difference 2166: note = a, c, g, or t
  misc_difference 2167: note = a, c, g, or t
  misc_difference 2168: note = a, c, g, or t
  misc_difference 2169: note = a, c, g, or t
  misc_difference 2170: note = a, c, g, or t
  misc_difference 2171: note = a, c, g, or t
  misc_difference 2172: note = a, c, g, or t
  misc_difference 2173: note = a, c, g, or t
  misc_difference 2174: note = a, c, g, or t
  misc_difference 2175: note = a, c, g, or t
  misc_difference 2176: note = a, c, g, or t
  misc_difference 2177: note = a, c, g, or t
  misc_difference 2178: note = a, c, g, or t
  misc_difference 2179: note = a, c, g, or t
  misc_difference 2180: note = a, c, g, or t
  misc_difference 2181: note = a, c, g, or t
  misc_difference 2182: note = a, c, g, or t
  misc_difference 2183: note = a, c, g, or t
  misc_difference 2184: note = a, c, g, or t
  misc_difference 2185: note = a, c, g, or t
  misc_difference 2186: note = a, c, g, or t
  misc_difference 2187: note = a, c, g, or t
  misc_difference 2188: note = a, c, g, or t
  misc_difference 2189: note = a, c, g, or t
  misc_difference 2190: note = a, c, g, or t
  misc_difference 2191: note = a, c, g, or t
  misc_difference 2192: note = a, c, g, or t
  misc_difference 2193: note = a, c, g, or t
  misc_difference 2194: note = a, c, g, or t
  misc_difference 2195: note = a, c, g, or t
  misc_difference 2196: note = a, c, g, or t
  misc_difference 2197: note = a, c, g, or t
  misc_difference 2198: note = a, c, g, or t
ttacttttcaatgggctgcgagggcttccagtccttgtagttctcgtagcggctctcgcggatcttggtgtgggaccagatctcgtccgccgtgggctgccagttggctgcatagttcttgcacttctcgcacaggtgctccacgctctccggcgactgcaggtcggtgctgtgggcaccggtctcgtgcaccatcttctgcagcagttcggggttttccagcatcgggcagggacgcagatggttcttgttgaagggctggccgttgtgataagccatgaacagcgggctgtgcagaatttccagaatgctctggtcgtggatgtttgcattggagtagtggatgaacacgcacggctctgcgtcaccggcagagttgatgtggaagtagttgcgtccgccggcaatgcagccgcccacgaactcgccatcgttctggaagtccatggggtagaacgggatatcgcactcttccgagcgcagatagcggatgcggtcgatcatatatttgcgctgctccggggtaggcatcagttccggtgctgcctcgttgcccacgggcatgtagtggaagtagaagccgaagtgtgcacccttctcacacaggaaacgcatgaactcatcgttggtaacagcttcgatgttatcgcgggtgtagcagatggacgtgccgaacacgatgccgtgctccttgagcagatccatagcatgcatgacagcggcatagtgcccctcaccgcggcgggcatcgttggtctccggggtgccctcgatggacagcatgaaggcaatgttgcccagacgcaccacctctttgcagaacggctcatcgatgagggtggaattggtgtagatggcaaactgcacatcgttgtgcttctcggccagcttgaggatatcagccttgcgcaccagcggctcgccgccggtcagcatgtacaggtatacgcccagctccttgccctcggtaacgatcttgtccatatcctcaaagctgaggttgttcttgttgccatactcgccagcccagcagcccacgcaatgcatgttgcaggcagaagtggggtcgaacaggatcagccacggaatgttgcactgatacttcacgcggttctcgcggatggtcttggtgccgcggaagaaagcctcgtagcccagattcagcgccatggtgcgggccacgttggggtcggtctgatccagcacacagttgatgagcttggaccacttgctgtcggggtcggtcagggtctgtctggcgtgttcgtaggcttcagcgctgaacgaactgccatagaactgctttgcaacatccaccagctgtcccacggttttctgacgatctttatcggcatgagaaagcaccacgtccaccattttaccaacggcagcacgctgcattttatgagtcaggctctcaacagaagtattcattatccttttcctccaaacggtatttttcggaaatctctttttctatttctatgccattactctaccactctatcccacaagttgccataaacagaaaaagcgccgtgatagaaaacccatcacggcgcggattatgataaaattttgtcgttcttccggttcaaccgtcctgttccagatggatcttattgctggcaaggcggcataacgcgcggcgcagatcgccctgcagcatccgtcccatacgttctaccatcacagcaggctcggtcttcatatcccggcggatccattccagcaccacgcccaccagcgcatatttgtaaaaatccaccacaaactgcttgtcatcgtcctgcacggtgatgtcgcggcattcgcgatccgcaaattccttcagcatggagtccagaagtttgtacagatactgctccacctgttcacgacccacagagcggtatacgttcagtaccagtgctttgttatcccggatctggtgcaggatgtccagaaatgcttcggtccatgtatcaaagctctggcggccttccatcgtcttggccgcatcttccatcaggatccagtccaccagatcgtaaatatccttaaagtggtagtagaaggtcatgcggttcacgccgcagtcctcggtgatatcgttgatnnnnnnnnnnnnnnnnnnnnnnnnnnnnnnnnnnnnnnnnnnnnnnnnnnnnnnnnnnnnnnnnnnnnnnnnnnnnnnnnnnnnnnnnnnnnnnnnnnnngcaatgcctgcaaaagcggcttcttccggcaaaaaagcggaaaaggcccttgattttatattcctctacgcttagaatgggagcagacggcggtgattgaagtgccgttttgagggagggtacaaactatgatggataccattggttttctgggctgcggcaacatgggtggagccatcgcccgtgccgtttgcaaagctgttgaccctaagaaggtttttctggcaaaccgcactgcggccaaggcacaggcactggccaaagaactgggctgcaaaacagccaccaatgccgaggtggccggtgactgcaacctgatctttctggcggtaaagccccagatgatggaagctctgctccagccgctcaaattcacctttgacgagcgccccagccgttttgtgctgtgcagcatggcagcgggcctttcgattgcccgtattcaggagatggccggtgaggactttcctgtgatccgcatcatgcctaacaccccggcttcggtgggcgagggtatgatccagtactgttccagcaatgtcaccgctgaggaagaagaagccttcctcaggatcatggctcctgcgggccgtctggatgccgtgccggaaagtctgatcgatgccgccagctgcgtttccggctgcggcccggcatgggtgtaccagtttattgaggctctggccgacggcggcgtggcctgcggcctgccccgcgccaaagcgcaggaatatgccgcgcagatggttctgggcagcgcaaagctggtgctggaaagcggaaagcatcccggcgaactcaaggatgctgtgtgcagccccggcggcagcaccattcagggtgtgcgcgtgctggaagaacacggcctgcgcggtgcggtgatggatgccgtgatcgcctcgtacaataagacaaaggaaatgggaaagggttaaggatatcatgcgcatcgttgtaaaagtaggcacttctactctggcatacgccaccggacggctgaacatccgccacacggaacagctggtcaaggtgctcagcgacctgaaaaacgagggtcatgaggtcattctggtgtcctccggtgccattggcatgggcgtgggcaagctctcactgccaacccgcccaaaggacaccaccaccaagcaggcctgcgccgctgtgggccagtgtgagctgatgtacacctacgaccggctgttcaacgcctacaatcacaccgtggcgcagatcctgctcaccggcgtggacgtggagcacaccgaacgccgcgtgaactttcagaacaccctgtcccgcctgctggagctgggtgccctgcccatcatcaacgaaaacgacaccgttgccaccgatgagatcacctccattggcgacaacgacacgctggcggccatcgtggcctgctgcgccaaggctgacctgttggtgctgctgagtgacatcgacggcctgtacaccgccaatccccacacccacacggatgcaaagctcatcccgctggtagaggagatcacccccgaggtgatggctctggccgatggtgccggttcggcccttggcaccggcggcatggccaccaagctgcgcgctgcccgcatggtaacgggcagcggtgccgatatggtcattgccaacggcgcacacccggagcttttgtacgacattgccgcaggcagatccgcaggcacccgctttgcggcccgcaaggaggactgaacacatgaccacacaggaaattctggaagccgcccgcagcgccaaaagtgcccttgcgctggccgataacaccgcccgcaacgcggccctgctgggcatggcagatgcgctgtgcagcgcagacgatcaggcggccatccttgctgccaacgctgaggacatggctgcggccaaggggcacatcagcgatgtgatgctggaccgtctggccctgaccgcaccgcgcattgaagccatggcgcagggcatccgggaggtatcttccctgcccgacccggtgggccgggtgctgaaccgggtggagcgccccaacggccttgtgatcgaaaaaactgccgtcccgatgggtgtgatcgccattatctacgagagccgccccaatgtgaccagcgatgccgctgcccttgccatcaagagcggcaatgcctgtatcctgcgctgcggcaaggaagcatggcgcagtgctcatgccatcgtcaccgttctgcggcagggcctgaaaaaggccggtctgcccgagacagcggtctgcctgatcgaggataccacccacgcttctgccaacgctctgatgaccgctgtaggctatgtggatctgctgatcccgcgcggcggtgccgggctgatccgtgcctgcgttcagaacgccaaggtcccctgcatccagaccggcaccggcatctgccatgtgtacgtagacgacaccgccgatctggacaaagctctggacatcatcgagaacgcaaaagccagccgccccagcgtctgcaacgccgaggaggtgtgccttgtgcactctgccattgccggggagttcctgccccgtctggcccagcgccttggcccggaccgcattgcaaagggtctgcatccggtagagcttcgtcttgataagcgcgcagcctccatcatctccggcacccctgccggagaaaaggactttgacaccgaatttctggactacatcctcgcggtcaaggtcgtggacagcgtggaggaggccatcgggcatattgctgagcactccaccggccacagcgaggccattctgacccagacacaggcccatgccgacctgttcactgccgcagtggacagcgccgccgtgtatgtgaactgttccacccgctttacggatggcggtgaattcggccttgggtgcgaaatgggcatttccactcagaaactccacgcccgcggccccatgggactggccgagctgtgcagctacaagtatatcatccacggcaatggtcagatccgctaaagcccgctgaacccacctttccagtgcggaaatcgggagtgagcgttttctccataatattcataatttagaaacgaaactgaaaagctttttccgaaacaggctggtgcgatttgcgccagcctgtatttttgttttattcccatgaaatgttctttcagcaaagacaaaaactgaattatgttttcaatctgccttttctgttcgctcattgatatggatgattgtatcccagttttctgcacttctcacaaagatatagtcttactttctccattttgttttgtaaaaagtacaagagcccccttgacaacccctatttcgatgcggtaaaactatattggaaaacttgataacgatttcacttcatttcactttccaatgagaaagttgttcgtcacacacaacactatacttggaacaaaggagagagcaatatgacgatcgccattcttgcacacgattcccgcaaagagcttgcactgcagttctgcactgcttacagcgccattttgtccaaaaacacagtcattgctaccggtaccaccggacggatgctggcgcagactaccggcctgcccgtgcactgttatctctccgggcgcttgggcggtgtgcagcagattacttcccgcattgcgtgcgacgaagtggatctggtgttgttcttccgtgacccgctgaaagcggatgccgccagcatcaccgagcagaatctgctccgcctgtgcgatatgcacagcgtacccattgccaccaacattgccaccgccgaggtcttactgcgcggtatggatcagggcgacctggactaccgcgaggggatgcatcccgctcttgtggagccaatgcccaccgtgcagcgccacgccgtgtgatgaatcgtgtatagagtatcgggaaagagacagcgccgcaggaaacttcctgcggcgctgttgttttttgttttgcttttatttcagtaaagcctgcagcttttccagccggcggacggcttcgttcagcacatcggtgccgcgggcaaagtgcatccggatcaggtggttcaccggctcccggaagaagctggagccaggcacagcggccacgcccacttcccggatcatccactcacagaactgcaggtcggtccagcccttgaactggggcagcgccagaaaatcggaaatatcgatcatcacaaaataggtgccctgcggaacattgtgcttcagccccacacggtccagtccggccagaaaatgatcgcgcttttcggtgtaaagggcctgcagctcttcgtaatagctggcgggcatctccaaaccggccacagcggcctcctgcaggggtgcagccgcacccacagtgaggaagtcgtgcaccttgcgcgcgccctcaatgacctctgcgggtccgatcagatagcccagacgccaacccgtgatggagtaagtcttggagagcgagttgcaggtgatggtgtgctcaaacatgccgggcaggcttgccatgcagatatgctctgcgggcgcatagatgatatgctcgtacacctcatccgtcaccacaaaggcatcgtactggatggccagctttgcaatggctttcagctcgtcgcggcggaacaccttgccgcagggattggaggggttgcacaggatcagcgccttggcaccctcggcaaagcccttttcgatcaggctggtgtcaaactcataggtgggcggcaccagtgggatatagatgggttccgcgcccgaaagaatggcatcggcaccgtagttctcgtagaacggtgagaagatcatcaccttgtcgccggggttgcagatggtcatcatggcggccatcatggcctcagtgccgccgcaggtcacacagatctcggtgttggggtctacttcgtggtgcagggcagggctggtcttttttgccagcgcctcgcggaagttttgcgcgccaaaggtcacagcgtactggtgcgggcctttgtaagctgtttcggccagagcgtccatcaactgcttcggcgggtcaaaatccgggaagccctgcgaaaggttgatggagtcgtactgattgttgatgcgggtcatgcggcggatgacagaatccgtgaaggtacccacacggtcacttaaaacaggcatgcgctctcctctttttagtccttaaaataagccttctggatggccagcagcacgcctgcacggctggcagcaaagttcagaccgccctgcaggtagcaggtatacggctcacgcagcgggccgtcgcaggaaagctcgatggtgctgccctgtgtaaagctgccgcttgccatgaccacctcatcagtatagcccggctccggagaaggttccggggcggcatagctgtccacgggacttgcagcctgaatgccctgacagaagccgatgagcgcatccgcagtgcctgcatcaaagcaggtgacgatgtcgttgtggtcgtcgcagtagcgcggcactggattcttgcccagcagctccagcatacactgggcgtaaatggcggtcttgatggcctcgcacaccacgccgggcgcatagtagaagcccagatacatatcacggggcgtttccagcgtgcagcccagatccttgccgagaccgggcgcattcaggcggtaagcgcacagctccacaaggtctttgcggcccgcaatgtagccgccggtgggagcgatgccgccgccggggttcttgatcaggctgcccaccacaaggtctgcgcccatctgacagggttcctgcgtctgggtaaactcgccgtagcagttatccacaaaaataatgatgtccgggtttgcggcgcgggcggtatccgcaatttttcggatcgtttccagatcaaaggcattgcgctgcagatagccgcggctgcgctggatgtggcacacctttgcaccgggggccttttgggcgatcaggtcataatccggggtgaagtcggctttcagcggagcttcatcgtaccggatgccgtaatccatcagggtgccggtgcccctgcccttgccgtccagaccgatcacaccttccagcgtatcgtagggacggccggtggcagccagtagggtgtcccctgcccgcagcaggccgaacagcgccacagccagcgtgtgggtgccgctctggaactggctgcgcacgagggcatcctctgcgcccatcacctcggcaaagatctgctccagctttgcgcgaccggtatcccacaggccgtagccggtggtgcccagcatatcggtggaggacatctgggtatccgcaaaggctttcagcattttgagctggttaaaatcgcggatctcctccatatggcggaagtagggctggcacagctccatagccttttcgtccagcgccagaacttcgggtttgtaattgaaaaagtggttcagcattgacat

SEQ ID NO: 301 - DNA, 19634 bp, unidentified
  source 1..19634: mol_type = unassigned DNA
gtcggtgagacacagatcgttgtcgatggtcttgggcacaccgatgaaccgcacactgctgcccacctgctgcccgtagcgggacaacttcgcgatggtatccatcgagtcgttgccgccgatgtagaacacggcgcagatgtcgtacttgtcaaacagggtgaacagcttgacgaacggggtggcatcggtgtccgggtcgggcagcttgaagcggcagctgcccagatagctggacggagtacgcttgagcagctcgatgctcatgcggtcatccagcaggatgttgagctccagcagctcctccttgagcagaccttcgatgccgtacttcatgccgtacaccttgtctgcacccagactgcgggcggctttgtatacgcccgcaaggctggagttgatcacggcggtagggccgccgctctgaccaatgatgatattcttggccatggaaacctccttcagatcatttaaaatgtatcgctgccgggcaaacggttttccgcaccgtccggtaaagtagtctgtcgaccctgcactgccaacagaccggaacggcaaaacagccgcctgccgcaactgacacaaaaatatttgcagcttgtgtattcgctttttgtaaaatgtgcaaaataagctgcaatcctattgtacccgttttgcctgttgtatgcaagacccaattggttgcacaggcaaaaaaaatatgataaaatgggtgcgcactccaaaattaccgggcagaagtacctgcctgttgggataattgcagaaagctggacagagattatgggcatttcacacgaatatcattcggcaccccggcggcgcacgggcgggggcatcagcggcaaactgcggctggcaggggtcattgtggccatcctgctggtcgcctatgcggtgaccgccattctggaaaagggaacagcggcggaggacagcaccccgcagaccagcgcgggcggcattgcgcagaacattctggcgccgctgcccatgcagggcgagacggactccggcagcgagagcgcagcaggggacagcggcacggtgcaggcggtgcagctggagagcttcggccccgcccggcaaaccgatggcgcttataccattaaggcgtatgacgccagtgttatccggcagccgacctgcggtcaggtagacctgagctacttttcggacgccgcttttctgggcgacagtctgacggtgggcttctcggactatcagatcaatctgagtggcgcgctcatctgcggctatacgggtgtagggccggacgccatcgtcaaccgcgccgccgtcaagagccccacccgcgggcaggaggtggcactggatgtgctggcagcggcgcagcccaaaaagctgtatatcctgctgggcaccaacaccctgaccaccttgggcgctgcggaccgttttctggcatactacggacagatgctggacgagctgcgccagacgctgggcgaggactgcattatttatgtacagtccatcccgccggtacggcctgcggcagcggaaaaaaagccgggtcttgcctcggacgtgctgcgcggcgtgaatgagcagctggcgcagctggctgccagcaagggctgcgtttatctggatctgtgggagacactggctgacggcgagggcaacctgaaagagatgatcgccgcaccggacggcgtgcacctttcggccggcaacggctacggtgcatgggtcacttacctgcgcaaccacgcgaaatattccgcaagtaacccgtggatcatgggcagcgcatacagcgcagaataaccagagcaaaggacagctgcaccaaacgatgcggctgtccttttttttgcgggttcagcgggatgtttttgcacaaaacagtcttttctgcatggaaaaggctgtctgccaaaaagttttagttgacagaaaaggcgaatcatgttattcttttgttgattttgagagacaccgccttgcagagtcttttcaaagcaatttactcgggaccgcccaacggggctaaggccatacggacagccgggtccactgccgaccggcggcgcaagctgccattattgattgagttactgcgagacaacgatgaaacgggtttcaaaccttgcgttggctcgcgtgccgcagcgctgctgttttgattagaagcagcggctgcccttgcggcaaagctctaaattttataagttggttcctttacaaccatgaaattgcgcagcctatgcgcagacttgtgaaacggtcaataagagtagtaaaagtgtagttgctatatagactctcatcaccccgtctttttggatcacagataacgcgcagcaccggcacttatggctgggtgctttatcagcgcggaaaaagctgttccaagcgcaggtctgcacatttgtgcagtgtctgcgcttttttgttgtgcaaaaagagaacagggacggaggaaaagatgaacgagaacaaagcacgttcccggctggatcagcgccgtgcgcccatctacgaggcgctggagcggttccggcagatgcgggtggtgccctttgacgtgcccggtcacaagcggggccgcggcaacccggagctgaccgcttttctgggtcagcagtgcgtgggcgtggacgtgaacagtatgaagccgctggataacctttgccacccggtgtcggtcatccgggaagctgaggagcttgccgccgatgcctttggcgcagcacacgcctttttgatggtgggcggcaccaccagcagcgtgcagagcatggtgcttaccgcttgcaagcggggcgatgagatcattctgccccgcaatgtgcaccgcagcgtgctgaacgcgctggtgctgtgcggcgcggtgccggtgtatgtgaacccggaggtggataagcgtctgggcatctcgctgggcatgaagcgggagcaggtggcaaaggccatcaaggagcaccccaacgccgtggccgtgctggtgaataatcccacctactacggcatctgctctgacctgcgtgccatcgtaaaaatggcgcacgacgccggaatgctctgccttgcggatgaagcccacggcacccacttctactttggcggcggtctgccggtgtctgccatggcggcaggcgcggatatggcctcggtgtccatgcacaagagcggcggcagcctgacccagtccagcctgctgctcatcggccccaatgtgcatcagggctatgtgcgccagatcatcaacctgacccagaccacctccggcagctatctgctgatgtccagtctggatatctcccgccgcaatctggcgctgcggggacggcaggtgttccatcaggtggcagacattgccgagtacgcccgcgaggagatcaacgccgtaggcggttactacgcctttggcaaggagctgtgcaacggcgattccgtctttgactttgacaccaccaagctcagtgtccatacgctggatatcggtcttgccggcattgaggtctacgatatcctgcgcgatgagtacgatattcagatcgagttcggcgatatcggcaacatccttgcctacctgtccatcggcgaccgtccgcaggaggtggagcggctggtcagtgcactggctgagatcaagcgccgctaccgcaccgacggctcgggtctgctgagtcaggaatacatcgaccccgtggtggctgccagtccgcaggaggccttctacgcccccaaaaagagcctgcccctgcgggagaccgagggcatggtgtgcagcgagttcgtcatgtgctatcccccgggcatccccatccttgcacccggcgagcgcatcaccaaggagattttgaactacatcgagtacgccaaggccaagggctgcagcatgaccggcccggaggaccctgaaattttgcacctgaatgttctggcatgaggagggaaaaagatggaattttggttttcagagtttcacaccccggatgtgaagcacagcatccgggtgaacaaacagctctactccaagcagagcgattatcagcgcattgatatctttgagaccccggagttcggccgggtgctcacgctggacggcaacgtgatgctgaccgagcgcgatgagttcatctacgatgaaatgatcgtccatgtgcccatggcggtgcacaaggaagccaaggatattctggtcatcggtgccggagacggcggcgtggtgcgggagctgacccgctacgaccgtgtggagcgcatcgaccttgtggagatggacccgcaggtggtggaagcctgccgcgcctatctgcccggcaatgcctgccgtatggatgaccgccgggtgcatatctactttgagaacgccctgaagtatatccgccgctgcgaggaagaatacgacctgatcatcgtggactcctccgaccccttcggcccctccgagggtctgttcacccgcgagttctacggcagctgcttcaacgccctgaaagaggacggcatcatggtcaaccagcagggcagccccttctacgccgaggacgccagcgccatgcagcgcagccacaagcgcattgcgtccaccttccccatcagccgggtgtatcaggcacatatccccacctttgcggcggggtactggctgttcggctttgcaagtaaaaaatatcatcccatcgatgatttggacgcagagtcgtggaaggcgctgaatatgcgcacccgctactacaccacaaaactgcatatcggagcattctacctgccggcttttctggaggagatgctgcgggaagtggaggaacactgatgcaccccaacgttgagaactttatcggctgcgacagcagctaccgcgccgccagcatcgtgctgtacggtgcaccttacgattccaccaccagctaccgccccggcgcacggttcggcccggcggctatccggcacgagagctatggtctggagacttacagcccctaccagaacgccgacctgaccgattttgacgtgttcgacagcggcgatctggagctgtgcttcggctccagcgagctggcgctggccgatatcgaggctcgggcagaggaaattttgaaggacggcaagttccctctgctgctgggcggcgagcatctggtcacgctgggcgcggtgcgggctgcggtgaagaaatatcccgacctgcacatcgtccacttcgatgcccatgccgacctgcgggacgactatctgggcgcgaagctgagccacgcctgtgtgctgcgccgctgccacgagctggtaggggatggccgtatccatcagttctgcatccgcagcggagaccgggcagagttcgagtttgctgcccagcacaccgagatgcacaagttcgattttaccggccttgccgagctgaccgcacagctgtgcgagagcaaggtgccggtgtacctgaccatcgatctggattgccttgacccctcctgcttcccgggtaccggtaccccggaggctggcggcgtaagctttttgcagctgctggatgccatccgcactgtgaccaaggccaacatcatcggtgcagacctgaacgagctggctcccacgctggacaccaccggcgtttccaccgcaaccgcctgcaaggtgctgcgcgagaccctgattgcgctggacaagggctggccgggctttcaggtataaatacgaaactaccattttacagataaaggagtaaccgatatgagcaaagttctgatcatcggctgcggcggcgtggcctccgttgccatccataagtgctgccaggtgcccgaggtgttcaccgagatctgcatcgccagccgtaccaaggcaaagtgcgataagctggctgccgagctggctcccaccaccgccaccaagatcaccaccgcacaggtggacgcagacaaggtggaagaggtcatcgccctgatcaaggcttaccagcccgatctggtaatgaacatcgccctgccttatcaggatctgaccatcatggatgcctgccttgcctgcggcgtcaactacatggacaccgccaactacgagcccgagaacaccgacgacccggagtggcgcgccatctacgagaagcgctgcaaggaggccggcttctctgcctactttgattacagctggcagtgggcctacgctaaaaagttcgaggaagccggcctgaccgccctgctgggcagcggctttgacccgggtgtgacccaggcatactgcgcctacgccaaaaagcacgagttcgataccatcgacaccatcgacattctggactgcaacggcggcgaccatggctacgccttcgccaccaacttcaaccccgagatcaacctgcgcgaggtgtccgctcccggcagctactgggagaacggccactgggtagaaattcccgctatgagcatcaagcgggagtacaacttcgatcaggtgggcgacaaggatatgtacctgctgcaccacgaggagatcgagtctctggcaaagaacatcccggaggcaaagcgcatccgcttcttcatgacctttggtcagagctatctggatcatatgcgctgtctggaggacgtggggatgctgtccaccacccctgtcaacttcaacgggcaggagatcgtgcccatccagttccttaaggcgctgctgccggaccccgccagccttggtccccgcaccaagggtaagaccaacatcggctgcatctttaccggcaaaaaggacggcaaggacaagacctactacatctacaacgtctgcgaccatcaggagtgctacaaggaagtgggctctcaggccatcagctacaccaccggcgtgccggctatgtgcggcgcgctgatgctgctcaccggcaagtggaacaccaagggtgtgcacaccgtcgaggagtttgatcccgatccgtatctggatgcactggacaagtacggcctgccccgctccgagagccacgacccggctctggtggactgatgcgggtgcgcgacagccgcccgccctttgcggggctggcaaacctgtccgaggagcagctgcaccgcctgcccaccccctgctatctgctggacgaagcccagctgcgccgcaacggcgaaattctgctgggtgtgcagcagcgcactggctgccgcatcctgctggcgcagaaggctttttccaacttcaatgtctacccggtgctggcaccctatctggcgggtaccgaggccagcggcctgtacgagagccgcttgggcagggaagagctgccggagaaggagaatcatgtgttctgcgccgcctaccgggcagacgagtttgaggaattactgcaatacgctgaccatatcgtgttcaactcgcccagccagctggcaaagttcggcccggcggcaaaggtagcgggcaaaagcattggtctgcgcatcaacccggagtgctccacgcaggaaggtcacgaaatctacgacccctgcgcccccggcagccgtctgggcaccacccgtgcccagtgggacgccgccgtggcggcgcacccggaactgcccgccctgctggacggcctgcacttccacaccctgtgcgagcaggacgcggatgcgttggcggtgacgctggcagcggtggaggaaaaatttgcagacctgctgcccaagatgcagtggctcaacttcggcgggggacatcacatcacccgtccgggctacgaccttgctacgctggaaagctgcatcctgtcggtgcggcagaagtacggcgtgcaggtgtatctggagcccggcgaggcttgggcactaaatgcaggctatctggtcactaccgtgctggataccctgcacaatggaaataccagccttgccattctggatatgtccgcagcctgccacaccccggacgtcatcgagatgccctaccgtccgccgctgctggatgccggtgaggcaggggagaaggcgtgcaccgtccggctgggcggccccacctgccttgcgggggatatcgtcggggattacagctttgacgttcctcttaccgagggggataagctcatctttggcgatatggccatctacaccacctgcaagaataacaccttcaacgggatgcccctgccgcccatttggctgctgggcgcagacggcagctgccgggagctggtgcatttcggttatcaggacttcaaaatgcgcttgggcgcgatataaaagaaatagcaaaagggtcatcggcacagcgatgacccttttgctgtctctgcctgatggtgcaattgacaaagcgccggcagaaacatataattgagtttataagaaaactatcgctatagaaccgacaaaagaggagaaacagcgcgtgcgcacattgtctgagatcattgtcaagcgggattattctcaaaaatcgccgtcttccgtattttataaggatagccccttctggcaaaagctgatctgcatctgctatgtgggttttatcgcactggcagcgcttggcgactggaaaaccctgcagagcattttgggtggtctgcctaagattattactgcgggtgttatcggcatggcaattgtctatggattcatatacccggatctggaacgagtaaaaaaggtgttctggcctgcactagtctatatgtccctgatcgcgatgctgttcttgtggtccattgttatctggctgatggacttcagcgcaatctccacgatgatccgggcctgctccaagctgatgttccagagtatttcaattctgacagcggtgagcggagtatttctgctggggtcaaagacgatcgatctgtttgccattgcggcgtgtctggcaaacgcagccatcatggttctggaaatcccgacctatggtctttcagcaagcatccagtcgcttgtgcagtgtctggtgacctttggcgacgcagagggttatgccatcaggctggaaatacacgatcttacctttgtgtttggtcagctggtgctttattatgcagtgtttgccccgcatgacacaaaacaggaaaaacgccgccgccgtcgcctgcttgcagcttgtacgtttttcttttttgtaggcatgaagcgtatcgccattccggcggtggtgctgtttatttttgtggcgctgatcgtccgccgtttcaaagacaaaaagaagctgctcactctgtggggcgttgcgtgggtcgtgtttttctttttgtatatttacgcggtccggaacggaaccgtttcaagaatcctgaacatggcaggcattgatatgatgggccgtgattatctgtggagtcttgctaacgactattatacctattctattacctattgcgggcatggctttgagtttgtggatactattgttaccggctggtataatgcaggaatcattaacgagccttttcctttccacaacgacatcttaaaggtgtttgtggaaatgggctttcccggttttgtgttctggacgggcatccaatatatcattacgccgatcttctggatgcattacgcggatgaggacaccgcgttgctgtacctgagcaatctcagctacatgacaatgacataccttacggacaacacatccttttctttctggtgcacgatggcgctgcggctgctgccgctggcctattcggtacagcggcgcaagccgccaaagccgcaggtctggaagccgaagaataagaaggaaatgcaagaccgcatccgcatcatgatgcaggaaatgtaaaaggaaaagcgttataggtttgaacgattggggcggaagtgcttgtgtgcttctgccccaataaaattatacaggtgctgaagtacaatagccagtatgcaggtgaaaaacagcacgccccagaagtagaagatgtcaaaaggacgagcgtttgttatatagtagttctttgtgacatcgagaactgcaaactgaaatagatacaggaacggagcatagggattcattgtgcggagaattcgattgccaactttgaatttgtccagcagccagatcaaaagcagaccgaagaaaaggttcatgagattgtggaaaattaagtctggtaagcttttttcgggtacggttatggcaagaaatgaaaaaacaagctccgcagcgatgatcgaagacagggcatatttcttttttaaaaaagcggcaaaaaagtctgcatattcatagataattactccaaagggaaaagctagctcgctgatgtaataaactctgtggtttaagcctgtaacagcatcaaagatgcagaggatcgcagtgatgatgaatataacgccggaaagaaaaacgacacgccggaatttattttttgggaaaatgcggtgggaaacatagaagatcagatacagtacagtcaacgtaggcatataccagttgaccagctgaaaaatctgatgttcgtctagcatcgtgttccgaatgagcgtgctcacaacgcttgaaaacagggtgatccatagcagatcgacgatctttttccagaagttgcgcagatagttcggttttgaggcaacagagcaagcaagcccaaagccggatgaaataaagaaataacctacgcccaatgtggagatcttgcttaacggcaatagaatatgcggcataggaaaaaacggatttgtacaatgggaaaagatgatcagtactgcaaaaacaaagcgcagctcatgcagacggttcatggtctttttgatatcggcaccggttggacagaactgcatatttaaaagacaaagcactgctaaaaaaagatataaaaaaatatagggcatatgcggcctcctgacgtttttgcttctgtgtcttgcgaatctctaaagaaggagaatacaagtttatcttatcataagctgctttgcatggcaagcagacaataaataagcaccacacatttctgtgcagtgcttttctttctggtggagattaccgggccgattcaaatcacggtgaccctcttgcagtccatgcacggcgctctcccgggtgagttaaatcctcactcgtttagcactaacaaaaaagcaccacacatttctgtgcagtgcttctctttctggtggagattaccgggatcgaaccggtgacctcttgcatgccatgcaagcgctctcccgaacggtatcgaaacacaccccccacacgaaagtgcggggacaggcttaatatcgcgttgatacgttctatccaccaaaaaggttcacagttgcatcctgcttccaggaatcatgctccgcctacaaggcaattttaccacccaattttcaagtgtgtcaatgggttttgctcagagagaaggtcatttacgagaaaagttttttctgacagcttacttagcgcaattttgattttacacatcaaagttgcgctttttattttccccaaaagtattgacaaggaggttttctcaacgatgccgatgtattatcgctgttttttatccatgaaccaaccgcatgacccttgactacttctacggacagactggagagcttttctccttctaccgcattccaaaggctctttttcaggagcagcggttccagagcctgtccacggatgccaaaaccctgtatggtatcctgctggaccgcatgagcctgtcggtgaaaaacggctggctggacaagcaaaaccgggtgttcatcatcttcacaatcgaggatgtcaagagggcattgtgttgcgcagacaacaaagcaaccaagctgctccgggaacttgaaaagtttggtctgattgaacgaaaacgccgagggcaaggaaagccaagtttggtatatgtgaaaaacttttcggcagaatcttcaaaagagagtgtcaagaatcgtgataatgacgattcttgtggcttcaaaatcgcgtgtcaagaccctgcaaaatcacggtgtaataagactaaagagaatgatactgaaatgagtgagactaatctcttctattccgaagaatcggatgggatgagtaagcgcgcccaactggaagaatatttttcgcagtctttggaggtagaccttctgctccggctctgcccggatgatgaggacaccatctatcagatcgtagatttgctggtggacacctgtgctaccaaccgcaagctactgcacatcgccggggacgataagcccgccgaggtggtacgtagccgatttatgaagctgaacgccgaccacatcaaatttgtgttgaagtgccttgcagagaacagcagcccaatcaggaacatgaagcaatacctgctcgcttctctgtacaacgcaccgaccaccatgcagctttactatcagaatcagaccaaccacgatttagcgaaacgggggtgataaaaatttccaaaaaagcaaccacgattgccattgtcaaccaaaagggaggcactggcaaaacaacaacctgtgaaaatctgggtgttggccttgccgccgagggtaagaaggtcctacttgtagacgctgacccgcagggttcactcaccattagtatgggctggcagaagccggacgaactgcccgttactctttctaccctgatgcagaaagccatgaacgaccagtgcattccgcccggtgaaggtgtgctgcaccatgcagagggtgtagacctcatcccggccaacattgagctggcagggctggaagttgcccttgtcaataccatgagccgggaaaaaatgctgaagcaagtcttggacagtgcaaagcaggactatgactatattctgttggactgcactccctcccttgggatgctgaccattaacgcgctggcggcggcagacactgctctgatacccgtacaggcacagtacctttccgcgaaaggtctggaacagcttttgcagaccatcaacaaggtgcatcggcagatcaacccaaagctgaaaatcgaaggcatcctgctgacgatgacagataaccgcaccaactatggccgacaaatcgacacgctgatccggcaggcatacggaaagcacatcaaagtgttcggtcagacgattccccactccgtccgtgcagcggaaatcagcgcggcgggtaagagcatctttgtccatgacccgaaaggcaaagtggcagaagcctataaatctctgacgaaggaggtgctggccgatgccaaaaagcagcgtaaacgccagtctgagcagctacgatgatattttttccaccgaagaatcccggcaggaagaacagcgcgagcaggtgcagcagattccgattggagagctgtttccattcaagaaccatcccttcaaggttctggacgatgattctatgagcgataccgtggaaagtgtcaagcagtacggtgtgctttcgccgttgattgcccgccctagaccgaagggcggctatgaaattatctccgggcaccgccgtcaacacgctgcggagctggccggactggaaaccctgccggtcattgtgcgccagatggacgatgatgctgccataatcctcatagtagatagcaatttgcagcgtgagcatattctgcccagcgagagagcgtttgcgtacaaaatgaagttggatgccatgaaaaatcaaggtacaaggtcagatttaacttcgacacaagttgtgtcgaagttgcggagcaatgaaaagctgggtgcagagaataatcaaagtcgtgagactgttcgacgtttcatccgtctgaccaaccttattccagaactgctggacatggtggataacaaaaccgtgtccttcaatcctgctgtggagctttcctatctttctcctgaacaacagcaggaagtgatccgggcaatggatgatacccagaactttccttctgtctcacaagcaaagcgtatcaagaagctggctcaggatggaacttttacaacggagacgatcgttgccattatgggcgaggagaaaaagagcgagcttgatacggtgaccatcaaaaatgacaccctgagaaaatactttccccgcagctatacgcccaaacagatggaagataccatcatcaagctgctggagcagtggcagaaaaagcgtcagcacagtgaagaacgctgacaggatatgaattggaaagacccggttgggtctttttctttagaaaaaaggagaaaatgcctatgaaaaatgattctaatcccattattcgttccgaggaagtcaccattgatatgcacatctgtgcggcactgtcggagagccggagcagtggcgagatctattttgctgccatcgccccggatatggaactgacagtcatcacgctggacgaggctcccgacattctgccctgctttgacgaggatgatgcgtacctgaacatccccgacagctcgctgctgctcagctacaacccggcgcaggtgctgaaactggcgggcaagcactatctgaccggtccggtcattctggtgcgcaccaatatggatggcgagttcatctcgctgacgatcgatcaggtctacctctttcagaagtacctgatgcgccacagcgttaccctgatggctgacggccagaagcttccctgcatctgcatggagtgaggtgtccttatgtcaaccagagaaaaaagagaacagcggaaagcccggaaagcgaggtttgctgcaatgtatccgggcttgtcacacgatgaaattatcgaggagtgcatcaaggagctgaatcactatttcgaggttgggccggaagttgcccttatcagtgccgaaaaaggcgttcagtgtgtgccgtttgatgaatcacctcaaaagaagtttccttactttgagggaacttacgaagtctttgacgttccgcatacggatttccagattcgctatcagccagagcagattctcgctgcaaacggaagaaaaatcctgaccggcacggcatttctttgccgcaaggaaaatgagcgttgtcttatgcttccgagccgatatgaaaaggtcgatgtggaagattttattcgggagcatctgtttttctacgatgatgctgagacgcgccatgttggtgttgagctttcggaggttgcgtaatggagttcgtgaaagactttctgatctatgaagccggtgcgctctgcgggttctttatcgcagccctgatgaatgcggcacgcgccggacaggaaatcgccatcaaatttgaggaggacaagcatggagcaggagaagaacaccctgacggtgctggaaatcgcaccggggcattacccgaagcaggtcgagatcgaccctgacctgaaagccttgcagcaggcagtcggcggcaacatcggtgccagctacccgttcagtgatcctgttgccatcgtctacaacgatgagggtaagctgatgggtctgccgctgaaccgcgccctgcgggacggaagcggcgaagcctatgatgtggttgccggaacctttctggtggtcggtctgggtgaggaagattttgcatctctctccccggagctggcgcagaagtacgaggagcattttcatcagccggaagattttatccagctggggcatcggatgatgattgttcgtgtaccggatgaggcagtcagcccggaagatagcaaaactgcaccgccgaaagatgccggacatgaccgttgagcctgattctctgctctggaggtgatggaaatgcaggaagaaatcgagcacaagacggtcaacttcgccatctcgactgcgaagctgtctgcccgcacactcctgagaggggcgcagttctttctgcgccagtacgacaagagtgcatcgcagggcaagcagtccatgaagcggctcatacggcagaaccggggtgtgaccaatctggaaatcgaaaagactggcatcaaggattttgaccgctgcgctaagcggtatcacatcgactacgccatccaaaaagacctgtcctgcacaccacctcggtttctgattttcttcaaggcacaggatgcagacgctctgaacgctgcgttcaaggagtattcggcagcagtattgaacaaggccgagcgtccctctgtgctggccaagctgcacgatctggcacaggtcattgccaacctccccgacaaagtacggcacaaagaggaggaacgtggcttatgaataagaaaaagttcaccaagctgctggccttgtacctgccctatctggtgattgggctggctgcgaccaatcttggcgaggcatggcggcttgccgagggcaaggaactgggcgataaaatcatgtcgctgatgggcaccattccggtggcgtttgcaaaccctctgcccagtctgcatccgcttgatttgctggtgggtttatgctgtggtgctggactgaggctggccgtctatctgaaaagcaaaaacgccaaaaagtaccgacacggcatggagtatggctccgcccgatggggcacaccggcagatattgcaccatttatggctccgaaatttgaggataacatcatactgaccaaaacggaacgcctaatgatgagcaaccgtccacctgaccccaaaaatgcacgaaacaaaaacgtgctggtggtcggtggctctggcagcggtaaaacaaggtactttatcaagccgaacttgcttcaatgtacgtctaaaagccatccagtttcattcgtggtgactgacccaaaaggcggtctcattcaagaatgcggccttgccttgctgaagaacggatataaaatcaggacgatgaacaccataaattttcacaagtccatgcgctacaatccgttcgcatatatccacgaggaaaaggatattttgaagctggtcacgacccttatgactaacaccaaaggtgaaggtcagggcggcgatccgttctgggacaaggcggaacggcttttgctgacctcgctgattgcctatctgcactacgaagccccggctgaggaacagaattttgctacgctgctggaaatgctcaacaccatgcaggtgtccgaggaggacgaggattatcagaatccggttgatttgctctttgaagatttggcaaaaaagaagccaaacagctttgcagggcggcagtacaagctctataaattggctgccggcaagaccgcaaaatccatcctgatttcctgcggtgcccgcctttcgccctttgacatccaagaaatccgggatgcgaccatgtacgatgagctggagctggataagctgggcgaccgaaaaacagccttattccttatcatgtcggatacggacagcacgtttaatttccttatcagcatgatctactcccagcttttcaatttgctctgtgacaaggcagatgatgtgtacggcggaaagctgcctgtccatgtgcgctgcctgatcgacgagtgtgccaacattggccagattccgcagctggaaaaactggtggcaaccatccgcagccgcgagatttcggcctgccttgtgctgcaaaccagaagccagttgaaagccatctacaaagacaacgcggataccatcgtgggcaacatggacagtcaaatttttctgggcggcagtgagccgacgaccctgaaagaactgtccgaagctctcggcaaagagaccatcgacggcttcaacacctcggacacacgcggcaatagcccaagctatggcaccaactaccagaaacttggccacgagctgatgagccgggatgagcttgctgttctggatggcggcaagtgcatcctacagctgcgcggtgtccgcccatttttgagcgacaagtacgatttgacccagcatccgaactacaaaatgacatcggatgctgacccccaaaatgctctggatattgaaaaatatctgagccataaagaaaaaatccacccggatgaccagttcgtcctcgtggatgttgattcactcccgcccgcctgacaaagacgagcggttattttttaccctgacccaaaaggcgcgccagcaaatcagcgcttgccgcagcttgcggcagttcatcactggatttcaggtgtgtgcagggtcactttttcaaaacaaaggagatacaattatggaatttttcaacagtgcggtggatgttctgaagactctggtcgttgctctgggtgccggtctgggcgtgtggggtgctgtcaacctcatggaaggctacggcggcgataatccctccgcaaagagtcaggggatgaagcagctcatggctggcggtggtgtcgccctgatcggcattaccctgatccccctgctgagcggtctgttcggctaaaaactgcgggcggtatctgccgcccatacatattgctccaactcaccgtggctaacggtttttgtacttgtggagcgaattttcaagccatacgttctatcaaaaaggagatgtttctatgaattttttgacgaacctcatctttgttctcaacctgctcaagaccctcatcaaccatttcttttaaggtggtggctctgagtggaaactgttctcaaagcgatttcagattggatcaagtcgctgctgactgcggccatcatgtccaatctgtccggcctgtttgatgatgtcaatacacaggtgggcagcatcgcacagcaggtcggcacaaagccatccaattttgagccgcgcgttttcgccatgatcgaggctctgtcccgcaatgtggtgctgccgattgctggcatcattttgaccttcgttgcctgttatgaactgattcagatgatcacagaacataacaacatggcaaattttgagcctgtcctgctgatgaaatggatcttcaagactgccatttcggtctggatgatctccaacaccttcgacatcatcatggcggtgttcgatgtgacgcagcaggtggtggcaaattccagcggcattatttccggcaacacacgggtcaacgatatcgggctttctatgctgcaatccagcatgatgcagatggacgtaggccccttgttcggactgttcttgcagtcctttttcatcggcattaccatgcgtatcctgtccatcgttatttttgtcattgtttatggcagaatgatcgaaatctatatggccgtcagtctggctcccatcccgatggcaacatggggcaaccatgagcagagccatgtgggacagaattatcttcgctcgctgtttgcgctgggttttcagggcttcctgattttgatctgcgtggcgatctacgctgtcctgcttcagaatgtcgccatatccggggatgccatcaactcgatctggagcatcgtggggtacacggtgcttctttgtttcagtttgttcaagaccagttctgtggccaagagcatactgggtgcccactgattggaggtgtgattttttggcagcatatatttctgtgccgcgtgatctgaccaaggtgaagtccaaagtgatgttcaatctgaccgcgcggcagcttatctgctttggtgcggcggcagtcgtaggagtgccgctgttctttgtcctgcgggacaccgcaggcaattccggcgctaccctcggcatgatggcagtgatgctccccatgttctttttggccatgtaccagaagaacggacagcccgccgaaaagatcctgcggtactaccttcaggcacgttttgttcgcccgaaggtgtgtctgtacaagacccgcaactactatgcactgcttatgaagggagatgacacccatgattccatttctgaaaaagaataa

SEQ ID NO: 302 - DNA, 5399 bp, unidentified
  source 1..5399: mol_type = unassigned DNA
atgaaactgggcattcttggcacgggtaagatcgtgcaggaatttttgccatggcttgtggagcacacgccgtttactgtgcaggcggtgtgcagcaccccacgctcggcggcaaaagccgcagagctgtgtgcgcaatatcagatcccacagcacaccaccaattattttgagctgctgcaatgggtagacgtggtctacatcgccgtgcccaatttgcagcacgcccgctacgcccgggtggcgctggaggcgggcaagcacgtcattgtggaaaagcccatggcggtgactgccgccgagaccgaggaactggcagcgctggcacagcgcaagcggctgttcctctttgaggcgatgaccacccagtaccagcccaactacgcaaagctccgggagctgctgccccgggtgggcacggtgcgtatggtgcagtgcagcttcagccagtattccagccggtacgacgccttttgcgtcgggcagaccccgccggtgttcgacccgctgtgcgcgggcggcgcactgatggacttgggcgtgtacaacgtcagctacatcgtgggtctgtttggtgagccgaataaggcggtatatgccgccaacatggagcgcaacatcgacaccagcggtgtgctgatgatggattacagcggcttcaaggcggtaagccttgccgccaaggactgcgcagcccctgcccgctgcatcattcagggcacaaagggctacattttgcaaaaatccaccccgaactactgcggcggcgtgaccttccatcccaacgagggcaaggaggagcactataacctgaacggggaccgtccccggcaggcggcagagttcgaggccttttaccgcgccatgaccaccggagatcaggagctgtgcgcccggatgctggacaccagcatcgcggtgagccgggtgctcacggtggcgcgccgcagcgccggggtgcgcttccccggtgacagattttaacgcatttttctctggaacacgccctgacacaataacgcgcttccaagagatttgaatattcacctaaaacccgcacagagcgggcaggtttgcgccgtatccgacaaaaagggcggaacggcagcaggaggaaaactgaattatgaagaataccaataccaagactctgactcgtgtggccctgctggtggccattgaagtggtaatgaagcttgtcggtctgggcagtgtgcccatgggcccgctgtacatgagcttcctcacccttcccatcgctgtgggcgctatcaccatgggccccgccgtgggtgccctgctgggcggcgtgttcggcgctgtgagcttctacgatgccatcaccggcgcatctgccatgaccggcgcactgttccaagtcagcccgctgaacacctttatcctgtgcgtgggtatgcgtgtgctcatgggtctgtgctgcggcctgatcttcaagggcctgcagaagctggataagtcccgcacctggagctacatcgtcagcgccatgaccgcacccgccctgaacaccctgttcttcatgggctacatcgtgctggctttctacggctgcgactatgtgcagaatctggtgtccgtcaagggcgctgccaaccccttcatgttcgtggtgctgctggttggtgtgcagggcgtagccgagtttctggtgtccggcattctgggcggcatcgtcgcccgcgccgtggcaaagttcctgaagtaagaccggctgcgcaccatgtcagggcggcgcatccgtgtttagaatagaaaaatgaatgctcctccggcaacccgccgggggagttttttgttggtagacttagaaagacccccctcaggctcactgcgttcgccagattcccccttttgtcacctacggtgacaaaagggggagtgtggcatcgccgcaggcgatgacggaaggggtgccccgcaacgcggagcgcattcaaaattgtccccctcacgcattttcatcttcctgcataggatggcgcacagcggaaaaggggagatgacggcatgagacagacaaagcggtttgcggtggtgggcagcgatgcccggcaggcggcggcagggcgtgcactggcgcgggcagggtatacggtgggcggcgtgcagcagctgccgcaggcagactgcatcctgctgccgctcccgctggaacaggctgatttgccgctggcgcagctgctgggcgcggcaaagcccggtgcgctggcgctgggcggtaaggtaacggacagtgcaaggaccatcgcccgggcggcgggggtggagctggtggattattttgcccgcccggagctgaccgtgtataatgccatccccaccgccgagggctgcatcggcattttgctggagcggcgcagccgcaccctgtggggcgcggcggtgctggtgctgggctttggcccggtggggcgggcgctggcggtgcgtctggcggcgctgggtgcgcgggtgaccgtggcggcacgccgcccggtgcagcgggcaatggcagaggagctgggtctgcgggcagtgccgctgacagagcttgccgcagcagctgccgcctttgatacggtggtcaacaccatccccgcgccggtgctgacggcacaggtgctggcggcgctgccaaagaaaagtctgatcgtagatctggcttccaagcccggcggcacagactttgccgcagcccggcggctgggacacacggcgctgcacgcgctgagcctgccgacggtctgggcaccggaaacggcaggggaggcgctggcacgcacggtgcaagccattttgcaggagcgggagggaacggtatgaccacagagaaaaagggctgtcttgcgtttgcggtgtgcggcagcttttgtacgctggaggacgccttgggtgcggcgcaggcactgacggcacagggctggacgctgctgcccattatgagctttgccgcacaactggatacccggttcggcaccggggaaagctggcggcagcggttgcaggccgttaccgggcaaccggtgctggacaccttgcaggcggtggagccgctgggtccccggcggctggcgcaggcgctggtggtcgccccctgcaccggcgcaacgctggcgcggctggcggcagggctttcggatacgccggtgacccttgctgccaaaagcctgctgcgggtgggcagcccggtggtgctggcagtctccaccaacgacggccttggcgcttccggcgaaaacatggcgcggctgtgccagcgcaagcactattattttgtgccctacgggcaggatgacccctttgccaagccccagagcctgaaggcagatcttgccctgctgcccgccgccgtggacgctgctttgcggggtgagcagctgcagccggtgctgctgggacaaaggaatgcgtaaatcccttttcagcggggaaaaaatgtggtatactccaaatgatgccttactggcataaaactgacaagcggagtataccagatgaaaaaatttaccgcagcactgtgcactgtgctgcttttgataggcactgtgctggtgcccggcgcggcagcagccggcccggcgctggccaatacccgggcatactgcattatggacgcagacaccggccttgtgctggcgcagcagaatatggacgaggagctgcacccggcctccattaccaaggtgatgacccttggtcttgcctgcgaaaaggcgcagggagactgggatgacgtaaagctgaccgtgagccacgaggatgtctactcactggcgggcacggattccagtcatatcgccctgcgggaaggggaagaagtccccttggtggatgcgctgtacgctacccagatggccagcgccaacgatggtgccaacctgctggcagagtattttggcggcggcaccatcgcggacggcgtggcggccatgaatgcacaggtggaggagcttggccttgcccacacccacttttcaaaccctcacggcatcagcgatgaggaccactacaccagctgctacgatatggcgcagattttgcgctgggcgctgcagcagccggggtttgaggatgtgttcacccgcaaccagatgtacaccatgcagtccaccaacatccagccggtgatccgttacttctcccagcaggataagatccgcatcggctccagccgctaccacatcgacagcgtgctgggctctaagctgggctacaccaacaccgcccggtacagctatgtctgtctggcggagcaggacggggtgcgcctgatctgtgtgacgatgcaaagccagctgagcaccgataaatacaatgatgtgcgcaccctgctggactacgcctttgccacctacaaaaactacacccagctgcccggcggcagcgtcaccgcacagttggcagtggcgggcggcgggcagagccttggtacggtcaccgtggccgaccccggggtgaagctgctgctggccgagggcttatccgcgcaggatgtgaccgtggatttggaactgccggagcagtatctgctgggcgcagaacccgccgtgtatgcggtgtataccctgaacggcggcgcaaagcaggagagtaccagcgtgcgggtgaaggccgagatcaccggtcttgccgagctgctggagcagagcgccggcaaaaagctggatactgccaaggacgtggagccgggcagcagcgcatggctgctggcgggcatctcggtggggtgcaccataggcgcagccgtggtcacggtgctggtgctgcggctgcacgcccgcctgaaaaagcgccgcaaaacggcaaagcaccataacaaagcgtaaaagcctgttcaaaaccagacttttccagataaagaaaaaactttcagaaaaaaagagaggtacaatatcatgggcaagtttatttttacgcagaccgagatccccggcgtggtggtcattgagccgcaggtgttcggcgatgaccgcggctattttatggagacctaccagaaggaccagttcgcagaggctggcatcgacaaggaattcgtgcaggacaaccagagccgctccacccggggcgtgctgcgcgggctgcacttccagaagaaccatacccagggcaagctggtgcgcgtgaccaagggtgaggtgtatgatgtagccgtggactgccgtccccacagcgctacctttggcaagtgggtgggcgtcaccctctccgaggacaacaagaagatgttctatatcccggagggctttgcccatggttttctggtgctgagcgatgtggcagagttctgctacaagtgcaccgatgtctacgaccccaccagcgagggcggcatcccctacgacgaccccaccgtcaacgtgcagtggccggactgcggctgcgagcacaagaccagc

SEQ ID NO: 303 - DNA, 8464 bp, unidentified
  source 1..8464: mol_type = unassigned DNA
ttattttatagcgtcgagtgcgtttgagatatctgcaatcaaatccaccttgtcctcaagacctaagcttattctgataagctctgccggcactcctgcttccttaagctgctcatcattcatctgacgatgcgtgcttgttgccggatttaagcagcaggttctcgcatctgccacatgtgtctcgattgctccaagccttaatgccttcataaatgcagacgctgcctctctgccgccctttaagccaaatgatacgactccgcagcctccgtttggaagatacttctgtgctctctcatagtatttgtttgaaggaagccctgagtagtttacataggcaacctttggatgattttccaaaaattcagccactgcctgtccattttccacatgctttggcatacgcacatgaagtgactcaaggccaagattcagcataaatgcattctgtggtgactgcatagaaccaaaatcgcgcataagctgtgctgtacatttggtaatgaacgcaccttccttgccaaatttctctgcatatgtgatgccatgatagctgtcgtcaggtgtgcacagtcccggatatttatctgcatgtgccatccagtcgaatttgccgctgtctacgattgctccgccgagtgtggctccgtgtccgtccatgtactttgtggtagagtgtgtgacaatatctgcgccccactcaatcggtctgcagtttacaggtgtcgggaaggtattgtccactataagcggtactccgtgctcgtgtgccacctttgcaaaaagctctatatcaagcaccgtaagcgcaggattggcaatagtctcaccaaacataagctttgtgtttggtctgaatgctgcattcagctcctcctctgtagcatcaggagatacgaatgtagctgtaatacccatcttcgccatagttaccgcgatgaggttgaaggtgcctccatagatggatgatgatgccacgatatggtctccgcactcacatatgttgaacatggcatagaaattggctgcctgtcctgatgatgtgagcatggcagcagtgccaccctccatagctgcgatttttcttgctaccgtatcacaggttggattctgcagtctgctgtagaaatagccctctgcctcaaggtcaaaaagctttcccatgtcctcgcttgtgtcatatttgaatgtagttgactgaataatcggaatctgtctcggctctccgtttccggctgcatagcctgcctgtacacactttgtacctatactgtattctttcattgtgcttctcctttattatgttaatgtttcagatggatatagtatattacatttggcgcgttttgacaaattcttcaaatcgtggaagtgtgagagtaattttaccgtactcagaggtatctataaccccctttcttttgagccggtctctatataccgagaataatcctgaattcatatccagtttttctctgatttcttttaccttttcttcaccacttactgatatttccaacaatatttttttatcaagctctgacagctccgaccagattttactgtacacatactcatcaaggcactgatcatattccggtaaaatatcttctatcgtgtgatcatccctgttttcccagtaaagatatcccaatacctggaatgcaaaaggatatccctttgtaagagctgccattttgtctgcctctctttgatccagttcaaaaatatccatatagtgtttcctgactgctgtaaagctaagtggctcaagcattatcttaggcgccctgtacaaaaatgtaagtgccttgtcgttctgcagatcatatatattttcaaacagccccgtcataagcagaaaaataggataatcctgtctcagaaatatctgaaatgaactgacaaatacttttacaaattcacagttcataacctcatcaactgaaatgagtaaccgcttattatgtttctttatattttcaagcatcaattccagcacattttctatatccgtaaccggtgctgcattttctatggaaacgcccagtccaaacgctgaaaaatccagttttgcattgacaaatattttattcatctgaggcatactgtaaatcttagctgcaaggctctgaagcatatctctcgtagggttaagctcaactgtcagccattcctcatccttctttatctctgatactatattggtcatcataaccgttttgcccgatccccttaccccggttatcataaaaagctggtttgcaggattttctgacctaaatgtctctactatctgattggtctgtgagattcttgatatatattgcagtggttttttcccgaatgataatgtaaatggattttgcattttgttttccccttatataactttatataactttttgtttcgtatataagtttatataaccttatataactttgcatttattatataactttatataacttttgtcaccataaattcttaatctttaaaagcatctttataagatattttatctaccagcgcttcataactgctatcatcagcttgtactatctctctcacattgtgctgctctaatgctgctgttgttttttcacctattgagtatgctgtttccacgtatgcattctccggcagcatatgaaaaaatctttccacatttgatgcgcttgtaaaaacagcttcacttaccatgtttccaatgctttcaggaatactctcatatgcctgctcatttacatatgcatcaattttttctaattgacatatttctttaagccctgcctcaaggtcaggtgaagcctcctttgccgagaaaatgcagactttgatttcatcattatcgcccatatatgaactcaattctcctgcaagttcttttccggtctgttctgccggaataatatctgcatttatgtgatgctttgcaagctctttttctgtagcttttcccaccactgcaaaccttgcatttgctataagcctgatgtctgcccctgccagctccagattatagaaaaatgatcttacaccatttttgcttgtaaaaactatccagtcagctgatcttaccttatcaacaaatttaggaattataactggtttaattatgcctgtcttaaccggtgtgacatctgctccaagctgctgtaattttgctatcaattcgtttgttttgatatacggtactgtgatttttcttccaaacagcggccttttttcaaaaaaatcaagcctgtcattcagtgaaaccacatctcccacaacgattatagccggtgatgtcagctttgcttcctcaatcttttctccgatatccgcaagcgttcctatacatttgcgctgcgcggcaagtgtaccgttcgatatcactgctgccggagtatccgctcttcgtcctgctttcataagccctgctgcaatgctttttacatgcgcaagtcccatcaaaaatacgcaggtgattgtctcatctgtaagaagggaatagtctatatctgcctcctcatcctttctgctgtgcgcagtgatgacctgaaagccttttgctatgcctctgtgtgtgataggtattcccgcagccgcaagcgctgcaaccgatgaactgacacccggtaccacttctacctccacatttctatctaccaggtagagagcttcctctccgcctcttccaaatacatacggatctccgccctttaaacggactacaagctcatgatattttgatttctcgtacaaaagctcgtttatggcatcctgcttcatgacatgcttgtgattttccttgcccacataaataagctcacagcctgcctttgccattgaaaggaactctggtgatgacagcctgtcatacaccagacaatccgcctgttttatatatttttctccttttaaagtgagcaggcccgtatctcccggtcctgctccaactaatactacttttcctgtgttttctctcatgattttcctaattattttccaatttataccgaatatcgtgcaccgcacgctccacaatattgtttctgtctgatgtcatatcccatacctgctctgtccttgcaagctgttttccatcctctgagccaaacatcgcaagaagctttagcctgttatttttgtcgctgtcattaccgcggtctttttcacttacaatatcacagtatgcagccacaggcagatggcagtttccaccgattcgctttaaaaattctctctcaatacctgcgcacagattggttttctcatctgacaaagcatcaagctttgccatcagcttagcattgtcagcacgtagctcaagcgccagtgtgccctgtgccggagccggaatcatatcatcctctgaaaagtactgtgtgatctcagaatctcttccgatacgctttattcccgccgctgcaagtacgattccatccagcctgtattcgttatacttattctgtttttcgttagctatctcattgttatttacagtattatcggcaacctcttcatatataatttcaccatcatatagcttacgaagcctcgtatcgatatttccgcgtatgccaaccaccttaaggtcagggcgcagctttaaaagctgatactttctgcgcttgcttccggttcctatcacggcaccatgaggaagctcatccagtgaagcggcattttttagcaccaaaacatcccttggatcttcacgcttccatgcctttgcaaatgtaagccctgctgccggttcatcaggcatgtctttcatggaatggactgccatatgaatctttcccgataaaagctcgtcctctatctcctttacaaagataccctttgagccaatcttatcgagtgcctttttctgctctaaatcgcctgttgtctttatgataacagccttaaaatcatcatccggatatgctctttttaacttatctatcacgtaatcagtctgaacaagagctagctttgagcctctcgttcctattaaatacttcattttactctcctacggatcatgccattttccatttataatttataaatgaacaacaacttaaaatctgtaataccatactttaaactatatttccggaatccttccattatcaatagctgcacacaatatttctttaaacacacgctttctctcggcttgagtgtcatattgcgctattactttttcgcggatctgtcccatgtattcgttcagctcaccaagaaacggagtaagaatctcctgctctttgcctttcagatactgagtcagcacagggctgtttcctccgctcgaaaatgccgccacaagattcttttcctttatgtatgacggaaaaataaagctgcaatcagccttctgatcgaccgcattgaccatgatgcccttagctttgcaatactctgcaatctcatgatttaaagcattgtcatcagtggcagcgataaccatttccatgccgtcacagtcttttcgttcaaaccttctttttatgaacgtaattctatctgctgcatttgagtccgtctgattgttttctatatttgccgtatatgagccctttttatcctctcttgctatatcatcaattgtaagctttctcagctcatcacatatatcctctgccacaaccgtgaccttcgcaccaaaatccagcattacgatcaccttgcggtatgccacatttccaccgccgacgatcagacactctctttccgtcatatccacaaacatcggaaaatacgccatttttatctccctgtaataccatatccatactttatttcatatattatttcatgccttattttatactttattatacgctttatgctttattttttgccttatgcttcacactgtatccattgagcattcctgcaaaaacaggacgaagcttggcagaaaacactgctgccgatacgcataatataaagtccggtgcaacagttatcagacagtaatccactattactatgccccagctgacaggtgttgccgcatagaaattcttcatgcagtaaaagtatattgctccaactgtataatatgccacaagtccgaccgttgccggaagaatgagtgtaaacgcattggtctttttaagcttttctgtgatggctccgattaaaaatgctgcaagcacaaagcctaagaggaacccaaagcccggtcttaaaatgtatgtaggaccaccgcctgccgcaaatacaggcactcccaccagtccgatgcacagatatactatcacgctaagcgatgccagctttgcccccagcagaaatcccgccatcagcacaaaaaaccactgtaatgtaaaatgcatggtgtacataggaagcggaatatcaatcttgataaatgctccaactgcaataagtgccgcaaaaagtgcacatgttgtaagttccttcgtttttaatttcattttcgcgcgctctttcgttttattaaatatacatgctataataacatctttctctaaaaaagaaaagccatcttcgatgaagctgacttttctttgcagctttcgctgcgactcaaaacattaacatatgatttagaagtaatattcatcagaatatattcgtaaatcctctttcgtgacctgtcctccctcgatatgaaacgagttgattacaggattttctgccataagcgacattatcatgtagctcgcacttggatcgtatgcaagctttatatcctcatccgatggccttgaagggctagacgggtgtgaatgccagttgccaagcggcttaagaccgtttgctctcatgtcctttatggctgccagctgctcctttggatccattgtgaaatggtcctcggcatggtctgtattcgtcaggtaatatacctttgtgatgagacgaccgttttcgtcctcactgcctgctatcagaccgcacgcctcctccggcagatgctctttagcatattttgctatttcatccagaaacggatatttcattcttatgatactcatatcgttcctttccttactgtctttttattcctgtgtacgaggtgcatcaaatctgcccgctgtctcctcgcagacctcctgctcgtagtcgattggctcgagaatggtcggatggtcgccacagactgcacagttgtgtgtatcctttggaagcttaatcttgtggaactccatggtgagtgcatcatatgtaagcagatatcctgtgagcagctctccaacaccgattaaatacttgatagcctccatagcctgaagcgaaccgattactccgcccatagctccgataacgcctgcctgcttacatgtaggcactgcatcctttggtggcggattcttgaatacacatctgtaacaaggtccctctcccggcacatatgtcatgagctgacccttgaaacggatgattcctgcatgtgaaaacggctttttctcaagcacacatgcatcgttgattaagaactttgccgggaaattgtcagttccatcgatgatgaaatcataatccctgataagctctctgatgtttgacgcatctacaaacatacggtatgtattgacctgaacatccgggttcatggcgttcattgtctcttttgctgactttaccttggcttttcccacatcggctgttccgtggataatctgtctctgcaggttggataaatctacctcatccgcatccacaataccgattgtaccaactcctgctgctgcaagatacatggctgccggagctccgagtccgccggcaccgataataagcaccttgccctttaataatttcttctgacctttaacgcccacctcattaaggataatgtggcgtgaatagcgttcaatctgctcatcagtcattgccattagcatccacctcccatgaagtaaaggaactctacattgtcgccatccttaagcactgtctttggcttatcctctgtggcaacaaattcctcatttattgaaactgttacatactcaggcatatctacattctcaagctcgataagctccggtaatgtaagtccatccttatattctttcttctctcctgctactgtgatagtcattttatttcctcctgtgtcacagattgtggtatctgtatgtgttattatcctgtatcagactgctttatataataatctaaaaactataataattcttcaacccatgctttcaaatcggcaggcttttgtgcgccgacctttctgtctaagacctctgcgttttttacaaaaagcagtgtcgggtttgcagtcacctcatactcatcagcgagctctccgtcaaagtttgtgttgaccttgtatacgtgaagcttatcctcataatcatcctcgatatctccgagaaccggtgccagcttcttgcaggccacacatgaatccgagtaaaaatcaacaattaccggaagcttgctttttaatactttttcatcgaaatccgcctttgaaattcttgctgccat

SEQ ID NO: 304 - DNA, 13277 bp, unidentified
  source 1..13277: mol_type = unassigned DNA
ttacttcttatcgttttcgcgaatctccacccggcggatcttaccgctgattgtcttaggaagctcttctacaaactcgatcacacgcggatatttataaggagcagtcactttcttcacgtggttctgcaattccttaatcagttcttctccggcacgtgctttatagtctttggatagaacaatcgtagcttttactacctgaccgcgaatctcgtcgggtactccggtaatggcacattccacaacagccggatgagtcatcaacgcactttccacttcgaatgggccgatgcggtaaccggaactcttgataacgtcgtctgcacgaccgacaaaccacaggtatccgtcttcatctttccaggcaacatcgccggtgtaataaataccatcgtgccaagcttcatgagtacgttccgcatcccggtagtattctttgaaaagtccgagaggtttacctttgctggtgcggattacaatttgtccttgttcacccgcttcaacagagcgaccttcatggttgatcaagtctacatcatattgaggattcggcagccccatgcttcccggtttcggttccatccaaggcatggtggcgatggtgagggttgtttctgtttgtccgaaaccttccatcagtttgatacccgtcagcttcttgaaagtttcaaatacggcagggttcaatgcctctccggcaatggtgcaatatttaagtgaagacaagtcgtactttgtcaggtcttcgtgaatcaagaaccggaagatggtaggaggtgcacagagagaggtgacatgatattcctggattttttccagaatagctgccggggtaaacttctcgtggtcgtagacgaagatattggctccggcaatccactgtccgtagagttttccccatactgcttttccccagccggtatcggcaatggtgaggtgaaggctattttcatccaagttgtgccaaaaactaccggtaacgatatgacctaacggataagtaaagtcatgtgccaccatcttaggttcgccggtagtgccggaagtaaaatacatcagagagatgtcatcattagtattcgcatggcgcggacgtacaaacggagcagcattttcgataccctgatggaaatcttcgaagccttccgggatttccggaccgacactgactaacttttcaaccgtgggacattcgggaagagcctctttgatatgttgcaggatgattccttcgccggcagctacgatcattttgatgtcggcagcattgcagcgatagataatatccttcttggtcagcaagtgagtagccggaatgacagttgctcctagtttgtgaagagcgatggtgctataccagaactcataacggcgtttcagaatcagcatcaccatgtcgccacggccgatacccaggctctggaagtaagaagcggtcatgtccgtagatcgtttcatgtcggcaaatgagaattggcgactttcgcctttgtcatttgtccaaagtaaagcgttcttgtcaggttgttcggctgcccaggcatctactacgtcataaccgaagttgaagttctccgggacgtttattttcaaattcttgttgaagtcctcttgtgagctgaaagaggtctgtgataaaaatctttctaccatgatgttgttacataattactgccagaaaacgtaccgttttgccatcgagcgctttcatgccatgtggaagtttagagttaaaataaatactgtctccttgattgaggatgatttctttgccttcgatgttgataagcatacgtccttcgatgacaaggttgaattcctgtccattatgtttgttataatggatcggctcgtcgattgctttcggttcaacggtaacgatgaacggatcggcggtacggttcatgaatcctgaagccagtgactggtatttataagctttggtacgttcaatgctgatacctttgccggcacgagtcacaaagtagctgctcattttaggttcttcgccaaacatcagagcgtcgagggctacattatacgtacgggctattttttgtaacatgctgacagagatgtcgtaatctcctgtttccgcaagccggtattcttcagcagaaatgtcactatcgcgggcgatatcctctgcggtcagttccaatacatcacgtaatccgcggaggcgttctgctatctgtttaatttgttcattcatacaaatggttagtattttatgattaataattctatggtgttatttggaagctttcatggctttgataatagcagaggtgaagccgttgtgttctaattcattgatacccttgatggtgattccgcccggagtggttactttgtcgatttctacgctggggtgggtgtcgttgttctgaatcagtgcggccgctccttttaaggattgggctatcatctgcatggcatctttagggcggagtcccatttcgattccggcttgcatggctgcctgaatgtatttcagtacgtaagcgataccgcaggatgccaatgcggtggctgccgctattttatcttcggggataagcatcactgttcccatctcgctaaataaccggaggatgaagttgtcttgttcatcattcgtgttgcgcgcggcaacaagcgtcatgctttccagttcgctgatagcggtgttcggaatcagacggaacatgggcatttccggtgctacgacataatgagccagttcttcaaaactgatgccggcagctacggagatgagtatctgtttgctttttaatttcaactcgcgcatcaccgattccataaaccacggtttgacggcaaggatgacaatgtctgctcctgtggctgcttccagattattgttggtggtggagatacccggaaattcttttttcagtttctctagttttccggcactgggattggatacaatgatatccgaatcgtctatcagacttccttttgccaggccacgggctattgaaccgcccatgtttcctgcaccgataatggctattttcatatacgcttgtttttaatgagttgttacagacaaaggtaacagttaattacgaaaaaacaaaaagcagccagaataagaaataaatttctaataaaggctgcttttatcgttggctgtttattaatcaaatgagcggttagagtacttttttgaaccgggcgaggaactctttcgcttcctccatgctgagacagagaggaggtaacaggcgaagtacattcgtgccgcttgctccggtaaatacatgctcgtcatagatgagacggctgcgtagttccttgatcggttcttcaaattcgaggccgatcattagtccgcgtccgcgcacttctttgatttgcgggaattttttcagctcttccagtaagtaatcacctactgccttagcattttctaccagattttcctgttcaatgacatccatcacagcgagagctgccgaacatgccaggtgatttcctccaaaagtagttcccaactggccatataccggtttaaacatcgggctgattaagacacctgccattggaaagccgttaccgattcctttggctacagtgatgatatccggcttaatgtcattatattgatgagcgaagaatttaccgctacgcccgtatccgctctgaatttcatcgagaatcaggatcgttcctgtttcgctgcaagctttgcggagttcctgcataaattcggtggttggtatcttgataccgcctacaccttgtattccttcaatgataacagcgcatgtgtctcctttagacaattcctgtttcatcgcttccacatcgttgagtgggagataggtgacatgaccgttattgttgataggagcgataatagaaggattgtgagtcgcttctactgcaagagacgtccgtccgtggaatgctttattgaaagatacaatcttagtacgtccgttgtggaaagaagcaagtttcagagcattctcgtttgcttcggcaccactgttaatcagaaacaggctgtagtcttcgtaaccggaaatctttcctagtcgttcggctacctcttgttggagcttattgataacggagtttgagtagaaaccaagtttagccacctgattactgatcatcgctacatagtggggatgtgcatgtccgatggagataacggcatggcctccgtagaggtccagatattccgttccgtttttatcccatactttacagccatcacctttgacaatgttgatattgtataaaggatatacgtcgaataaattcataattcttctgtttttaaaaagctgaaggcttcaaacgtagtcctacggtttcttccagattgaacatcaggttcatattatgaacggcttgtccactggcgcctttcagcaaattgtcgatacaagagataatcaatagcttatcaccatgtttttccagatgtatcaggcacttattagtattaacgacttgtttcaagtcaatattcttgtctacgatgtgtacaaaggagtcttttgcataatattcctcatacatacgaacgatttcttccagcgctactttggtcttgactaccagcgtcgcgaagataccacgagcgaaatctccacggtacggaataaagtcgatgtccgaatcgaagctgttttgcaactgtttcagcgattgcttgatttccggaacgtgttggtggtcgaatgctttgtacacactcatattgttgtttctccaactgaaatgactggtagcacccggtttcaccccggctcccgtacttcctgtaatggcatttaccattacatcatccgtcagcatcagattcttggcaagcggaagcaaaccaagctggatgcaggttgcaaaacagccggggttggctacgtgcttcgccgtacaagtggcacgacggttcagttccggcagaccgtagataaagtcgtggtcgtcacttttgatacggtagtccatggagaggtcgataatcttcaggttttccggtatgttgtgactttccatgaatttctttgtatctccgtgggcggtacagaagaaaagaacgtcgatttcgtccagaggtaactggtcggtgaacgttaaatccgtttctccatacaagccttcgtgtacgtcggtaattctgtttccggcattactgctgctgttgataaatacgatttcagtttccggatggttgagcagcagacggattaattcgcctgctgtatatcctgcgccaccaatgattcctgctttaatcatatctcttcgtctttgtggttattatagtaaacacgtagcggagtagaagtcactttgataaagccttttgcgtcttcggctgtccagcctttctgcatttcaccgtattctccgaatttagtcttcaccagatcatcttccgattctacacctacggtagagaaggaaagagggcgaagctcgaggatagctgtaccgtttacgttgcgctggctttcctgcaacatggcttcgatgtcacgcatcaccggctccaggtattgactttcgtggaggaacataccgtaccagttagctacttgatccttccaatattgttgccatttgcttaatgtatatttctcaaggaaacggtgagcgccgataatcaacatcggggcggctgcttcgaatcctacacggcctttgataccgataattgtatcgcctacgtgcatatcacggccgataccgtatgctgcgccaatctcttccactttctggatggctttgatcgggtcgtcaaacttctcgtcgttgacagctttcagttcccctttttcgaaagtcaggcggagctgttcgctaccttctttttcaacgtgcttgaggtaagctgtttccgggagtccttgcgcggagtcgaggatttcgccaccacagatagaagtaccccataagcctacgttataagagtatttcagtttggtgaagtctgcactgaaaccatgcttgttcagatagtcgatttcttcctgacggctcaatgccatatcacgggttaatgtgatgatttccacattgggagccagtacgaggaaagtcatatcgaaacgaatctggtcgttacctgcgccggtagaaccatgtgcaatggcgtctgcaccaatttcgttagcatagcgtgcgatagccaatgcctggaaaatacgttcggaactaaccgaaataggataagtaccattacgcagcacatttccgaaaaccatgtatttcaggctcttttcgtagtattcctgggtaacgtctattgttacatatttcgtagctcccagtttataagcattttcttcgtttgttttcagttgttcttcactgaaaccacccgtattggcacaagctgcatatacttcgtaacctttttctttggcgaggtacatgacggtgaacgatgtgtccagtccgccgctgaatgccaccactacttttttcttcttttcttccatagtgctgtatcttttaaatgttatttctttcttgttcttttttgatgttccgcggctctgtcggatcgtatagcatggctgtacagatgcagaacttgcggtttttcgctaccaggatatcatggttgatacatccttcgcatcctttccagaaagcttcgtcgtctgtcagttcgttgaaggtgacaggcacataacccagttcggtattcatcttcatgacggctgcaccagaggtcagactgaatattttagctttcggccatcggagacgtgccagttggaaagaagcttgtttgatacgtttggccagtcctaatccacggaaatcgggatgaacgatcagaccggaagtagccacgtattgtttgtttccccatgattctatataggtgaatccggcgaaagtgtcaccacaaagagcaataatcgccttaccttctttcatctttgtcgctacgtattcgtgtgtgcgttccgcaattcctgttcctcgtacggcggcagcatttctgatagtttccaaaatagtgtcaacgtaaacctcatgtgaggcgtcggctaccataacatctatttgttgagtgtccatttctttattatataataataggtataattattcgatattgggaatgatgagtgacaaaagctgacgtattttactggttgcaactccttcacgcaacaccaacatgatcgtatcgtcaccggcaatggttcccagaatttcactgaattcattgttgtcgatgtcataagccatgctgctggcataaccgggacgggtgcggataacggcgatgttaccggaaaactgcaaagagataaatccgttgttgcgtaacatttcaccggcactctggtcggtagaacgtttatacataatgttgttcggcagtacatatacgtactttccattcatactggcagccttggctactttcaattgtttcaagtcgcgggaaagggtggcctgtgtcagttcgaagccttcgcggttcagctcttgcagcagttcttcctgcgaaccgacctccttgcttgagataatcattttgatggcgtctaaccgatttgctttcttcttcattgtataattattctaagaatggcgcaaaagtatgcattattttggagaaaagatgcataaaaccaaagtttttttgcataaaagtgaaaatactttagaaagggatagtgatataatcaggatatatgtgggtatatgtaacaaagttgtttctttattgcttcattttgtgctgactttttttattgtctattaaaaaagatgcaattgtttgtttagggatttttaaatatataaatttgtaaagtgaataaggagacaaatcgtatgatagatgaagatattgagctttattctctttttagaaaaggagatagaaaggcttttgatactttatttttgaagtattattccatactatgtgccttcgggaagtactatattcctatagaagatgctgaagaagttgttttggatatcatgacatggctatgggaaaacagagaattccagatcatagaaacttctttgcgaagttatttgtttatggcggtcagaaacagatgcttggatttaataagtaagaatcagacaaaaagacgttgttatgagcatatgtttgctaaagaaatgcagacaagttttgaagatcctgatttttatgtagtggaggaattgatggcgaaaatagaaaaggccgtgatgcgattgccggactcctatcgtataacttttgagatgagccgttatcaagataaaacatataaagagattgcgaaagaattaaacgtttccataaaattagtggagtatcgtatccagcaagcattgagacttttacgtgtagaactaaaagactatttaccgttgattacaatcatattcccttattttctctaaggatagccgattcgtttttgagtcttaaaataaaaatgcagcttttaattaaaaaagttgcatttttgtttaggggctaattgaagtattccgtcttcttaataaaatgaacataaaagatgatggaattacatgaaaatatagatgaggctcttttactcctttatttttccggtacactaggagagaaagaaaaagaagaggtagaaaattggatttccctctctgaagagaacagaaaaatagctaaacagatttgttacatacaccacgtaacagatataatagataccgtgaagcagatagatcctaaacaggcattggtgaagctggataagagattgtcaaaaaggaagaaaataaactggtgggaatgggggataagagcagcagctgtgttatttattcctttattcttatctttcttctattttgtatttaatcaagataaaaattatgatcgttatgtcgaaattcggtctaatccggggatgatgacaaaagtggagttaccggatggtacttgggtatggctgaattctgcttcttatctaaaatatccagtgtcttttgaaggagaatatcgaaaggttgaattgctcggagaagcttatttttcagtacaaaaggataatggacggaaattcttagtcgatgtaggaaaggggattgaattagaggttttaggtactgaatttaacgtggatgcttatccggatgataagtttgtagctgctactttggtgacaggtagagtaaaattccattgtcagcagaaaggcagggaggttacttatagtatgcaacccggacagaaggtgatttataatttattggatgagaaacttttgtgtacaactacttttgttgaatctgatattgcttggaaaagtggaaggatcatttatcgagatactcctcttgaagatgctttaagaactttgagcaagcgttttgacgtagagttccgtattgttaatccattattaaagaaatattgctttacaggtacttttattaatcaacgtctggataagatcttggaacacttcaaaatagcttcaggggtgagatacagatatcttgaatcggcattggacaacggtgttgtgaaagagaaaacaataatagaaatttattaaacaaaaaagaactatgaaaacactccctccttaaacaaaaaatatgggaaaaatatagcactattcttcccatataaaaaatcatttagccttacttgtttgccgacaagtgtagttaactttatttttaatttaaatcacaacaaatttatgcaaaaacattgtagtatccaaattcttgggattaaaaggctactgaaagcaactttaaaaggaattccattgcctatgagattattaattattatgctatgtgtttcgataggatgcattcgtgcgacaaatacttatgcgcaaaatgcgatccttgacttgaaagtcaataatcaaacgattgaaaccgtcttgaaaataatagaatcgcggactgactttgtattcttctttaacagtcagcaggttaatgtacataaacgtgtctctattaatgtcaataaacagaatatttttaaaattctagatgaggtttttaagggaagtgacgttgtttattcagtgcttgataaaagcataattttgtctagtaaaagatttgcgcctgatggaaatttgaagaagattacaggtaaggtcgttgatacgaacggtgaaccgttgattggtgttacaattgctctgaaaggaagcaatagaggaacggtgagtgatgtaaacggaaatttttctttaaacggagaagaaggaaagcttaatgtgttgaatatctcatatattggttataaagaccaacaggtaaaagttgaggatggtaaaactttgattattacattggaagaggataccaaggttttggaagaagtagttgttgtgggatatggtacacagaaaaaaatcaatttgacgggtgctgttgctgtggttgacgataaacaagtaatcggacgttcggccgataatttgtctaaactacttcaaggagctgttcctaatatgaatgttactgtttctaacggtcgtccgggacagggtggtagcataaatattcgtggtatcaattctatcagtagtagtgccacgcctttgatattagttgatggtgtagaaggtactatcgatgcagtgaatcccaatgatgtggagtctattagtgtattgaaagatgcttcttctgctgctgtatatggggctcgtgcagcttatggagtaattttggttacaacaaaatctggtaatgatgataaaacacgtgtttcttataacggacgttatagctttggctcacctacagtttccagagattttgagactcgcggttattattcggcggctatcaatgatatgttttattctacctatcaaggttctaactatacgaattataatgatgaagattattatgaaatgtggatccggcgtaatgataaaacggaaaatccggaacgaccgtgggtggttatcaaagatggtgaatataaatattatggtaactttgattggtataactacttcatggatgagtctcgtcctacatgggaacacaatattagtgtcagtggtggcaataagaaagtgcactatttcctttccggtgcttattatgatcagaaaggagttattcggaaaaatatggatagtttcactaaatacaatttccgttccaaggtaagtattgagattgctccatggttgaagataagtaataatacgtcatacaaaaaggattcttatccatttccggggccaggtgctattaacaatctttttgatgcgataagtaagcatgccttagcttctattgttccaatcaatccggatggtacatatatggggaatgcaacagttattacaggaggatatcgccctgctaatgatcttagtgcaattcttgaatacggtaaacacaagaatgaggatactaattacttttttaataccacctttgaggcggtaatgacacctgttaagaatgtaacggtgacggctaattattcgtttgctcaacatgaatatacggcaatgaatcgtagtgctaattatccatattcacgtgtacccggagaagttctttggaaaacagatggttatggccttaatactctttatgaacgttctaatcatgattggtttcattcatacaatatttatggaaattatacaaatacatttgccgatgtgcaccatgtaagtgcaactgccggtgtcaattatgaaactaaattttttaaagacatcaaaatacaacgtaatgatttattgtccgaagatttaactgattttaatttagctaatggtgatgaaatgagtattgcgggtggtaaaaatagatatgctcttttcggtcttttttatcgtttgaattatgactataaaaatagatatttatttgaatttagcggacgctatgatggtagttcacggtttgcccggggacatcgctatggcttttttccttcagtttctgccgggtggagaattaatgaagaaaagttctttgcaccattacgtaaacaaattagtaatttgaaattacgcttttctttgggagcattaggaaaccaacaagtcggatattatgactatttgcagactatatcttctggtggtacaatttcttatgcttttggtgataaaaataaagcgtcaggtgctagtatctctgctccgaatgcttctgatttcacttgggaaacggttgttacaaaaaatatcggtttggatctcggactattgaataatcgtttgaatatgacggctgatatatatgtacgtgatacgaaagatatgttgatggcttccaaggatcttccgaatgtatatggtgcttcttctccaaaaacaaatgctgctaacttacgtacgaaaggttgggaagcatcgattagttggaatgattcttttaatctaaagggaaaagcgttccattattctgtcgtactaggcttggctgataatacgactaaagtgacaaagtataacaatgataacaaaacattgggcactccatatgaaggacaacaactgggagagatttggggatatgttgttgatggtctcttcaaaactgatgaagaagctgaaaactatccggtaaatcagagttacgtaaataatatattgaatatttctgtaaaatctcaaggtctccatgcgggggatgtgaaatatgtggacttggatggcgataatattatttctcctactttatcggcaaacgatgtgaaggatcagaaagtgattggaaattctttaccaagatatacatattctgtcagattagctgcagattggaatggaattgatttttctgctttgttgcaaggcgtcggtcgccaacattggtatcccaatggtgaaactagtctgttctggggtccctatgcccgtccttattgtacttttattccgaaggatttcttgacagatgtttggtcagaagataatccggatgcttatttcccacgtccgagaggctatgtggcattggatgttaatccacgtgagttgtctaaacctaatactcgctatttgcaaaatgtggcttattgccgtcttaaaaatgtaacagtcggttactctttgccacgtacttggctaaaggctttgcatatggaacgtgtcagggtttattttagtggagagaatctttttacattcagccctttacatagtaattatattgatccggaacatgctggggcttctacgagctggaaaagtggtcatacgaacgtgacttcttatccaatgagtaagacctattcatttggaattgatgtgactttttaa

SEQ ID NO: 305 - DNA, 8756 bp, unidentified
  source 1..8756: mol_type = unassigned DNA
ttagattttgttgctgcggcgccagatgtgcatcttctcggcctctttgatgagctgctcacggaagtcggggtgtgccacgttgatgagggcctcagccttctcccaagtggtcaggcccttgaggttgacgcagccgtactcggtgcagagataatgcaggttggcgcgggtgtcggtgatgatgctgccattttccagcgtgggacggatgcggctttccagctggccggtctttttattaaagaaggtggaggacaggcagatgaagctcttgccgcccttggagaggtaggcacccagcacgaagtccagctggccgcctgcaccggagatgtgcttgataccggcgctctccgcgttcacctgaccaaacaggtcgatgtccaccgcattgttgatggagatgaagttgtccagtgcggagatgctgcggatgtcgttggtgtaatcgacgggggcggacatacactcggggttgttgttgaggtagtcgtacatcttctgggtgccggcaccgaaggcgtagacctgacggcccttgtccagctgcttgtgtgcgccggtgatcttgccggccttggcgatgtccacaaaggcatcgacgtacatctccgtgtggacgccgaggtccttcaggtcgctctgtgcgatgaggctgccgatggcgttgggcataccgccgatgcccagctgcaggcaggcaccattggggatctggggcacgacgagatttgcgaccttcagatcgacctcagaagcggggccggcagcggccatctggccaatgggcgggttgctgccctccacgatgccggtgacccgggagatgtggacgcagttctccatgccgccgaggcagcggggcatattggtgttgacttcgacgacgatcttcttggccttctcgcagacagcgcccagatgagaagcgctggggccgaagttgaagtagccgtgctcgtccatcggcgttacctgaaagacggcgacatccagcgggtcggggctttcgcggtaatagcggggaagctcagaataccggatgggggagtagaacgaaaagccctgtgcgatggccttgcgctcgatgccgcccatatgccagctgttccaagtcatgtgggcagcagggtcgtcgatctggaagatctcgggcacccacatcaggatgccgccgcggaagttgacattctccagctccggcaggcgctttgcaagggcggcgtccacggccacaggggtgttgacacaccagccgtagtccacccagtcgccgctcttgaccagcgcggcagcctgctcggcggtcatctttttctgcgcgtacatttccttaaaatccattataaaccatcctctcctataataacataaaagaattgtaaatttaccatttacattcctgcggaacaaagatctttgccggaaatttaccgttcgtttccagttttgacaccggcttatcacatcccggcggtatccttggaaacagcaggacggatgcctccggcagaggcagacttgctcaacttagttataacattaacaaagagcagaatcaagccccctttcgtaaaaaatagccctacggacaagatgactaaaaatcttagcaatttgtggggataatttggtacgacaaaaacaaattttttcgaaaaaagacttgataaaattttgacaatatggtttacttaatgtgtaccaagacaaagcgccccagtgcgacgttaattgactaaaaattaacgatgttgcgaggggcgtatgcctcgatacttgaagcgggaactgaaaagtgctatcatggcaacaccaaattgcgcttttccaaagcgcggcgataaaggagaccataccgatggcaacagcagtttaccccgggtccttcgacccggtcacgagaggacatctcgacatcatcaagcgggcagcaaagatcaacgaccacctcatcgtggcagtgctcatcaacagcgcgaagaaccccctgttcaccgtagaggagcgggtggcgctgctgcaggagtgctgcaaggacatcccgaacgtgacggtggagggctttgacggcctgaccgtggagttcgccaagaagcgccacgcctcggtgatggtgcggggcctgcgggccgtgacggatttcgaaaacgagatccagctggcgcagaccaaccacgcactgatgcccggcatcgagaccatgttcctcgccaccagcatcaagtggagctacctttcctccaccatcgtcaaggaggctgcccgctacggcagcaacatctccaagttcgtgacgcccaacgtagaagcggccatccacgcgaaagtggagcagcttcaggcggaaggaaagaccatctgatcccttttatcatgcagaaaggctctcgggccttttgatagatcgttttacgaaaaccccgtaaatatacacatttcaggaggctattaacatgaaaaaaattgttatcgcatctgcctgccgtaccgctattggtaagtttggcggcactctggcaaacgtccctgctgctgagcttggctccatcgtcatcaaggaagctctgaaccgtgcaaacgtgaagcctgagcaggtcgatcatgtttacatgggctgcgtcattcaggctggtctgggccagaacgtcgcccgtcaggcttccctgaaggctggcctgcccatcgagacccccgctgtcaccgtcaacgtggtctgcggctctggtctgaactgcgtcaacatggctgctcagatgatcgaggccggcgatgctgacatcgtggtcgcaggcggtatggagaacatggatatggctcccttcgccctgcagaaggcccgctacggctaccgcatgggttctcccatgggcaagagcgagctggtcgataccatggtcaacgacgcactgtgggatgcctgcggcttcaacaagcacatgggcatgaccgctgagaatgtctgcagcaacgagacctatcagaagaagtacggctacagccccatcacccgtgagcagctggatgagttctcctacaacagccagatcaaggctgacaaggccatcaaggacggcgcattcaaggacgagatcgttcctgtcgtcatcaagggcaagaagggcgacaccgtgttcgataccgatgaaggcccccgtctgaccccggtcgagaagctgggcaccctgaagcccgccttcaccaaggacggcatcgtgaccgctggcaactcttctgctatcaacgatggcgctgctgctctggtcgtcatgagcgaggagaaggctaaggagctgggcatcaagcctctggctacttgggtcgcaggtgctctggcaggcgtcgagcctgaggtcatgggtctcggccccatcgctgccaccaagaaggtcatggcaaagaccggcctgaccgttgatgatatggatctgatcgaggccaacgaggcatttgcagctcagtccatcgcagtcggcgaggctctgggctttaacaaggacaagctgaacgtcaacggcggcgccatcgctctgggccacccggtcggcgcttccggcgctcgtatcctcgtcaccctgctgtatgctatgaagcatcgtggtgcaaagaagggtctggctaccctgtgcatcggcggcggcatgggctgcgcaaccatcgtcgagatggactaagttccctttgaagggtcactccggatattgataccgcccggacaaggggcaggaccggagacctgtccccctgtccgggggctgatttgagtaagatataacctgattggaggttttcacaatggcatttgtaaaaaccgaggtgcagggcgctgtcgagatcatcaccatcgaccgcccgaaggcactgaacgccctgaaccccgaggttctggctgacctgaaggctgcttttgaggcagtcgatcaggagaccatccgctgcatcgtcctgaccggcgaaggcgacaagagcttcgtggcaggcgctgacatcggctccatgagcaccatgaccaaggccgagggcgaggctttcggcaagctgggcaatgatgtgttcctgatgatcgagagcttccccatccccgtcatcgcagccgtcaacggcttcgcactgggcggcggcaacgagctggctatgagctgcgacatccgcatctgctccgacaacgctgtgttcggtcagccggaagtcggtctgggcatcaccccgggcttcggcggcacccagcgtctggcccgtctggtgggcatgggcatggcaaagcagctggtctactctgcactgaacatcaaggcagacgaggcataccgcatcggtctggtcaacgcagtgtatccgcaggctgagctgatggagaatgtcctgaagctggcaggcaagatcgccaagaacgcccccatcgcggtgcgcaactgcaagaaggctatcaatgacggcatcagcctccccatcgagaaggctgtcgaagtcgaagagaagctcttcggcgactgcttcgagacccacgaccagaaggaaggcatggcctgcttcctgagccgtgagaaaccgaagcccaaggctgtgttcaccaacaactaaaaccaaccacctctgcaaagcctccccggaaaggggaggtggcggagaggatatacattacataataaaggagagatttcccatgaagatcggtgttatcggcgctggcactatgggccagggcatcgcaaaggcatttgctcaggtcgagggcaacactgttgcactctgcgacatcaagcaggagtgggctgagaatggtctggcaaagatcaagaagggctacgacaagctggtggctaagggtaagatgacgcaggagaaggtcgacgctatcgtcgccgccatcaccccgggcctgaaggaagacctgtgcgctgactgcgacctcatcgttgaggctgctttcgaggatatgaaggtcaagcagaccactttcggcgagctggataagatctgcaagcccgagtgcatcttcgcttccaacacctcttctctgtccatcaccgagatcggcaagggcctgtcccgtcccatgatcggtatgcacttcttcaaccccgctgaccgcatgaagctcattgaggtcatcgctggctgcaacactcctgctgagaccgtcgagaagatcaaggagatctccgtcgccatcggcaagaaccccgtgcaggtcaacgaggctgccggcttcgtcgtcaaccgcatcctgatcccgatgatcaatgaggctgccttcatcaagatggagggcgtctccaacatcgccggcatcgacaccgccatgaagctgggtgctaaccacccgatgggccccctggagctgggcgacttcattggtctggacatctgcctcgccatcatggacgtcctgtacaaggagaccggcgacagcaagtatcgtgcctgcccgctgatccgcaagatggtccgcggcggcaatctgggctgcaagagcggcaagggcttctacgtttacaacgcagaccgcaccaagaccccggtggacgagctgtaatttagtttgaaatttctctcggtcgccctcaaaaagcggccgggaggaatttgtttgcacaggacaagcgtgcagctgccctgtgctgaaagaaaaacatccgttaggaggatatagcgatggattttactctgtccaagcagcagcagatggtgcagaagatgtaccgcgagtttgctgaaaacgaagttaagcctctggcaaagaaagttgatgccgaagagtatttccccaaggagaccgtcgagaagatgggcaagctgggcatgatgggcatttacttccccacttccgttggcggcgcaggcggcgatgtcctgtcttacgtcatggcagttgaggagctgagcaaggtctgcggcactaccggtgttatcgtttccgcacacaccagcctgtgcgcagcccccatctacgagaacggcacccccgagcagaaggcaaagtacctgcccaagctgtgcagcggcgagtggctgggcgctttcggcctgaccgagccgggcgctggcaccgacgctcagggccagcagaccatcgcaaaggaagatggcgattactgggtgctgaacggctccaagatcttcatcaccaatgccggttttgctgatgtcttcatcgtcatcgctgtcaccgacgtcgtgcccgacaagaagggccgtcccaccaagctgtgctccgccttcatcgtggagcgcaccgacccgggcttctccgtcggcaaggctgaggacaagatgggcatccgtggttcttccacctgcgagctgatctttgaggactgccgcatcccgaaggaccgtatgctgggcatccgtggcaagggcttccagctggctatggccactctggacggcggccgtatcggcatcgcctctcaggctctgggcatcgccgagggcgctctgcaggagactgtcgcttacgtcaaggagcgcaagcagtttggccgcagcatttccgctttccagaacacccagttcgagctggctgagatgaaggcccgcatcgaggctgcaaagtatctggtctacgctgccgctctgaagaagcaggaagcaatgaacggcgcaaaggtccgctacagcgtcgaggctgctgaggctaagctgatcgcagcccgcaccgccagcgatgtcacccgccgctgcctgcagctgttcggtggctacggctacacccgtgattaccccatcgagcgcatgatgcgcgatgccaagatcactgagatctacgagggcaccagcgaagtgcagatgatggtcatttccggcgcgctgctgaagtaagggaggcaagatttacaatgaaagcaatcgtttgtgtaaagcaggttcctgatacctccggtaaggtggccgtcaaggcggacggtactctggaccgtgcctctatggcaaccattaccaaccccgatgacctgaacgctctggaggccgccctgaagctgaaggacgagaccggctgtgaagtcgtcgtcgtcaccatgggtcccccgccggccgagggtatgctgcgtgagctgctggcccgcggcgctgacaaggctgttctggtgtccggccgcgagttcggcggttctgataccttcgcaaccagccagatcctcgctgctgcggtcaacaagatcggtgtcggccccgaggacgtcgtgttctgcggccgtcaggcaatcgatggcgataccgcacaggtcggccctcagatcgctgagaagctgcacctgcctcaggtgacctatgttgcagacatccagaaggatggcaacacccttaccgtcaagcgtatgctggaagacggctacatgatggtcaaggtgcagactccctgcctgctgacctgcatcaaggagctgaaccagccccgctatatgagcgtcaacggcatcttcacctgctacgacaagccgatggaagtgttcgattacaatgcactgaaggacgatccgctgatcgaggtcgataccatcggtctgaagggttctccgacgaacgtcttcaagtccttcactcctccgcagaagggcgcaggcactatgctgactggcgacgataccgctgcacagctggctggtatcctggccaagaagcacctgatctgatgaaaggagcataggattacaatggctgattttaacgaatacaagggcgtctgggtcttctgcgagcagcgccagggcgcactgatgtccactgattttgagctggtcagcgaggcccgcaagctggctgacgagctgggctgcgaggtcaccggtctgctgctgggcgacaacgtggaaggcatcgcaaaggagctgggcggctatggcgctgataaggtcctggtctgcgaaagccccctgctgaaggattacaccactgacgcatacgctaaggtcgtctgcgacatggtcaacgagtataagcctgaggtcctgctgatcggtgctaccaacatcggccgtgaccttggcccccgctgcgcagctcgtctgcacaccggcctgaccgctgatgcgacccatctggacatcgacactgcaaagtatgtcgagttcctgaaggaaagctccaccatcgacctgtccaagcagaagttcgattatgaggatcgcaacctgaagatgacccgtcccgcattcggcggccatctgatggctaccattatctgcccccgcttccgtccccagatgtccactgtccgtcccggcgtcatgaagaaggctcccttcgatcaggccaaggcagatgcctgccagatcgtgaagcccgcattcagcctgactgctgacgatgtgaagaccgaggtcctgagcgttgagaaggcagctgagaagctggtcgatctcatcggcgcagacgtcatcgtctctgtgggccgtggcatcagcaaggacgtcaacaagggcattgagctggctgagcagctggctgtagctctgggcggcggcgttgtcggcgcatcccgtgccgtcaccgacgcaggctggatgaccgctgaccatcaggtgggtcagaccggtaagaccgtccaccccaagatctatgtggctctgggcatctccggcgcgatccagcacaccgcaggtatgcaggattccgagtgcatcatcgccgtcaacaagaacgagtccgcccccatcttcggcgtggctgactacggcatcattggcgacttgttcaaggtcgttcccgaactcatcaagcagatcgaggcagcaaaggctgctcagtga

SEQ ID NO: 306 - DNA, 11051 bp, unidentified
  source 1..11051: mol_type = unassigned DNA
atgcaagacattagaaacattgcgatcatcgcccacgtagaccacggaaaaacaacactggtggacaagatgatgctggcgggacatttgttccgcaacgaccagacaaatggtgaactggtattggataataatgacttggaacgcgaaagagggataactatcctttcaaagaacgtttcaattaactacaaaggaacaaaaatcaatattattgatactccgggacacgccgacttcggtggcgaagtagaacgtgtactcaatatggctgatggatgtatcttattggtagatgcattcgaaggcccgatgccgcagacacgcttcgtattgcaaaaggcgttacagatcggtttgaaacctgtagttgttgtgaacaaggtggataaacccaactgccgtccggaagaagtatacgaaatggtattcgacttgatgttcagcctgaatgctacagaagatcagttggacttccccgttatttatggttctgccaaaaataattggatgagtactgactggaagaccccaacagaaaatctggttccgttgttggatgctattattgagcacattccagcaccgaaacagctagagggaactcctcaaatgttaatcacctctttagactattcagcatatacaggtcgtatagctgtgggacgtgtacatcgtggtaccctgaaagaaggtatgaatattacactggcaaagcgtgatggcagtctgataaagtctaaaatcaaagaactacatacttttgaaggcttaggacgtaaaaagacagatgccgtttcatcgggagatatctgtgctgtagtaggtgtagaaggcttcgaaattggtgataccatctgcgatttcgaaaatccggaaccattgccccccatcgccattgacgaaccgaccatgagcatgttattcactatcaacgattctcctttcttcggcaaagaaggtaagtttgtgacttcacgccacatccaagatcgcttgaccaaagaactagataagaacctggcattgcgtgtacgcaaaagcgaactggaagacggtaaatggattgtatcaggacgtggtgtacttcatctttctgtactgattgaaaccatgcgccgcgaaggatacgaattacaagtaggacagcctcaggttattttcaaagaaatagacggagtaaaatgcgaacctatcgaagaattaacgatcagtgtgcccgaagaatattccagtaaaatgatcgatatggtaacccgccgtaagggtgatttggtttctatggaaacacagggtgaccgcgtaaacattgagtttgatatgccttcgcgcggtattatcggtcttcgcaccaatgtactgactgcatcggccggagaagcgatcatggcccaccgctttaaatgttaccaaccatacaaaggtgagatagaacgtcgcagcaacggttctatgattgctatggaaagcggaacagcttttgcatacgctattgacaaattacaggatcgtggcaaatttttcatttatccgcaagacgaagtatatgccggccaagtggtaggtgaacatgttcatgaaaacgacttggtgatcaatgtaactaaatcgaaaaagcttaccaatatgcgcgcatcaggttctgatgacaaggcacgcatcattcctccggtagtattctcgttggaagaagcattagaatacattaaggaagatgaatatgtagaagttactccaaagagtatgcgtatgcgtaaagtgattcttgacgaaacagaacgcaagagagccaacaaaagctaatcaatctacattgaatataaaaaaatcccgaaggccatattaccttcgggattttttatctctaatctacaaacttcactttactaacctctctaggtttagcagccggcatttcatcgggataaccgaaagcaatcgcataaagcaactcatacccttcactgaatcccaactttttcatatattccgcagctgcaggtgatttcatgaaacgcacaggtcctcccaaacaacaggaacctattcccattgaccaggcagacaaaatcatattctcacccaacaaaccacaatcgatctgtgacatatcatatgcaggatcgttagcaataaacactactgtaggagcattattgaacatattcttaaatcccggacgttctgccgctttgggattttcttttttgaatatttcagtcaaaccattgataaattccggattatctactacacgaacctcccatgactgtttattcattccattaggtgcattgattccacattctactatagtctgcatcttttcacgctccacagcctcgggcttatacttccgtatactacggcgactcataatagtttctaccacagggtttacctggctcacggaaacactatccgcaacaacttccttctgtcgggagccttgcgatgtacagctgcataatacgaacatgcctgcaccaactaacattaatctaaataatttcatttgctatcatatttggtttgcaacaaatctaggcattttcaagcataaaaaaaagtggttcctttataaggaaccactttttatatgttaaatctgtaaaattcaaattacaacttcggaccagcagcaaccaatttcttacctgcttcgttaccagtaaacttagcaaagttcttaatgaagcgaccagccaaatctttagctttttcatcccactgagcagcgtcagcataagtatcacgaggatcaaggatcttcggatcaacacccggcaattctgtaggaacaacgaaatcgaagtaaggaataaccttagtaggagccttatcaatagaaccatccagaatagcatcaatgataccacgagtatcacggatagagatacgtttaccagtaccgttccaaccagtgttaaccaagtatgctttagcaccagtcttttccatcttcttaaccaattcttcagcatacttagtaggatgcaatgacaagaaagcagcaccgaagcaagcagagaatgtcggagtcggttcagtgataccacgttctgtaccagccaatttagctgtaaatccagacaagaagtaatactgagcctgttcaggattcaagatagataccggaggcaatacaccgaatgcatcagctgacaagaaaataacttgttgagcgtgaggacctttagagataggtttaacaatgttttcgatatgatagataggataagaaacacgagtattttctgttacgctcttatcagcgaaatcaatcttaccgttagcatcaactgttacgttttcaagcaaagcgtcacgtttgatagcagcgtagatatcgggttcgctttccttatccaagttgataactttagcatagcaaccaccttcgtagttgaatacaccttcgtcatcccatccgtgttcatcgtcaccgatcaacttacgtttcggatcagtagacaaagtagtcttacctgtaccagacaaaccgaagaaaatagctgagctagttccttccatatttgtattagcagagcagtgcatagaagcgataccacgaagcgggttcatgtagttcatgatagagaacatacctttcttcatttcaccaccgtaccaagtattcaggataacttgttctttagtcttcaagttgaaaacagtagctgtttcagagttcaagcccagttctttatagttgtcaacttttgctttagaagcgttgaaacatacaaaatcaggttctccataagcttccagttcttcagcagtaggacggatgaacatgttagttacgaagtgagcctgccaagctacttccataatgaaacgtactttcatacgagttgcagcgttagcaccgcagaaagtatcaacaacgaacaaacgcttgccgctcaattgttttacagctttagctttcaaatcagcccaagcttcttctgtacaaggtttgttatcatttttatattcgtcagaagtccaccatactgaattttcagaagcttcattcttaacgaagaatttatctttaggagaacgacctgtgtaaacaccagtcattacgtttacagcacccagttcagtaacctgtcctttttcgaaaccttccaatcccggtttagtttcttcagcgaaaagcacatcataagaaggattgtggagaacttccttcacgtcggtaataccgtacttgcttaaatctaaatttgccattttttaatgatttaatttggttattgtataatgttatttttactctttattttctgagagaagatgtttttcaacacccccttgtctaaggcgctacaaaattagtgctttattttaaaaaaaagaagttattagagaaaaatttccgtaataatcaaatatttatatttgtgtaacaaaaatgcaattcgtactttacaaatctagaaattatttgtttctttgcaggtcaaagtcaacaatataacaaaagcatagatatgaaaatcatcaatctcagtgaaggcaattctctcctaaaccaatatgtagcggaattgcgcgatatacatgttcaaaatgaccgtatgcgtttccgcagaaatattgaaagaataggagaaatcatggcatacgagatgagtaaagcactaacctattccgtaaagcaagtacagacacccttgggaactgccacggccagcacacacgatgacaaaatagtgattgcaacggtattccgtgccggactgccgttgcacaccggttttctgaacatgttcgaccatgccgacaacgctttcgtttccgcattccgtttttacaaggatgacgagcaccgtattgtagatgtgcacattgaatacatcgccgccccttcattgaatgacaggaccttgcttctcgttgaccccatgcttgccaccggtgaaagcatggaacttgcctggaaagctttccttaccaaaggcaaacccgctaaattgcaaatggcctgtgtcattgccagccaacaaggggtaaagcatatggcagaactttttcccggcgatgatgtcacattatggtgtgccgccatagaccctgtcttggacgagcacaaatacattgttccgggattgggggatgccggtgatttagcattcggcgagaaactttagggctcaaactataaagacagtttcacgtgtgttcgcttgcacacactaaaattctaaattaaatggttagtaaccggcaattattcacagcctattactaaccatttaatttttaaaacagttctgtagatctggtccctacagggaagatgaaaaatcttatttcacttcccaaatatcatttgtcatcagtaattcctggaaattatgatattttttctttgcggccacttcttcaatctgtgcattaacagcgtcatcataagtaggcgcctctacatcacggatcacccctaatgcaaccggaaaatccggtccttccatcaatgccagtttcaactgcaaagtattatccatacaatgagcatcgtgcactaaaatatctttttccgtcacaccattctcaccaagctttaccactttcagtccgaaaccttcctgcatcagcccgtattctttgtctacaccaaacaacatcggtttaccgtgttctaaataaatggcattctttgaacgaccttctttcgtatatactgattcgtgtgttccatcattaaaaatgacgcagttctgaagaatttcacatacagccgcacctttatgattggcagcagctttcagaatctccactgtaccaggaccatccgtagctaccgcacgggcaaagaaacgtccacgcgcaccaaaacataattcagccggatgaaacggatcttccacagtgccgtaaggagatgatttgctaacaaatccacggggagaagtcggagagtactgtcctttggtcaaaccatatatacggttgttcaacaaaatcatattcaagtcgatattacgacgaacggcatgtataaagtgatttccaccaatagccagcccatcaccatcccctgaaatctgccaaacagtaatctttggattagccaccttgcagcctgtagaaatagctgccgcacgaccgtgcacagtctgcatggcatatgtattcatgtaataaggcaggcggctggaacatccgatacccgaaataacggcagtatcatgaggagccactcccaattcagccatcgctttgtgcagcgaagccaagaaaaaatggtcaccacaacccggacaccaacgaggttgtccctttttgaaatcttttgctgtatattcgttcatagtctttactttctttacggttattatttatttaaaatctcagtgaaagcatcaactaactcgctgactacgaacggctggccttttacctcattaaactgataaggaacaaatccgtccactttcatacggagatatccggcaaactgaccaagattctgctcagccacgactaccttcttatatttcttcagcacttctgccgtattttgaggcagcgggttcaaatgaacaaaatgtgccaaagcaaccttcttgcctgcatggttcatttcctccattgctgaatataaatgaccgtaagttccaccgaaacccactatcaacaaatctgcatcctctacgcagccttgcaccttaacatcaggcactggaattttagcaatcttctcggcacgcaaacggcacatcaaattatggttttcaggctcggtagaaatagcacctgtatcactgtctttttccaagcctcccaaaatatgcatataaccttcctgtcccggcaatgcccaataacggacacctgtttcagtattacgcttgtaaggagtataattatccttcatttccggagtaacatagggtgggttaatagccggatagtttgccagatcaggcaatttccatgcgccggaaccatttgctacaaaaccatcagtcagcaacaccaccggagtcatgtgttccaaggcaatcttacaagcatcataagcagcatcaaaacaatgagttggagaagctgcggcaatgaccggcataggagattcaccgttacggccaaacaaagcctgcaataaatctgtttgctcagacttagtaggcaaaccagtagaaggaccgccacgctgtacattaataaccaccaatggtaattctgtaataacagccagattcatagcctctgatttcagacaaacacccggccccgaagtagaagtagccgccaacgcacctgcaaacgaggcaccgatagccgtagcgcaacctgaaatttcatcttcacattgaacagtagtcactcccaatgatttatgtttagaaagctcatgtaaaatatctgttgccggagtaatgggataagatcccaagaacaaacgcaggcctgctttctcggcagcagcgatcaagccataagccgtagccttgtttccgctgatatccatatactttccggggactttagacttagtttccaccttataagtatgatccacagacgcatgggtattgtggccataatcatatccggcgtgtatcactttaatattcgcttcagctatttgcggcttctttgcaaatttctcgcgcaaaaaattttcagcaaccgccaggtcacgattaaacaaccagcaaaccaatcccaaagcaaacatattacgacatttcaacattgacttgttgtccatgcctgtatctgccagacagtctttcaccatctgtgaaataggagcagcaattacatcctgcttaatacccatttcttcaatcggactgtctgttttgaaagccgccttgtccagatctgatttctgaaaacaatctgtatcaataatgatacaagctgtggacttcgcaaatttgtattgtgttttcaatgcagcggcattcattgcgaccaatacgtcgcatttgtcaccaggagtaaaaactttacccgcaccaatatgcacctggaaacctgacacaccggtcaacgaaccttgcggggcacgtatatccgccgggtaatcggggaatgtactgatatcatttcccactgtagccgaaatattagaaaagatatttccggccagctgcataccatcgcctgagtcgcctgagaaacggaccaccacttggtccaactccttgactatcatttcatctgccataacttattatttagggttacaaaatttcactgtttgcaaagttcggaaagttctgtcaaaggacaaaatattccgctgtcaaactacgtttgaatatcaaaatgtacaaaattaaaggtttatttatttccaagctaagaaaaagtagagataattacctgtttaaaagcataaatttctatcattatgacagcagcaaaaacgattcatttttacaatttattatttttatccatgttttataaacaacatgaaagttcatagcagaataataacattattagattataaaaaacagacaaaaaacaacaaaacaacaaagaaaggattattttcttcccacttaagacatttttcgatctttcatattgccattttaacaaaaaggagtacctttgtagccataaaagggccttgtagttcaacggatagaatagaagtttcctaaactttagataggggttcgattcccctcggggctacaaaagcagtaaacaattactatacaatcatttactgcttttattttatctagaaattctttagattacttatttaatcaccccaagttctttacccactttaataaatgcagcaattgccttatccaaatgtgccttttcatgaccggcagacaattggacgcggatacgtgcctgccctttcggaacaaccggataatagaaaccagttacatatatgccttcttcctgcatcttggcagcaaaatcctgagacagtttcgcatcataaagcatcacagcacaaatcgcgctctgagttggtttgatgtcaaaaccagcagccagcatcctgtcacggaaataattcacattatccatcaacttagtatgcaaggcatcactttccttcaacatcttaaacatttccaagctagcaccgataatggcaggagctacagaattagagaataaataaggacgtgaacgctggcgcaacatatcaataatttctttcttaccggtggtaaatcctcccattgccccaccaaatgctttccctaatgtaccagtaaaaatatccacacgaccgtatgctttaaattgttcggccacgccatgccctgtaggacctactacaccggccgaatgagattcatccaccattaccaacgcgtcatatttttccgccagttcacaaatcttatccaatggagccacattaccatccatcgagaatacaccatctgtagcaataatgcggtgacgctgtgcctgcgcttcctgcaaacaacgttccaagtcagccatatcagcattagcgtaacgatagcgttttgccttacacaaacgtacaccatctataatagatgcatgattcaacgcatctgaaataatagcgtcttcttctgtaaacagcggttcgaacaaaccaccgttagcatcaaaacaagcagcataaagtatagtatcttctgttttaaaataatcagaaatggcagcttccagctgtttgtgtaaatcctgagtcccacagataaagcgtacggaagacataccgaagccatgtgtatccattgcctctttggcagcattgatcaaacgttggttatctgacaaacctaaataattgttggcacaaaagttcaacacatcttctccgtcattcaccttgatgtctgcacgctgaggtgtggtaatgatacgttcatttttatacaatccggctgccttaatatcagccagttccttcgcaaggaactccttcattttaccatacatagctttgtttttttattaagtatatagtttaagtttaaaaatcagtctgacttgacaaagttcttatttttttttgatatccaattaaattatagagaaaattttgataaaatatgcagttttctatctatctttgcttccaaaaggaaacttaaagcaaatagcaaactatgaaaaatgtattaattatcggctccaccggtcagatcggttcggaactaaccatgaaattgagaagtatttacaatggtaatatcgtagccggatatattcccggtgccgagcctaaaggggaattaaaagaatcaggcccttctgccatcgtagatatcaccaatgaacaacaaattgccgaaactgtatcaaagtacaacatcgacaccatttacaatctggcagccttactctcggctgtagcagaagccaaacctcaactagcatggaaaataggcatgggaggcctgtttaatgtattggaagtagcacgcgaaatgggttgtgccgtatttaccccaagttctatcggtgtcttcggtaacaacacccctaaagacaagactccacaagacactatccgtaatccgcgtaccatgtatggcgttacaaaagtatcaggagaattactgagcgattattaccatatccgttttggtgtagatacccgttccgttcgtttccccggattaatttcgtatgtcacacctccgggtggcgggaccactgattatgctgtagacatctattattcggctgtaaaaggtgaaaaatttgaatgtcctatcgcagccgatacattcatggatatgatgtatatgcctgatggtttacgtgcagccattgaaatcatggaagcgaatcccgacaaactaattcatcgcaattcgttcaacattgcttcaatgagttttgatccggaaattatttataataatataaagaagtatatgcctgacttccatatggagtacaaagtagatccactacgtcaagctatcgccgaatcatggccgaactcactggacgacacttgtgcccgtgaggaatggggatggaaaccggaatatgatctagacagtatgacacaggatatgcttgccaaactaaaagtacgattcaataaataa

SEQ ID NO: 307 - DNA, 5536 bp, unidentified
  source 1..5536: mol_type = unassigned DNA
atgacaaacgggaaacagaggcttacacgcccacgcaccggaagaatgattgccggtgtgtgtgcggggcttgcagacttcttcgggctcgacgtgtccttagtacgtatcctttatgtccttgcaacggtctttaccgtattttcaggtgtcattatatatattatattactgattatcataccagaagaacccaatagattgtatcaaaatgattaaagtaggaatcatcggcggagccggatatacggcaggcgaactgatacgcctgttgctgaaccacccggaagcggaaatcgtattcatcaacagctcgagcaatgccggcaacaaaattaccgacgtacacgaaggactgtacggagaaacggatttagtatttaccgacgtgctgccgttggacgaaatcgatgtgcttttcttctgcaccgcacacggcgataccaggaaattcatggaaagccataatgtgccggaagagctgaaaatcatcgacctctccatggattaccgcatcaagagcgacgaccacgattttatctacgggctgcccgagctgaaccgccgggctacctgcaaggcaaagcatgttgccaaccccggttgtttcgcaacgtgcatccagttggggctgctgccgcttgccaagcacctgatgctgaacggcgacattacggtaaacgccattaccggcagtaccggcgcaggtgtcaagccgggggcgacgagccacttcagttggcgcaacaacaacctgagcgtgtacaaggctttcgagcaccagcatattcccgaaatcaggcagtcgctcaaacagttacagaacagcttcgactcggatatcgacttcataccctaccgtggagacttcccccgcggtatttttgccactatcgtggtaaagaccaaagtcgcgttggaggaaatcgtccgcatgtacgaggaatactatgccaaagattcctttacgcacatcgtggacaagaacatcgacttgaagcaggtggtaaacaccaacaaatgccttatccacctggaaaagcacggtgacaagctgctcgtcatctcttgcatagacaacttgctgaaaggggccagcggccaggccgtacataacatgaatctgatgttcaacctggaagaaaccgtcggcttgcggctaaagccctctgcattctaaataaagaaccgtatggtaaaaaacaatttcgtattatgaaactattcgacgtatatcctcttttcgacatcgatattgtcaaaggaaagggctgccgtgtatgggatgacaagggtacagagtacctcgacctctacggcggccatgcagtaatctctatcgggcatgcgcatccgcattacgtggagatgataagcaagcaagtagccacgctgggattttattccaactcggttatcaacaagctgcaacagcaagtggcggagcggctgggaaaggcctgcggctacgacgattattccctgtttcttatcaacagcggagccgaggccaacgagaacgctctcaaactggcttctttctataacgggcggacgcgcgtggtatctttctcgaaagctttccacggacgtacctcgctggcggtggaggcgacggacaaccccaaaatcatcgctcctatcaatgcctgcggacatgtaacctacctcccgctgaacgatacggaggccatgcaggcagagctggctaaaggcgatgtatgcgcggttatcatcgagggtatccagggggtaggcggcatacaattgccgaccgacgaatttatgcaagccttgcgccaggcctgcaccgaacacgataccgtattgattctggatgaaatccagagcggttacggacgcagcggcaagttcttcgcccaccagtacaacggtatcaaggccgatatcatcacagtggccaaaggtataggcaacggtttcccaatggcgggcgtgcttatcagcccgatgttcacccccgtctacggacagctcggaaccactttcggcggcaatcacctagcttgtagcgcagcgctcgccgtactggatgttatcgggcaggaagggctcgtggcgaatgccgccacggtaggcgcgtacctgctggatgaattgaggcagttcccgcaaatcaaggaagtgcgcggacgcggcctgatgattggactcgaattcgaggagcccgtcaaggagctacgttcgaagttgctgaaagagcagcatgtgttcaccggtgtgagcggtacgaatgtgctccgcctgctgccgccgctatgtctcggcatggacgaagccggcatgttcctggagcgttttaagaaagtactttgatatttgaaagataatcagccggcaaaagagacgaccgaaagaagaataccttcctgtttcggtcgttttttatagaaattctttacctttgcccgaagacaacgtttttaaaaggaaaatgatatgaaaacagcaattatcggtgcaggaaatatgggcggctctatcgcccgcggcctggccaaaggtactatcataccggccggcgacatcgtcgtttctaatcccacgcagggcaaactggatgcgttgaaagcagagtttcccgccctgcaaaccacccgcgacaaccaggaggccgttaccggagccgacctcatcatacttgccgtcaagccgtggctcatcaagagtgtgctgcgcgagctgaagctgaaaagcaggcaaatcattatctcggtagccgccggcatcactttcgaggagctggcgcattatgtagccgaaccggaaatgactatgttccgcctcatccccaacacggctatcagcgaaatggaaagcatgacgctcatcgcaagccgtaatgccgacaaggaacaggaacggttgctgctcgacattttcaaccaaatgggtcttgccatgctgattcccgaggagaaaatagctgcggccaccgccatgacttcctgcggcattgcctatgtgctgaaatatatccaggcggccatgcaggctggtatcgaaatgggtatttatcccaaagacggcatgcgcatggtagcccagtcggtaaaaggcgctgccgagctcatattgaacaacgatacgcaccccagtgcggaaatagacaaggtgtgtacccccggcggcatcactatcaaaggtatcaacgagctggagcaccggggattttcctccgccgttatcaacgccataaaagcaagcaaataacccaacccaccacttaataataattccatggacgaacaaatcaaacaaatagccgaacgcctgcgcggattgcgcgaggtactggaactgactaccgaggatattgcccgcgattgcgacatctcggcagaggaataccgtcttgcagagaccggagaattcgacatctccgtgagcatgttacagaaaatagcccgtcgctacggcattgcgctggatgccctgatgttcggcgaggagccgaagatgagcagttacttcctgacccgtgctggaaaaggaaccagcatcgagcgtaccaaggcctataaataccagtcgctggccgccggcttcatgaaccgcaatgccgacccgttcatcgtgaccgtagagcccaagcccgacagcgagccgatacattacaacagccattcgggacaggagttcaaccttgtactggaaggacgtatgatgctgagcatcgacggcaaagatttgattttaaacgaaggagacagtttgtatttcaactccaagctgccgcacggcatgaaagcgctggacggaaagaaagtgcgtttcctcgccgtaatcatgtgataaggtgatagcatttccttatgctgacacattaccacgctgacccattatcacttttttaattatggtagaaagatttttatcgcagacgtccttcacatctcaagaggactttatcaagaatttaaagattaacgtaccggagaacttcaacttcggctacgatgtagtagatgcctgggctgccgagcaacccgacaaacccgctttgctctggaccaacgacaagggcgaacagatacagttctcatttgccgacatgaaacgctatacggacatgacggcctcttatttccaaagcctcggcatcgggcacggcgacatggtgatgctgattctgaaacgccgttacgagttctggttcagcatcatcgcgctgcacaagctgggcgctgtcgttattcccgccacgcacctgcttaccaagaaggatatcgtatatcgttgcaatgctgcggacatcaagatgattgtctgtgccggcgagcctgtcatcaccgaccacgtcaccgccgccatgccggagtctccgagtgtggagaagctggtcagcgtcggtccggaggtagccgaagggttcgaggactttcacaaaggcatagccggcgccactcctttcgcaaggccggagcatgccaacagcaacgacgacatctcgctgatgtacttcaccagcggcactaccggcgagcccaaaatggtagcccacgacttcacctacccgctggggcatatcgttaccggaagtttctggcacaacctgcacgaaaacagcctgcacctcaccattgccgataccggttggggcaaggccgtatggggcaagctctacggacagtggatagcgggcgccaatatcttcgtgtacgaccatgagaagtttacgcctgccgatatcctgacgaagatacaggactatcgtgttacctcgctctgcgccccgcccactatcttccggttcctgattcacgaggacttgacaaagtacgacctttcttcgcttcaatactgcaccattgccggcgaagcgctgaaccctgccgtgttcgacactttcaagaagctcaccggcatcaagcttatggagggcttcggccagacggaaacgacccttaccgtagctaccatgccctggatgcagcccaagccgggcagcatgggactgcccaacccgcaatacgacgtagacctgatagaccatgacggccgttccgtagaagccggtgagcaggggcagattgtaatccgtacggacaagggcaagccgctcggcttgttcaaggaatattaccgcgatgccaaccgtacccgcgaggcatggcacgacaatatctattataccggtgatgttgcctggaaagacgaggacggctacctgtggttcgtaggacgtgccgacgacgttatcaagagcagcggctaccgcatcggcccgttcgaggtggaaagtgccctgatgacgcatccggcggttatagaatgtgctatcaccggagttcccgacgaaatccgcggacaagtggtgaaggctactatcgtgctgtccaaggagtacaagaaccgtgccggcgaggagttggtcaaggagttgcagaaccatgtgaagaaggtgaccgctccttacaaatatccgcgcgtcatagaattcgtagacgagcttcccaagactatcagcggtaaaatccgccgtgtggaaatccggaagaacgacgagaaataa

SEQ ID NO: 308 - DNA, 6813 bp, unidentified
  source 1..6813: mol_type = unassigned DNA
atgcgtattattttctgtctgatggttttcttgttcataggaaagaacacgatgctggcacagcagctgtcctcattcgtagaatatggagcagccctgcataccggtgacaatactcctctttggcaggtcagcaaccagcaaggactcacttcgctcgacaacaatacttacatacgtggaggaatatcctacaaacaccaacttggaaaatggaagtttgaagaagcactggatttggttgcagcagccggattcagcacgacctccttcattgtacagcaggcttacgtagacatccgttacaagtggtttggattctttgccggaagccgggaacagaattctccattgctgaatcaagagctgagcagtggcggcatgacctggtcgggtaatgcgcgtcccatcccacaagtacagataggcatacccgagtatgtacagttgctaccccgtttaggcctgaaaggagaaatctcgtacggatggtttacagataacaaataccagcgggagcaagtcggagaaaaatactggtacaccaagagtatcaaataccatcataaagaagggttcctgcgtatcggtatacccaaaggaaaatggcaactggaactcggaatgaccctcgacacccaattcggaggatacaagattggaggttccgaattaggagacttgggcaacggatggaaggattacgtacgcgtattcttccccggccacgggcgtgaggacggaccggtaggtgaacatctggctttccaaggcaattttctgggtagcgaatatatcaaaatgacttatcgtcctaaggaagatttctccatcagcgcctatctggacaatcattttgatgacttctccgccatggccaaactcaacggttgggatggcttatggggtgtggaatataaatccaaccatagacaagccatcaacggaatcgttatcgaatatctccagactaccaatatgagcggtccactgcacggtttgcaaaattctgtagtaggtaagaccggaggagccgacaactactacaacaacggttactacccaggatgggcacattggggtatggcgatagccaatccgttgatagcatcgcctatctataataaggatggcgatatgagtttcaagtacaatcgcgttaaggccctgcatctgggatggagcggcgacatcagcagtgagtggagatatgtggcaaaattgtcccacaacagaacttggggaactcctcatcgtccaatacccgatatattagaaaatttttctacttttgcatcgttttactatattccccgtaaatggaagggctggtgcttcaacgcgtcccttgcattggatatgggagagatatatggagacaattttggattccaactgaaagtacataaaacattttaagaaaatgaactacatacaaacagagattgacggcgtatggctgattgagccgaaagtattccatgatgcccgcggatactttatggaagcatttaaggaagaagagttccgtgcacatgtcggaaacgttcacttcatccaggacaatgagtccaaatcctctttcggtgtattacgtggtcttcattaccagaagggtgattgcagccaagccaaactggtacgtgtcattaagggaaaagtgctggacgtggctgtcgacttaagaaaatcttctcccactttcggaaagtatgtcagtgtggagctaagtgaggagaacaaaagacaattcttcattccgcgtggttttgcccacggttttctggtgctgagcgatgaagctgtctttacatacaaggtagacaacgtatacgcaccacaatccgaggcatccatccgttttgacgacgaaaccatcggtattgaatggcccgttgctacggaacagcttctattatcagataaagacggacatgccgtatcgttcaaggatgcggtctattatgaataaaatatgaaaatagccattgtcggtacaggatacgtcggtttggtaaccggaacctgctttgcggaaatcggtgtcaacgttatttgcgtagacacgaacagtgaaaagatagagtcactgaaaaagggtgttattcctatctatgaaaatggactggaagaaatggttagccggaatgtgaaagcaggacgcctgcaattcaccacgtctctggagagttgtctgaatgaggtggaagtggtattcagtgccgtaggtacaccacccgatgaggatggaagtgccgacttgagccatgtgctggaagttgcccgcaccattggacgcaatatgcagaaatatgtgttggtggtaaccaaaagtaccgttcccgtaggtactgccagaaaagtgcgggctaccattcaagaagaacttgataagagagggatgaacattgacttcgatgtcgcttcgaatcccgagtttctgaaagaaggtaatgctatcaacgattttatgagtcccgaccgtgtagtggtgggagtagagtccgaacgagccaagaagataatgagcaagctctacaaaccattcctgctgaacaacttccgtgtcatctttatggacatcccttctgcagaaatgacaaagtatgcagctaactccatgcttgccacccgcatcagcttcatgaacgacattgccaatttgtgcgaattagtgggagcggatgtaaacatggtgcgcagtggtatcggttcggatacccgtatcggacgcaagttcctctatccggggataggttacggcggttcatgcttccctaaggatgtaaaggcactgattaaaacggctgaactgagcggctacaagatgcgtgtactccatgcagtagaggaggtgaacgagaaacagaagagtatcttattcgaaaagttgcagaagcatttcaacaatgatttggagggaaagaccattgccatttgggggctggcctttaaacccgaaacagatgacatgcgtgaagccccggctctggtattgattgacgagttgctgaaggccggttgtaaagtacgtgcctacgacccggctgccatgaacgaatgccgacgccgcataggagaaagtatttattatgcgacagatatgtatgatgctgcgctggatgcagatgcactgatgctggtgaccgaatggaaagaattccgcctgccttcatgggcagtcatcaagaaaactatggagcagccgttggtattggacggacgtaacatttatgacaagaaagatatggaagaacaaggtttcacatatcattgcatcggaaaataaagttgcagaaaaaagaaaagaaataaatagggacgttatgacaataaaaggaagtgcgattctcattgtacttgttgtctcattggcctcatgcagcaacagacaaacaggagaggtttccgtaaaggaagacctcattgcaaaacaactgttacaaggcatctgggtgaacgatgaaacagaaatgccgttgatgcgcatcgaaggggatacggtatattatgccaacccgcaaagcgctcccgtacctttcaaggttgttcacgatacaatctacatatacagcaatgaaccggtggcctataagatagaccgtcaaacggaatacagcttctggttccactcgctggccgacgaagtaattaaactgcataaatcagagaatgcggaagattctttggttttcaccagtcgagaagtggaggtcatttctactactccggaagtgataaagaaagacagtatcgtaacatacaagaatacaagatataggggatatgtatatatcaacccctcaaagatgaaggttttcaagacttcctattctgaaaatggaatcagtgtggacaatgtgtattatgataatgtaatccacatctgtgtatacgaagggaagaagatgctttacggccaggacatcaccaaaaagatgtttgcggatatattccctgccgaaatactgaatcaggccattcttgccgatatgaacttcatgggtgtggacagtaaggggtaccattaccaggcaacccttggcatacccgaaagctccgtatacagtctggtaaatatgattattggttttgactgtacaatgagcatagaaaaagcggaataaatccgctttttctatgtcttttcttcaccacaccacagtgtttatttcttctcaccgccattctgtggccgtttggcactgggctttccgcctttattgttgttacggccattcttatttcctcctggcctacgtccgtttccatggccgccccgtcttcctccgtcaaatgctctcggcttgtattctggtgcttcacccagctcttcgggaaccggtatcttatagatatccctatccaggaatttttcgatatttttaaagttaccctgctccttttcggaaacgaaggtgatggctacgccgtcattattggcacgcgccgtacgtccgatgcggtgcacataatcttcactgtcgtggggaacgtcgtagtttatcaccagacggatgtcatcgatatcaatacctctcgcaacgatatctgtggctaccaggatattgatacgtcctgccttgaactcatacatcacttcttcgcgctgtgcctgctccaagtcggagtgcatttcaccaacgttcagtttcatctgcttcaaagctttggtcacttccttcactttcagtttggaagaagcaaagatgataacgcgttccggcgtctcctctgcaaagaggctacggatgatgcccagcttctgattctcgtagcagacgtaggctgcctgcacaatcttttctgccggtttggaaacagccagcttcacctcggcaggattgttcagaatgttaccagccaactgttgtatcttagcaggcatggtggcagagaacatgattgtctgccgctctttaggaaggaatttgacaatttgcataatatcgtcataaaatcccatgtccagcatccggtctgcttcatccaaaataaaataagagacacgggaaagatctacataaccaaggctaagatgggctatcaaacgccccggggtagcaataacgacatcagcacccagtgtcaaccctcttttctgctgctcgaacagtattccgtcattaccgccatacacagccacgctggaaaccggcatgaaataagagaaaccttccatctgttggtctatctgttgcgccaactcgcgggtaggagccatgacaatgcaattgatggcatcggcagggtgtccgccctctgaaagcttgttcaatataggcaacaaatatgcggctgtttttcccgttccggtttgtgccactgctattaaatctcgaccttcgagtatgacgggaattgatttttcttgtatgggggtgcactcttcaaagcgcatggcatccagtgcctccagcacatcgccatttaaatgtagttctgaaaacttcatgtatctcttttaaatttgcgtacaaagataggaaaaagacttataaaatagactcttacagtaaaaaaataagcccttgggacaataattatctcaagggcttgcaaatttgtttcaagcatctgccttcaacggggaatatcaatgtatgaatccttaaatcccagaaagtaaagtacgccatctaagccgatggtgttgatggattgcttggcattggcaactactttgggctttgcatggaaagcgattccaaggccggcaattcccagcatgggcaggtcgttggcaccgtcgcccacagcaatagtctgcgcaatatccactttctccacctgagctatcaaacacagcaactctgccttacgcttaccgtcgactacatcaccgagatagcggccggtcagtttgccatcctctatttccagctcgttggcatacacatagtctataccgtacttcttctggaggtactgcccgaagtaggtaaaccctcccgaaagaatagctatcttgtaaccgtatttcttcaaaacatacattaggcgatccacaccttccgtaatgggaagattttctgcaatctcctgcatcacggactcatccaatcctttcagcaaagccactcgttcgcgaaagctctcaatgaaatctatctcaccacgcatggcgcgttcggtaatggccttcacctggtcgcccacacccgcacgtatggccaattcatcaattacttctgtttcaatcagcgtagagtccatatcgaaacaaatgaggcggcgcatccggcggtacatattgtccaactggaaagagaaatccatttccagttcggttgccagtttcattaactgttcttgcatggcaatacggtctttcggagtgccacgaacggaaaattcgatgcaggcgcgtgtacgcgattcgcattcgtccagcgggatacgtcctgtaaggcgcttgatggcatcgatattcatgccttgctctgcaagaatacgggtaacggcagatatttgacgggcagacaacttacgccccaataaagtaagaatatagcggttctttccctgcatattcacccaatcctcgtactctttggtagtaatggggtagaaacggacagtcactcccagggaggaagccttgaaaagcagttccttcataatgaaccccgagtgttgttcttccgtcttgcacaaaatgcccaacgaaagagtattgtgaatatctgcctggccaatatccagaatggtagcatcatatttcgccagaatttccgtcacggaagctgtcagtcccggacggtcttcacccgtaatacgtatcaggatgagttcagtgttcaatggttgcat

SEQ ID NO: 309 - DNA, 13466 bp, unidentified
  source 1..13466: mol_type = unassigned DNA
atggagaataatcccgaaatagcgcttgcatggcaattcattgaaaacacaggcactcatctttttttgaccggcaaggcaggtaccggtaagacaactttcctgcgaaaactgagggcggagagtccgaaacggatgattgtacttgcaccgacgggaattgccgctatcaatgcaggcggtgtcaccatccactcctttttccaagtaccttttgctccttatgtgcccgaaagctcattcagcgcagatggcaaggcaacctaccgttttcgttacgggaaagagaaaatcaacattatacgcagcatagatttattggtcatcgatgaaatcagtatggtccgtgccgacttgctcgattcggtggatgccgtcttgaggcggttccgcgaccggaacaaaccctttggcggcgtgcaactgctgatgattggcgacttacagcagctgtctcccgtagtgaaagacgatgagtggcagatgctgcgcaaatactatgacacgccttatttcttctccagccaggccttgaagcagacggaatattgcaccatagaactaaagaaagtctatcggcagaacgatgggacttttcttgaattactgaaccgcattcgcgaaaaccgttgtgacgggcaagtgctggaagccttgaaccgccggtatattcccaatttcgtaccagataaagaagaaggatacatccgcctggtgacccacaattatcaggcccaacggattaatgaccatgagctggaacaacttccgggacgctcgtatgcctttcgtgccaagattgacggaaagtttcccgaatattcctatcccacggatgaagtactggaactgaaacgcggtgcccaggtaatgtttgtgaagaacgacacctccggtgagcaccgttactacaatggcatgattggagaggtgacagccgtgtcggcagatggaattgaagtgcgcagtaagggaagcgacgctaccttcttacttcaggaggaagagtggacgaatgccaaatacgtgcttgatgaggaaaccaaggagattacagaagatattgaaggaacattccggcaatatccgctgaagctggcgtgggcgattaccattcacaaaagccagggactgacgtttgaacgtgccgtgattgatgccggtgcctcctttgcgcatgggcagacctatgtggctctgagccgctgcaagacattggagggagtggtgctcagtgccccgctttctgcaaaggccgttatcagtgaccatgcagtagataccttcacgatggaggcacggagaaacgagccggacgagaaacgcttccgttccttgcagcagacctatttcctggaactgctgtcgggcttgttcgatttccagcccatggagcaggctttgcggcggtatgtgcggctgatagacgaacacttgtacaagctctttcccaagcaactcgcagcctgcaaggaggaaatggaacgttttcacgacaaagtgacgaaagtagcccagaagttcagtatccagtatacccgcctgattgatactgcgcaggactatgcagccgacccgactttgcaggggcgcatacactctgccgccacttattttcaagagcagttgcaaccgctggatgcggtgatggcgagtacggtaacttctgataataaagagttgaagaagaagctccgggatgccatggaggaactggaggaagtgtttgacatgaagactgatttgctggattatgtgctggagaatggtttccatatggcaggatacttgaagcagaaagcactgctttccattgatgattcggcttcgcagaagggtaaaggcaaagggagaagtgcttctgccaaagaagggcagggaagcagtaagcaggctgataaagagaaacgtccgcgtgagcggaaacgcgatgctgcggctgttgaagtacccacggatgtgctgcatccggaactttacaaccgcttggtagcatggcgcaatgcagaagcttccgcattagggctgcccgtatacaccgtcattcagcagaaggcaattctaggcatcagcaatctgcttccttcggataaggccatgcttgtacgcattccgtatttcggaaaaaaaggggtggagaaatatggagatgtgattctggagatggtacgtgtgtatcgcaaagagaaaggactggcagagccggagttgctgtagtcgaatctcctgccatccgcacctgcattatttaccatccgaacatcagctttattccttcctccagcgtatacggttgataccccagttcccggtgtgccttttctatactcagcccgctgaaacggggacgtggtgtcttttcgttcatttccttcgtggtgacgggacggatgagcgagcgattcagccccaatacgtccgctacccgataagcgatgtctgcaatggtcaggcactcgctgccacagagatgatagataccgttttgcggatgacttatcagcttctccactccttgcgacacgtctcccacgaaggtgggcgtacgccattggtcggatacgacgaacacttcctcattgttccttaatctgtttgccaccagttggagcacatttccatgctgtccgggcagggcggcaccgtacaccaccactacgcgcacgatggcataatccctgcaaacggcagcgatacgtttctcaccttccagtttggtgtagccgtaataattaacgggagcgggaatatcctcctccgtatagggtcggtccgtatcaccaccgaaaacgaagtcggtggaaagatggataaaacggctgcctcccgcctcacagcattctgccagatgctccacggcagtaatgttgacggcatccgcttctgcatggtgcgtttcgcaataatcggggacggagagggcggaggtattgattacaacatccggctgtacttcctggaaaagctttttcaccgcctggcggttgcatatatccgtacggataaagcgatagtcgcccgaatggggacagatgtcgtcgtgcagggaacagcccgttgtctgataaaacacgttgtgggacaaatcatccaggatgcgtctgccggtaaaaccgttggcgcctattaccagtattttctttcttgtcattgattctgttgttaagtgatgggcatcaatagggcacgtgtctgccctgctgtacctcgatgcgtatgccaaaggctccgttggctgatttcagctcgaacgcccctttgaaattgttcttttcccaaggcagtgcggaagggttgggtactttccagccgtccttgtcatattcgccgtacgtatggatgcgcatgccgttcttcaaagtgaaacttcccatttgcaggttgtcggtagagccccagaagcccgtcagtccgaagggattcgaactgaaataccgggagttgctgagtgagaatatgttcgaaagaccttgtgaataagtcacgttcgggttcaactggaagatgcggctatagtctttgctggcatccggtatctccaaagtgaatttgggaagagtgggggtggacagattcatcagccccatatccagcaggaagccgtcgtaattcttcacgcccggcagaagctccttttcagacggagacatgccttcgggagacgcttcgccacgtactgcagtacgtaccgtatcggcaggcatctcgctctgtgcgctgacggatgacatgcctgcaagtaaaatgatgatgcagaagaagattcgtttcatagttctttgttcacaatttcagttgctgtctgccgcataggggcagactgaacaaagatactcgtttccctctatttccggaaatatctttgtattatttctatttctttatacgaatggtaggggcgaaaatgggcgaatttacccatttcattttggtggggtcgtatcttcgttccatccctccgttgaggtcgagccagtccgtcactttcagttccagtaccatgccataaccgctttgcggatacatcgggttcatatatccatgaaaggagttacttctcccgtagcccgaatactggccgaaggcatgcaggcgcatgtagggattgatgcggtaggatacggaggcattgtagcctatgtcccattgagtacctcggggggcatcccttttggcatactgggcaccggtaatggatgaaggttgggagatggaatagtgggcggcatatacccctccgctcaattcccaatgtccgtcgggactgtaataagtgactcctgcgccagcctgcatgatggagcccattgcaggataggtgttatggctgccgtacatcgtcagtacgacttccggcgagagcaggaaatcggcgaaacgctggaagtcccattcaaagatgtttttctgaaagtgtatcttcttcatgtccgtccagggcaggggctccacatagtcggagggagggagatggagatttatctcttcctgctgttcgccttgcagactttgttggggctggctttcatcaaggcccgtacgcttgttctcttttggagaaaagggaatctgctctttctttacgggaggccggttctttattgtgtcttccggaatctcgctctgtgcataggcgcagagtgaggaacagataaaagtaatgaataataactttttcataaatagtagtttagttttagtttagttcactattagtttatatcctattccccgcacattgacgatacggatgcgctcgtctccggccagtttatgccgcagtttggtgatgaacacatgcaggctgcgggagttgaagaagctgtcgtctccccagaggtcgagcaatacattctgggtgttgaccacctggttacggttctcgcaaagacgtttcagtatctcggactcgcggtgggagagttccacttccgtatccgcgttaggtgaagtcggggtgcctgcaaaagcaagtcgttgagtgacggaattgaaacggtagtcaccgatttcaaaaacggtagtttctttgggcttttcctctgtaaaggagaaagctttgcctaccagggcctttatgcggataatgagttcctgcattccgaaaggctttttcaggtagtcgttggcacccagctcaaacccttccaccacatcgttgatggtggagcgggcggtaaggaacagtaccggggtctgtttgtcggtctgccggatgcggcgcaccatttcaaagccgtccatgcggggcatcatcacgtctgccaccagcacgtcgggacggaggtcgaagaacttgcgcaatccctcttcaccgtctgctgcggtgtggatgatgaagttctgcccttccaatgtgtccttgataatcatggcgagggtctgttcgtcctcaaccagaagtacggttatcttttccataattgtcgcttttgttacaagtaatgtaaagctccttaacaagtaatgtaaagtaccctaacaaataatgttatcatatccttatcgtaaaggtacttccttttcccaactcactctttaccgatacgctgccaccatgcttctctatcatggtcttcacatagaacaatcccagcccatagcctttcacatcgtgcagattacccgtgggtacgcggtagaatttgtcgaagatgtgcttctgcttctcgggagcaataccgataccgtggtcgctgacagagatttcggtctgttcattctgcccttcgacggccatcttgcggcaatggatggtcacttcggcttctccgtgcgaatatttgatggcgttgtctatcaggttgctgatgatgttgctgaaatgcgtacggtcggcaagtacgctcagatcttccggttcgatgtccaccgatatgtggacggagctttccgctttcagcttgtgttgttcgatgagcgtttccagaatatcacgtattgcaaactcctccgggtgcaggcggaaagtcctgcggcgttccatactcatggaaagtatctgttcaaccagtccactgaggcgctgaagctgttcctggcagatacgcaggtatttgccgcgttgggccttttcctccgcttggttgaagttgagcagagcgtcgttggcggcatatgctacggcgatgggggttttcagttcgtgggtgatgttgttggtgaaatcgctcttcatctcttccagtgtcttctgtttcaggatggtgcgtatcaggaaccagaaggagaaagcgagtacgatcagaataacgaatgatgtggtgagaatgcccgacatctgtcgcaagaccaacgtgccggccggttccatgatgagacggtagctttgacttgtattgatgtcgaaagaataattatattccacggcttttgaggtaggcacatagccgggggtaccgatgtttaccaatgtatctatatagagaatggtagagtcccatttgctgcctttgtgaagatgtagcagcctatggggaagattgatgttacggtcatgcaggaatgaagtcagcaggctgtcataaagcagtacgtcggggtcggaaatgatgtccagtcccgaatgcagtccgcgctggaagtaggtggcgagttccagcatactgttttggtcgcgcaaaatcacatccagtccccctttggcactcaatgcggattggggagagctgtctgagtccctgacactgacttccacgcgggttgaatcgttcgggtgggtcacgtaaacactgtctcctttgggcatgaaggtttcgtgcagggtggtgttgtccaaagaatcttcacgggagatggtggtactgctacggacaaatgattttccgtcatcgctgtatccggctgatacgctgacttcaccgtggtttatgtcgtcctgcttcattttatccacgcgtatcatcatttcgttatagtcgctcatgcgcatggcttcggtgatgtccctttccatttcactgtgcatggtatggtagagccccgtcagccagtaggcttggtaggcgaagatgccggccagggagacgatgacaagtatggcaatatatttgaatggcagtttcatgtttgtttccggttacttttatacatacaaaggtaagattaatattgtgaaccctatcatccgataagactaaataacactcccgataacactggataacacttggtaagccgctgataacacaagtttctgctgattctgccgtactttgcagacgaagatttgcagaagaagaatataaacataaataaaaagaaggacatgaaacgattctatttactccctattgtatgctgtgctttgagcatcagcctttcggcacaagagaacaacggcactgcaaccacctccggtgcggacgacaaccgcatcctcagcgccgacagccttatcacgaccgatgcccgtctggacagtctttatcagaccttgccggaagtgatgattaccggtgaacgccccatcgttaaggcagcgcaaggcaagctggtgtacgacctgccccgccttatccagaacctccccgtagacaatgcctacgatgccgtgaaagagcttcccggcgtcatcgagatgaatggagggctgcagttggcaggtcagggagtcaccgttatcctggacggcaaagtaaccaccctcagcacagagcagctctattccttgctgcgcagcatccctgccagccgcatagagaaggcggaagtgatgtacaacgcccctgcacgctaccaggtgcgtggcgcacttatcaatatcaccttgaaacaatcggtaggcggccccggctcctggcaaggcgaactctatgccaagtatcgccagaagcataacgaaggctttgaggaacgcgccagcctgctcttcagcaaaaataaattctcagcagattttctttactcgcacagccatggccggggctactctactaccgacaaagaggctgtgcacaccctggcagacggctcggttcaccccatgacaacatatgaggtgggccgtggccgcagtcatacccataatttcagggtaggggcggactataacatcgccaaggaccatcagctgagtttcgtctataacggtggctattccacctcccacaactggaagggcgtgacgggcacgcaggtgtccacaactcatggcaatagcaccgactggctgcacaacggccgtctggactatcgtacccctttcggcctcaaagccggtgccgaactgacctactaccgttccccgtccgaccagttgctgcatagccgcatgcaggacgaggaactcgacttctacaccgaagattgccaacgtatcaaccgatggaaattctttctggcccaggagcacagtctgggaaaaggttgggatttgaattacggagccatctatactaccagcatcgacaacagctaccaatattattatgaccccgaaaccggcggacaactgacctcatcggatgccttgagcaatatgaagtcccgccgccgcgagcagacctggaatatctatgcaggttccagcaagagtttcggcgacaaactcgctttggacgcttccctggctgtggagcattacaagactcccgtctggaaccagtgggactggtatcccatcgtcaacttgaactatatgccgtcaccgggacatatccttcagctctctctgagcagcgacaaggactatcccgactactgggcggtgcaggatgccgtctcttacatcggtggcggatactctgagctgcatggtaatccgttgctgaaaccggcgcaagagtatgagcttaaaatgacctatattttgaagagcaaatacatcttcagcgcttggttcaaccataccaaggactactccgtacagacgctctaccaatcttccgaacgtctggttgaaatctacaagacactcaattttgattatcagcaacaagcaggtatacaagcctctatcccgtttaaggtgaaggattggttgaattctcgccttaccctcatcggcttgtggcatcgcgaaaaggatggtgatttctgggatattcctttcgacagaaagcaatgctatggcattgcccagatgaacaatacttttactctctccaccaaacccgacttgaagctgacggtgaccggatttgtgcatagtaaagccattcagggcatctacgacctgcctacgtcgggcaatgtgaatattgccctgcgctacggcttcgccaagaacaaagccattctcaacctctattgcaacgatatttttgagacgggacagatttctccccgcatccgtttcaagacgcagaatgtgacgaatcattactcatgcttccgcgaattcggcgtatcgtttacttataaattcggtggatataaggagaagcaacgggaggcggtggatacgtcgcggttcaaatagatagaagatgcaggtggtcaggtgaaaatacggtattcttttgtactttgccacatctttcgtacttttgcaactttcaaaacattaaagttgttatttaaagaaaagactctgtatgaaatcggacattgaaatagcccgcagcatagagctgaagaagataaagcaggtggctgaaagtgtggatatcccgcgtgacgaagtagagaactatggccgttacatagccaagattcctacgcatctgattgatgaagagaaagtgaagaagagcaatctgatactggtgacggctatcacggctacgaaagcgggtatcggtaaaacaaccgtgtccatcgggctggcattggggctgaacaagattggcaagaaagcgattgtggctttacgcgaaccctcgttaggtccttgcttcggcatgaaaggcggtgctgccggtggaggatatgcccaggtgctgcccatggagaagataaacctgcactttacgggcgactttcacgccattacctccgcacacaacatgatttccgctttgctcgacaattacttgtaccagcatcaggcggatggcttcggactgaaagaaatcatctggcggcgcgtacttgatgtgaatgaccgttccttgcggagcattgtcaccggattgggaccgagcaccaacggcattaccgaggagtcgggcttcgatattaccccggcttccgaaattatggctattctctgtctggcaacagacctcgacgacctccgtcgccgtattgaaaatattattctgggattccgtttcgatggtactcctttcacagtgaaggagttaggagtagccggtgccattaccgtactgttgaaagatgctatcaaccccaacttggtacagactaccgaaggctctgctgcttttgttcatggaggaccgttcgcaaatattgcccatggttgcaactccattcttgccacaaaaatggccatgacatttggcgattatgtagtgacggaagccggtttcggggctgacctgggtgcggagaagttctacaacatcaagtgccgcaagagcggcctacagcccaagctgacgataatcgttgctaccgcacaaggactgaagatgcatggcggtgtcagtctggaccgcatcaaggaacccaatatggaaggactgaaagagggcttcggcaatctggacaagcatgtacgcaatttgcgttcattcggccagcaggtcatcgtggcattcaaccgttttgccagtgatacggacgaggaggtggaagctatccgccgccattgcgaagaaaagcttgaggtaggttttgccgtgaacaacgcctttgccaaaggaggagagggagccgttgaccttgccaatctggtagtagatactatcgagaacaaaccatccgaaccgctgaccttcacctacgaagagagcgattgcgtggaacgtaaaatagaaaaggtagcctgcaacctctacggggcaagcgtagtgacttacagtctccactcccgcaaggttatcaaactgatagagcagatgggtatcagccattaccccgtctgtattgccaagacgcagtactccttctctgccgacccgaagatatatggtgcagtcaacaactttgagttccacatcaaggatattgtggtcaataacggtgcggaaatgattgtagccatcgccggtgaaattctccgtatgccgggattacccaagaaaccacaagccgaacacattgatattgtggacggaaatatagaagggctgagctaaacgcgcggagcgcgtttagaattaaaaattaaaggctgcgcagttcaaagcgaacattgcgcagcctttaatttttaattcttaatttttaattctgtttgcttatcaataagcaaacagcgggtattctttcatcttcgcatttacgcgtgcacgtacctctgcgatgacttgttcgttgtctacgttggacagaacggtttcaatcatctcggcaatttcgagcatcaggtcttccttggcaccacgggttgtgatggcaggagtacccagacggataccggaagtctggaaagccgagcggctgtcaaacggaaccatgttcttgtttacggtgatgtcggcagataccaacgctttctcggcaaccttaccggtcaaatcgggatatttgctgcgcaggtctaccagcatggagtggttgtccgtaccgccggaaacgatggtgaagccacggtctatcaaggcttgtgccaagacagcggcgtttttcttcacctgcttggcatattctttccattccggttgcaggatttcgccgaaggcaacggctttggctgcgatgacatgttccagcggaccaccttggataccggggaatacggctgaatccagcaactgggacatcatcttgatttctcccttcggagttttcttgccccagggattggggaagtccttacccatcatgataacgccaccacgaggaccacgcagagtcttgtgagtagtagaggtcacgatgtgggcatatttcacggggttatccagttcaccggctgcaatcagtccggcaggatgagccatgtcaatcattaggatggcacctatcttgtccgcgatttcgcgcatgcgcttgtagtcccattcgcgggaataagcagaaccgccgccgataatcattttgggtttctcgcgcagggcaacttcttccatctggtcatagtccacacgtccggtttcctggttcagattgtattcgcagggagtatagataataccggaagtgttgaccagtgagccatgggagaggtgaccgccgtgtgcaaggttcagtcccatgaatttgtcgcccggattgagcacggcgaggaatacggctgcattggcttgtgcaccggagtgcggctgtacgttggcccattctgcgccgaaaatctgtttcaagcggtcgatggcaatctgctcactctggtctactacctcacaaccaccatagtaacgcttgccggggtatccttcagcatacttgttggtgaggcaggagcccattgcctgcataacctggtcacttacaaagttctctgatgcaatcagttcaatgcctttgagctgacgttggtgttctttttcgataagttcgaaaattaaatcatctcttttcattctgcttattagataagtttgataaatctgtgttctcttattaagcgcacaaatttacgggaaataaatgaataaattgaaagaaaaggaagaaatttactgtcaaaagaacactccgaaagaaaaactcagcacattgtccctgcggtgaaaacggatttcgtttttcgtgttttcgtcagcagcgttgttgtcggccggaatatcgtatgtcacgctcttggagatgttatgcagccccatgtcgtaacggaagtcgaaaaagacgcgtgagatggtgacggatacgccgacggtgaaactgagattgagcggacgcagcctttcacggatattcacctggtcgaaattctcgaagtcgatgtcacttttcctgtcccatatatagcgcactttgggtcctccaaagacggcaaggctgtacggcccctccttgatgaagttgtatccgtagatgacggggatgtctatactgtggatggacgatgtaatggaggcttcctccggccgggctcctgatgcggcgtcttcgggcagaggtttctcgaaggtgatgttgcaccggttgatgttgtaggatatttccggttgcaggaaatggcggtcgaagtttatccgcatgaaaagggagccgaaatatcctatcttgtaattgttctgcacttcgtcgatgggcactccgttgacgctgaactgggatacaaggaacaaggaagaggtgaaaccgcctttgaaaccgaaattgaccggagtttccttgcggtgtctggaatgctcttcgtcggcagtaccgggcacaaccggagtctgtccccacatcatggcggggaaggccaacagatataagcccatcaagattcgtcgcaactccat

SEQ ID NO: 310 - DNA, 7803 bp, unidentified
  source 1..7803: mol_type = unassigned DNA
tcagttaattcgatagctgacgaaggctatgcgtttgctgtccggtgcccatgagttgacattgatggtgccttgtccaccgaaaagctttaacaatgtcttgggttctccaccgtttgcgggcattaggcgcagctctacgttcttgtttgccaggtgctctcccggttccaggtcacctttgtagtaggtgatgaatacaacggattttccgtcaggggagatgtgggggaaccaggagttacgggtttcgtcaaaggtcatctgggtctgttcggagccgtctgccttcatgcgccagacttgcatgagtccggtgcgtacggaattgaaccagatgtattgtccgcagggggaatattccggtccgtcatccagaccttcggcagtggtcaggcgggtttcttcacctccttccgccgggatggtatagacgtcatagttgccgtttcgttcggcgcaataggcaagctctttgccgtcggggctccagccgtggaggtagctgggagccataggtgttattaaacggggagtgccgcccgtgatgggaagtgtataaatgcgcgatttatagtcttcttttgtcccgtggctgatggctatctgctgtccgtcggccgagaggacgtggtcgttgttgcagttttgggcaaatccggtgtttatcagttccggttcggcaggcgaggtgggggaaaggcggtaaagctttccgtcgttgttgtatagcagccattgcccgtcgggcgtccaattgggagcttcaatccggtagggaaattcttttacgacggtccggttaccgttagttacatccagtatttcgaggacgctggtaatctcgtttttttgttgagcggttgcggtcagtgcaacagttgcaaagaaggggattagatagggtttcatgttcatatcgtatttaataaatctccgcaagatacattttttattggaaactacatagtcggagcatgcttttttcagagagaatctgtagtgatggtcgaatgcgtagtgcttatcatatgaatagtctccgggattcttgaaatagttgtccacatactgccagttgtcggtgtcgagcggcgtgtgcgaagtcatgtacgatagggagcttttatctctactatctcgctgtccagactaatcaggtctttgcccaagcggacaatgcgggcatcttcgggcatgtagtcggtgccgacttccccctttccgcctccaccgaatgacaaccatcctgtaccttcgtcatctatcacggcacccgggtcgaaaggagccctgcagtggcctaatccttgggtgaactggctcaccagcatacgtcttaccgtccgattccacccgcgatacgatggatggcgcccatgaggctataccccatggcgagagggcctttacgtcaatcagtccgtgataagtccaatttaccatgtcatcggtggacagcatgaccagtgaatgggatgtattggtatgtgtttttgccgtattttcccacactgtccagttgctgggtgtcattggttccatacacatagagccttccgttgtattccaccgatgtcgggtcggccacaaaaatgaaatccaacagcgggttggcgtttccactgaagaattggggtgattctaccggacgcgtgtctttctttcttgaatcggaaagcgcccacacatcatttcctgcggatatagccgccagcagcaaagccgctgtaaataacttgattctttccatttttttatagtatgttatagaaacctatggtagccttttgattttggcttgtgttcttcaatcacctcaatcctttatttaagattgaaaaatcgggttattgaaaagttgccgcaaatattgggaattactatgtataatataaggtgtattatgtttttaataatgtgcctatatgtttcaagttatcattgtaatcagatggtgctgttttaaacttgctttacttgctttgggataattatgcggctatggattaaattgtttggaagggcattgtgttttatgcaaatatattggtagaagagcgtttttttattctaacgattcttgaaaagaaaaagcactgattattccagataatcagtgcttgaatatcgagccgctagccagacttgaactggcgacctacgcgttacgaatgcgttgctctaccaactgagctatagcggcaataagcttttgtttacggggtgcaaaggtacatctttatttgaaaaggcaaaaagaatctctgttttttttagaaatattttagtgggataattttctatttgaatgtcctgaactttattgccataaaaattggataataaaacgaaaagaagcatctttgtcgtaggtcctatagcaaataagtctgatactgattatgaatttaagaatctattataaatatctttcttcacgcatagcgtccaaatggacggtgttgttggtagatgtaattatcgttgtgatttccatgctttctgcatgttttttgcaatataggctttcgtccgtatcttatgaaatttctttgtatgtatggctgaccattttggctgtcttgtgtaatgtctgtttctttcatattctccgtacttatgtgggtgttatccgtttttcctcttttgtggatatttatcgtgtgttttggagtcttacgataagctatgctgtactgtttttagggaattactgttggtctgtttcggggcttggagaaactttgccgaacagcattctgtttatggcatatatgttcaccttctctctgatggcttgtatgcgcattgctgtgaagatgctttatgaagctattgcttttgatgcacgtcattgcgtgaatgtttttatttatggattccatgggactggagtcaatgttgcaaaatccttgagagttagtcgtaataatcattatcgcctgcgtggctttatttcggacgaacctgatatgataggtaaacatacgatgggatgcagggtatatcccaatgatgagcagctgtttgaccgtctaaagaaaaagaaagtggatacaatcattatctctccaagcaaggtgtcggatttggaaaattccggaatgctggataaactgttctctcatgatattcatgtaatgaccgttcctcccttaagcgattgtatggacgatggactgataaaggacattcaaatagaagattggctccgtagagaaccggtacaagttgacgtgcgtaaaattacggcccatatcgaggggcgtagagtaatggttacgggagcggcgggagctgtaggaagggaaatcgtccgccagttggctacactgaatccttatcagttgattctggtagatcaggcagaatccccattgtatgatgtacagttggaattgtctgatcattggaagaatctggaggtccgtgtattggttgcagatgttgctaaccgtacgcgtatggaggctatatttgaagaaacacgtcctcaacttgtttttcattctgctgcgtataagcatgtacaactgatggatgattttgtatcggaggcaattcaaacgaatatatcggggacagtgaatattgcggacctggcggcaaagtatagagtgtcccgtatggttatgatatctgctgctaatgcacgtcatccggagaatgctatggaatatagtaagcgtgtggcggaaatatatgtgcaatcatctgattgcaggttgaaacgcgacacaggggaaactgatatgttcatagtacgtttgggtgaggtgtatccgacgaatactcattgtttgattaccttgtctgaagcttgtatgctcaccctggaagtgggagtcatgggggatgggggagaagtgtacattgtgggagggcctggggatggacttttggattctgtaatcggtgaaaagataaagcgtgaaaaggcatctgttgatgattatgaacatatgcgggaagaagtgctggccttggtgcaacatagttatactgaaaaaaaggctattttgattggactaatgaaaaaaatagtgccaatttttccgctttcttctacccgatgaaaagacgtgaaagtgacagctttttaatgctttttctgaaacttagaggtggaataaatgtatattataaaaataatatattacctttgtgcccgatttatatttattacaagaactcaaaagattaatcagaatatcttatgcgtagattaataacactattctttttggtatttactttgtcaggggtagcttttgctcagcagatgtcagatgatcaggttgttcagtatgtaaaaagcgctcagcagatgggcaaaaatcaaaagcagattactactgaattaatgcggcggggagtgacaaaggaacaagttgaaagaattcagaaaaagtatgaaaactctaaatctggaagtccgcagagcaatacccaagatgagaagcgttctcgtcaacgtggtgaaatgagtggcgtagtcaaagggctgcgtacaacctcggaaacttattctgccagacaaacggatgttgcaggggattctttacaaatgatggataatcgttccttgtctcaaaagaaggaaacagaggatccgacttcgcaaatttatggtcataatatttttactaacgataatttgactttcgaacccaatgtgaatgttgctactcccgagaattatcgtctggggcctggtgacgaggtgattattgatgtgtggggagcttctgaaacaacgattcgacaaacaatctctccggaaggaagtattcttgtgaataatttaggaccggtttatctgagtggcaaaactgtaaaggaagccaataattatttgaaacaagaatttgccagaatatattctggagtaaccggaaatgttccgtctacccaagttaaactgacattaggagaaatacgttctattcaagtaaacgttatgggtgaagttgtggtgcccggaacttataccctctcatcatttgcttccgtatttcatgctttatatcgtgcaggtggtgtgaatccgattggtagtttgcgcagtattaaagtgattcgcaatggaaatacaatagcggatttggatgtttacgatttacttatgaaaggaaaaatgaaagatgacatccgtctgcaggatggtgatgtaattcttgtggatccttaccagtccctggtacagatattaggtaaggtaaaacgtccgatgttttatgaaatgaaatccactgaaaccgtaggtacattattgaagtattcaggtggttttacgggtgatgcttataagaaagcattacgtataatccgtaaaagtggacgtgagcatcaaatttataatgtggatgagatggattattccgtattccgcgtagatgacggtgataagataacggttgattccgttttacagcgttttgagaatcgtgtggaagtccgcggtgctgtatatcgtgaaggtttgtaccagttggacggtatgatgaatacagtgaagcagctgattaagaaagcggaaggacttcgcggagatgcattcttaaaccgtgctataatcgatcgtgagcttgaagacttgtcgcatgagattatacaagtagatgtgaaaggtttgctgaacgggacagctgcagatattcctttgcagaagaatgacattttatatattccaagtattcatgacttgaaggaagaagctacacttaccatccatggtgaagttgccaatccgggtacatatctctattctgataaaatgacagtagaggatttggtgttgcaggctggtggcttgttggaggcggcggctacaacaaaggttgaagttgcacggcgcatgaaagatccgaagagtacatctttcagtactacagtaggccagaatttctcttttgatttgaaagatggcttattggtgggagaaggaagccaggatttccatcttgagccttttgatgaaatttatgttcgtaagagtccgtcctattttaaacaacagaatgttatggtgggtggagaagtcctttttagcggtaattatgcactatcgaaaaagaatgaacgtttgagtgacttgatagctaaggctggtggagtaactcccgatgcttatataaaaggagcgcgtcttatacgtaggatgaccgaagaagaattccgccgtaaggaagatgctctgcgtatggcgcaagcgggaggcggagattccatatctgtaaaaagattggatttgtccgatacctattctgtaggtataaatctgggagaggccttgaaaaatcctggttcagatgctgatatggtgcttcgcgagggagatgtattatttgttccggagtacgtaagtacagtgaaaatcaacggtgctgtaatgtatccgaatacagttttatataaaaagggtgaaagcttgaaatattacatcaaccaggctggtggttttggtaatgacgccaagaaacgcaaggcctatgtaatatacatgaatggtacagtttctcgtttaagagcaggaaacaagaaagccattgaaccaggttgtgaaataattgttccaagtaaagaacagaaaaggaagatgactaccactgaaattctgggaatgggaagtacgacagcttctattgcagcgatgattgcgactatggttaatctctttaagtaatttgaattatgagcgaagaaaaaatacaaaacataacctctccacaacctgaggaacaagaaatagatttgatagaactggcccagaaagtatgggctagtcgcaaattggtttttaaggcgtgtggtatcgctgcccttgttggactggttgttgcatttagtattcctaaggagtattctacaagtgtgacgttggctccggagagtggtggtaaatctggtggcggaagtatgggagcccttgcagccatggcgggtatcaatttgggtacttcttctggtgaagatgctttgtcacccgaactttatcctgatattgtaagttctactccttttctgattgaactgttcgatgttaaagtcaaggatcagaaagcaaaagtagacacaactctgtatgcttatttgaaagaggaacagcgttctccttggtggagtgcaattttctccgctccttttaaggtgttaggatggacattgtctttgtttaaggatgaaccggaagagggggatgcaaagctggatccttttcgtcttactagagatgagtctgccattgcagatgctttaagtaaacgtatctctgtttccgtagacaaaaagacaggtgtgacaaccttgtctgttactatgcaggatcctttgatatctgcttcgctgacggataccgtgatgcattgcctgcagaactacatcacagattatcggactaataaggctcgtcatgatttggcatttaccgaaaaactttatggagaagcaaaggccagttatgagtctgcccagaagaaatacgcaaattttgtagatgcaaaccagaatataatattgctgagttatcgcgcagagcaagagcgtttacagaatgaaatgaatttagcctatcaagtatatacacaagtgtctcaacaattgcagatggcaagagctaaggtgcaggagattacaccggtatatacggttgtccagccggctacggtacctttgaagcctgcaaagcccaataaattgatgattttgatcggcttcatgttcttggcaggtgtcggcagtgtgggatggatattatttgtaaaagatttattaaagggatggaaaaagcaaacaatatga

SEQ ID NO: 311 - DNA, 7446 bp, unidentified
  source 1..7446: mol_type = unassigned DNA
atggataccaaaaaagtggacgtgatggtggctgacgcctctcacgaagtttatgtggataagattttggataccatcagagaagcggccaaagtacgtggaacgggcatcgcagaacgcacacacgaatatgtggcgacaaaaatgaaagaaggaaaagccatcatcgccttatgcggagacgtgtttgcaggcttcagctacatcgagagttggggaaacaaacaatatgttgcgacttccggtttgattgtgcatcccgactttcgcggtattggattggctaagcgtatcaaaatggcatctttccgcctggcacgcttacgatggcccaacgccaaagtattcagtctcaccagcggagccgccgtcatgaaaatgaatacggaattgggatacgttcccgtcactttcaatgaactgactgatgacgaatccttctggaaaggctgcgaaggctgcatcaaccatgatatattagtagccaagaaccgcaaattctgcatctgcacagcaatgctctacgacccggctctgcatgaagatgataaaatttaaaaaacaaaggatatggaagaaaagaaaaaagtagtagtcgcattcagcggcggtcttgatacttcatttacggtaatgtaccttgccaaggaaaaagggtatgaagtgtatgcagcttgtgcaaacaccggtggtttcagccccgaacaactgaaaacaaacgaagaaaacgcttataaactgggcgcaaaagaatatgtcactatcgacgtgacgcaggaatattacgaaaagagcttgaaatacatggtatttggcaacgtgctgcgtaatggtacctatcctatttccgtaagttccgaacgtatcttccaggcacttgccatcgcacgctatgccaacgagatcggtgcagatgctatcgctcacggttctaccggtgcaggcaacgaccagattcgttttgacatgacattccttgtattggctccgggcgtggaaatcatcacactgactcgtgatatggcattgagccgccaggaagaaatcgattatctgaacaaacatggtttctcagcagacttcaccaaactgaaatactcttacaatgtaggtttgtggggtacctctatctgcggtggtgagattctggattccgcacaaggattacccgaaagcgcttatctgaaacactgtgtaaaggaaggcagcgaacaactccgtcttactttcgaaaaaggtgagttgaaagctgtgaacgatgagaaatttgatgatcccatcaaagccattcagaaagtagaagaaatcggtgccgcttacggtattggtcgtgatatgcatgtgggtgatacaattatcggtatcaaaggccgcgtaggtttcgaagctgctgctccgatgctgattatcggtgcacataaattcctggaaaaatatacactgagtaaatggcagcaatactggaaagaccaggttgccaattggtacggtatgttcctgcacgaaagccaatatctggaaccggtgatgcgcgacatcgaagccatgctacaggaaagccagcgtaacgtaaacggtacggctattctggaacttcgtccattatctttctctacggtaggtgtagaatcagaagacgaccttgtgaaaacgaagttcggcgaatatggcgaaatgcaaaaaggctggacagcagaagatgcgaaaggtttcatcaaggttacttctactccactgagagtatattataacaatcataaagacgaagaaatctaaaaagcctatcccctaacccatctctcatagagaacggttaggggatagaacaattatacgaacagatatggataataataacaaaaaactaactcgctcacgcagcgacagaatgcttgccggcgtctgcggaggattggccgcttatttcggacttgacccttcactcgtacgtatcggctatgcgttattgacgttttttaccgtatttgccggtatccccgtgtaccttataatgtggcttattgttcccgaggaaaagaacttgtataacagataaaagaataattgtataaactaacatgattaaagtaggaatcatcggcggagccggatatacggcaggtgaattaattcgtttgctgatcaatcatccggaagcggaaatcgtattcatcaacagctcaagtaacgccggaaacaaaattaccgacgtacatgaaggattgtacggcgaaacggaccttgtcttcaccgacgagttacctttggacaaaattgacgtgttattcttctgtaccgcccatggcgacacgaagaagttcatggagagtcacaaccttcccgaggagttgaagattatcgacctttctatggactaccgcatcgcttctccggaacatgactttatttacggtttgccggaattgaaccgtcgcgctacctgcaaagcaaagcatgtggctaatccgggttgctttgccacttgtatccaattgggattgctcccccttgccaaacacctgatgctgaacaatgacatcatggtgaatgccattaccggttccaccggggctggtgtaaaaccgggatcaaccagtcacttcagttggcgcaacaacaacatgagtgtttacaaggcattcgagcaccagcatgtacccgaaatcaagcaatctctgaagcaattgcagaacagttttgatgcggatattgactttatcccttaccgcggtgatttcgcacgtggtatttttgctaccatcgtagtaaaaactaaagttgcactggatgaaatagtccgtatgtacgaagaatattacgccaaagactctttcgtgcatatcgtagaaaagaacattgacctgaaacaagtagtgaacaccaacaaatgtcttctgcatttggaaaagcacggtgataagctgcttatcatctcctgcatcgacaacctgttgaaaggtgccagtggtcaggcggtgcacaacatgaatctgatgttcaatttagaagaaaccgtcggcttgcgattgaaacccagcgccttctaagtaatttgtattttgtaatttagaattaaagaaatgaacttattcgacgtatatcccctttttgacatcaacattgtcaagggaaaaggctgccacgtgtgggacgagaacggtactgagtacctcgatctctacggtggacatgctgttatctccatcggtcatgcacatccgcattacgtggagatgatcagcaaccaggttgccacgttgggattttattccaactctgtgattaacaagctacaggaacaggttgctgaacgtctgggaaaagtttgtggttatgatgactactccttattcctgattaacagcggtgcagaagccaacgaaaatgctttgaaactcgcttcgttctacaacggacgtacacgtgtggtttccttcaacaaggcattccacggacgtacttcacttgccgtggaagtgactaataatcccaaaatcatagctcctattaatgactgcggacatgtcacttaccttccgctgaacgatattgaagctatgaaaaacgaactggcaaaaggtgatgtttgcgcagtgattatcgaaggtattcaaggtgtgggtggtattcaattgccgacagatgaattcatgcaggctttacgtgaagcttgtacagctcataatacgatattggttctggacgaaattcaaagcggttatggccgtagcggtaagttcttcgctcatcaatataatggtatcaaagcagatattatcacggtagccaaaggcatcggtaacggtttcccaatggccggtgtacttatcagtccgatgttcactccggtttacggacagttgggcactactttcggcggtaatcacctggcatgcagcgcagcgcttgctgtcttggacgtaataggtcaggagaatctggttgaaaatgcagccaaggtaggtgagtatctgatgacggagttaaaaaagttcccgcagatcaaagaagttcgcggacgtggtctgatgatcggtcttgaatttgaagaaccgataaaggaacttcgtctgaaactgttgaaagaacaacatgtatttaccggtgtcagcggtacaaatgtactccgcctgcttccacccctctgcctcagcatggaagaagccaatctcttcctcgaacgtttcagaaaagtactttaaagtatatttgataacataatcagcaataaacaggcagccttcaagcgtttcagcgtttcttaaggctgcctgttgttttaaatacacaagcactttttttacatcaattaggttagaaaggtagaaaaaatatctacctttgcccatcgacaacccttttaataacagaatgatatgagaacagcaattatcggagcaggaaacatgggcggctctatagcccgtggattggcaaagggaagtattatccccgcctcggatatcatagtttctaatccctcacaaggaaagttggatgaactacaagcagagtttcctgctttacaaatcacccatgacaatcaggaagccatcatcggcgccgaattcatcatactcgctgtgaaaccgtggcttatcaaaggtgtgctgcgcgaactgaaactgaagagtaaacaaattatcatttctgttgctgcaggcatcaactttgaagagctggctcactacgtacccgaaccggaaatgaccatgttccgcattattcctaacaccgccatcagcgagatggaaagtatgacactgattgccagtcgtaatgcgaccaaagaacaagaacaactgatgctggatattttcaatcagatgggacttgccatgctcatccccgaagaaaaattcgcagcctgcacttccatggcttcctgcggaatcgcttatgtgttgaaatacatccaggctgccatgcaagccggtatagaaatggggatttatcccaaagatgctatgagaatggtggctcaatcggtaaagggagcagccgaactgatactgaataatgatacgcatcccagcgtagaaatcgataaagtatgtacccccggcggtattaccatcaaaggtatcaatgaactggaacatgacggttatacatccgccatcatcaatgctatcaaagcaagtaagcaataagactaacaattaattcattaaataaacaaccacatggacgaacaaattaagcaaatagcagaacgccttcgcgggcttcgtgatgtactggagctgaccgctgaagacattgcccgtgaatgtgacatctctccttacgactaccgtcttgccgaaacgggagattttgatatctccgtaagtatgttgcaaaagattgcacgcagatacggagtttcattggacgcactgatgtttggtgaagaacctaaaatgagcagctacttcctgactcgtgccggaaaaggtgtcagcatcgaacgtaccaaggcctacaaatatcaagccctcgcttctggtttcatgaaccgtagcgtagacccgttcattgtaaccgttgaacctaaaccggacgatgaaccgatacattacaacagccacgccggacaagaattcagtcttgtgctcgaagggcgcatgatggtcaacatcgatggcaaagagcttatactaaacgaaggagacagcctgtacttcaattcaaaattgccgcatggcatgaaagcactggatggaaaaacggtacgattcctggcaattatcatgtaacaactaaatggagaatgaagggaatctctcattcttaattcctataattatggtagaaagatttttatcacaaacctctttcactacacaagaggactttatcaaaaactttaaaataaacgtaccggaaaacttcaacttcggatacgatgtagtagacgcctgggctgccgaacaacctgacaaacctgcattgttatggactaatgataagggtgaacaccggcaatttacgtttgccgacatgaaacgttatacggatatgaccgcctcgtatttccaaagcctcggcatcggccatggtgacatggtaatgttgatattgaaacgccgctttgaattctggtacagcaccatagctttacataaactcggtgccgtcgtcattcccgccactcacttgctgacaaagaaagatatcgtgtaccgctgtaatgctgcggatatcaagatgattgtttgtgcaggagaatcggttatcacggatcatattgtagctgccatgccggattcccccagcgtgaagaaactcgtcagtgtaggtccccaagtagccgaaggattcgatgatttccacaaagggatcgaaaatgccgcacctttcgtgaagccggagcatccgaatacgaacgaagatatctcactgatgtacttcaccagcggaaccaccggtgaaccgaaaatggtcgcccatgactttacatatccgttggggcatatcgttaccggtagtttctggcataacctgacggaaaacagcctgcatctcaccatcgccgataccggttgggggaaagctgtatggggcaaactttatggacaatggattgccggagcaaatatatttgtgtatgaccacgagaaatttacccctgccgccatcctggagaagatacaggattatcacgtaacttctctctgtgcacctcccaccatcttccgtttcctcattcacgaagatctgacaaagtacgatctctcatcactgcaatattgtaccatcgccggcgaagctctgaacccagccgtatttgagaccttcaagaaactgacaggcatcaaactgatggaaggattcggacagacagaaaccacgctgaccattgctaccatgccttggatggaaccgaaaccgggaagtatgggattgcctaatccacaatacgatgtagacctgatagacaatgacggccgttccgtagaagccggtgaacagggacaaatcgtaatccgtacagacaagggtaagccactgggattgttcaaagagtattaccgcgatccggaacgtacacacgaagcctggaacaataatatctactatacaggagacgttgcctggaaagatgaggacggctatctctggtttgtaggccgtgccgacgatgtgatcaagagttccggttaccgtatcggccccttcgaagtggaaagtgctctgatgacacacccagctgtaatagaatgtgccatcacaggcgtacctgatgaaatccgcggtcaggtagtgaaagctaccatcgtactggctaaagaatataaagggaaagagggagaaacacttatcaaggaattgcaaaatcatgtaaagaaagtgacagccccttacaaatatcctcgtgtgattgaatttgtagacgaactgccgaaaaccatcagtggaaagatccgtcgtgtggaaatccggaagaacgatacgaaataa

SEQ ID NO: 312 - DNA, 19002 bp, unidentified
  source 1..19002: mol_type = unassigned DNA
ttgggaaatcatgaaaagaaaaaaattttgtatccattatacgcactcattccagcactgatcgtatatactgttttttcggttattcctattttgatcagctttgttttttcttttacagattggaatatagagcgtttgtatgaacctacatttactggactaaaaaactatatagaattgttgaaagatccggtttttatacgttctattgccaatacttttatttttgtagcactgactacaatattaaaaacctctttgggattccttcttgcgcttgctcttgtgaaaaaggtatttgcacgtggttttcttcgaactgtatattatgctccttgcgtacttagtattacggttattggtgtattgtttaaatctattcttgcaaatcgaggactgctcaataatgctctggaacttgtcggtctgggacaggttgccacagattggcttggaagatacgggacagcacttggaagtgtaatacttgttgaaacatggatgtgggcaggatttaatatgtttatctttatatcaggtcttcaggcaattcctgcagattattatgaaagcgcaacactagatggtgcatcggcatttgaaaaatttaaacatatcacattgcctttgattgttccgtcacttactgtcgttgtcacacttagtatagccggaggattgaaagtatttgatatcatctatgttattacgaatggaggtccgggattcgatacgcaggtactctctacatatacttagcagtcgtttagtcttggattcctgagagaatcaacagcaggatctatgattcttgctgtaatcgtatcatttactatgaacagatattttacaaagaaggaggttgaaatgtaatgaaaaaatggaccaaaggtgaaattatattgtccgatttattaattgcacttgctttcgtatatattgttccgtttcttatgatgattttaggttcgtttaaagctcagtcacaagcggcaatgtttaatctggaacttcctaaacagtggctcatttcgaactatgcacatgtactggaatcaggaaaaattcttcgcggatatttgaatagtgcaattatcacaattcctgtaacagtgttatcagtactttttggtgcagttgcaggtgtcgtgatatctagaagaaatgacagagtaacaagaggattgtattattattttatttttggacttacactcacccttcagattgcttctatatttttcttacttaaagtattaaatatatatggtacgtttttctctgtaatatgtatttttatttctctcagaattccgtttacagtaatgacattctacagttttgtaaaaggagtcccaagagatattgatgaagcagctattattgacggatgtaatttctggcagatgatgtttcacgtgctccttccagtacttaaacctattgtggttaccaatattgttattacagctattgatgtgtggaacaattttatgatatcattattttatctgggatcttcagaaaaagccaccgtggcaatggcaatctatagtttttttggaaggtacaacagagactggcagtatgtgtttggggcactgacactggctgttcttcctatgttgattctgtttatcattcttcaaaaacaaatagtggcaggaatgacatcaggagcagtgaaaggttaagctttagataggataggctctcggaatcatgagccttccgactaagattcattggtcggatgaaccttgaaaagtaaatattatccggaacggacatgaaaagtaataaatgatgaaaagtggcgcacttttatagaccttgcgtcaaacatggcttacaatggtattgcttatgaaattaagcggtttgctcaaagaaattttttagttgggaagtctttggcaaagtccatgcatcaagatgctgacacatcatgatggcgaacaggcggcagtacaacatcatagatgaacggtatctgccgtcttctaatttatagtctatcttttctcgtttgttacaacgttctgcagatgttcttgcgttgtattccagcttccattcctcgctgccacgaggcggagtattgaagagtcttgggttatcctttaatacaaggtgaacatttcttccatactttgcatcagaacagagttcatcgcaagtgcaatgaggtgtaccgcctttgtaagaaatcttaggacaacgatatttgatgcgtccttttcttggctcagcggcggcttgcttcataggaaagcccttaggacataaaggaatcccagccgatatcacagtcaggcggatttttttcaaactgccggaatagatcatcaacggtaagtttttcgacagaaggagctttttcttcttttcctttcggtttctgaggcttttccttaggtggatgaactgcgttagtcaggttcttgtcagaagataaccagagccgcctatgaaagtcataaaaggcaccaatgccaggagtatcatcaacataaaagccggaaataatggcatgaaggtgattctctttcaaatcagaagctaactttgtgtaggaagttattttaaatgcaacagaaacaaggatagagcgaagcatgtcagaaggaagtcttggttcagaaccaaagacagaataccggtcttgcataagtacatcaacttgtgacagatcaagattccaaaacttatcaaggatctgccaggtagaaaaagacagggaagttgcagcattcggataatatttacgaagttgagtcaggacacgatcctgataggcggaatgaccgccgatgttaataggtttcaatgaaacacacctccaaatcaaaaagtctgttccagctgagccggaacgatatgccttattgatcaagaggcgcgaagcgccgcatttttaggggcaaatgtcaagaactttttgaaaaaaaaggtggagaaaaaatgaaaatggaatctcagaagccgcagaaatacaggcttagagattccgagagactattaggttataagggagaaagaaaagatgaaaacaagatttattataataggttttggatggagagcagattttttttatcgcatagcaaaaatgatgcctgagcggttcgagataagtgcaggtgtattaagaacaaaacagcgtgcagaagaagtagcagagaaagaaggtgtgtatgctaccgaaaatttggatgaagctttgaaaacaaatccagattttgcagtattatgtgtaccgcgcacaatcgtaaaggaatatcttgtcaggctgatggaagcggggcttccaattttatgcgaaacacctccggcacaaaatgtaaaagaactttgtgaattatgggaggaaaccaaaagactaaaaggaagagttcagatcattgaacaatattttctgcagccgtattatgcagcaagcctggagattatccggaaaggatttcttggtgaaacgactggagttatgctgtcagcccttcatgggtatcatgctgtcagcatgtttcggaaatatcttgggattgggtttgaaaactgcagaatccgtggtcagaaatttatatctgatattacggcaaccaatggaagggaaggatttgatcaaagcgggaaaaaagtccagtttgaaagagattgggcttctattgcatttgacaacggaaaaacagcttttctggattttgccggcgaacaatatttctccatgattcgtgcaagacgctggaatattcagggtgtaaagggcgaaatcaatgatatgacagtcagatatttaacggaagagaaccttcctgttgtgcaggaaatatcaagatttgacgttggagtaaataataacagcgaatgggcacatcgtggcattatgtttttggatcagtatctttacacgaatcctttttatccagcgagaatgaatgatgatgaaattgctgtcgcatcctgtcttgaaaagatgaaagtatatgtagaaacgggcaaggacttttactctcttaaagaggctgcacaggatacttatttatcatttatgattgaaaaagcgattgggtcgggagaagaaatcgttacggaaaaacagccatgggcttataatagttaaaagaaaggaaaaggattgcagaaatataagtttcaaagacagatcatattaaattttgaccattcaatgctacagacaattttgggaagtgcatccattttaggaagtaaggatatattagaagacttcttttctttaaaaaaggaggggaatgttaatccgtattgggtaatttggagatggaaacaaacattattataaattatattttacatagatattaatgtattaaattacaaaatggtcggaatcaagcctccaagtcctcaactggaggcacataatctgatttatcgaagccgtcagggattaggaaatttatgaaaatttgacaagtctatccattcatgtatataatacagaagatgtaaatatcagaagaaaacaaatatcctaagaaaggagagcagactatgcgctggaaaacaacgaatcttcacctgcaaaaaggcaacaaattagctgtttacagggatagtgcgctctttttcaggtaaacagtttctaaaattaagaatgtaaatacgaaaagacactatctcctgttcaaaaatattggaaagatattattttgaaaaggagatttttttatgcgtaattttaatataaaaagacagatcaataaattgtatacacttactacggtaagctattttcggattgcgggagcatcgtgggtggcgcttcttgcactcagaggattttcactgttacagattggaatactggagagtattttccatatcgcaagcagttgttttgagatcccgtcaggtgttgtggcagatgtttttggaaggaaaaggacgctggctctttcgaagctggtcagtgtgctgtcttgtctggctatgattttatctgacaattttggaacggtggcatttgcgattgcattcagtgcgctcagttacaatctggaatcgggaaccatagaagctttggcgtatgacagtttaaagtcggtaaggcaggagaaaaaatataaccgatatgcttccacggaaatgatgttatatcggatcacaagttctacagcaacactttgtgcaggggttgcattgtggcttggatataaaaaagcatatgcgattgatattttctttgggatgatcgcacttggaatcgtatgcagtttaagagaaatatcgggatttacaggtactgatggtgaaccgaccaatccacagacagatgatcataaacaaaagcagatgagtgaagaaaagcaggaacggatgaatgaagaggaaactgatcagaaaaacattcagaacatccgcatttcagagagatttcaaaacgttgtcacagagagctggcatttcatgaaaaacaatcgaaaagccagaagtgttatgatcgtaaatgcattgatcggtgcagtgtcaacacttgtcctgtttttcctgcaggcaaagctgccactggcgggattgaacgaggcactgcttggcccggctctttttgtcatgggacttggagctgcactcggcgccaaagtggtgggatattttccaaattggaaatacaaaaagtatgttattttaagtggaatcggtgtgttgtctgcatttggaatgacgttttcgggcaatccatatctgatgattcttggtggctttgttggttcttttgcagatgattttctggaagtgcgcacagacatcctgttaaatgatatgattccatcggagcagagagctacgcttatttcggtaaattcttttacattttcgttggtgatgatcgtgatgtccacgttgatgggaagtattatgtagtatattttacagggcttgcgcgcttgcggattttctgtggggtggaagccctgttttttaaaaaaatttttacattgattctatggtaggcagcaactaaaaagtgtgcccaaaatataattgacataggatcagtaatgtttttcatgcatcaatgttaattaggtgtgcaaatgacggaaaaatgcatctgcatgaaaaaagaaatgggtaactttctcagctaaaagcttaccagacaaaaaacccatttcttattttaatatagcatttatgtttttataatacaagactgcaaattaattagcattacttctataatgtacgttatcaatatggaaaagaggaatggaaatgataaaagggtattcgcacaagcctatgggaactgttgcattaggaactcacttgggtaatttttcaaaagaagattctttgaaatatgtagaagcaataaagtatgcagttcgaaatgggatatactctattgatggagctataaattatagaggaatgtgttcagaacgagatgaaggagttgcattagctgaattaatgaattatggcattattaccagagaagaggtatttatatcatctaaggcaggattattatatggagatatttcagcaaagcttccaccaatgaaatacttgtcggaaaaactggaaaataaaggaatatcaatagaagatttttcagaatatgaaggtttattccagactctcaatcctgctttttatgaaatagctcttaataagtcattggaaaatttaggtcttgaaatgatagatgtttattacattcatattcccgagataacaaaattaaagttaacggaagacgaattctatgagaaaatggaaatgcttataagatggtatgagacaaagtgttttgaaggaaagattagatattatggcatagcatttgaatttatggtagaagaacctttcgaaaataagtggcatattgagattgaaagaataaagaatatagcaagaaaagtgtccggagaaaagaatcattttaaatacattttgtttgaatataatatcatgtgtgattgggctgacacagtgaactctcagatgatagatggtgtgaagatgacgatgatagaagcttgcaaggcattggaattagagactgttgccagcatgccatttgctatgggagacggatttaagaaatatgcacttagtgacatgttggattttgtgttgaaaaagatgaatcacgttattgttggaagcaagaatccgaaacatatcgaggagatactgaggtgttggagaggcaactttagtgaatgctctggtagacaaaggtttagtggaacgtgagggttcggctagaaaaggttactggaagataaaagaataagaagctttaaagaaaattgaagaactgaagaatgagaacacagcactccacgaagaactcgaatattacaaaaaccgtaaattaagcggacgacagaagcataatgcgaagtggatgggaatctataatgattttgttgccggatatgagaccagagtggtacggatctggtcgagattgcaaagtgcaacaatgtcagcaagcgtaccatttacagatacaaagcgtattatgaggaaatgaaggaagcagaaagcgaaaaatataacagcttacagaaacatgtgacagaatatcagaaggcgggagaaaattttatggcgtccagcatgattcatcttgcaatcatacgatgcataatagttaaaacagaatttaataatttggacaggctgcgtctgggtgtgatccttccagacggggctgtcagtggaaacagtcatcttaagaaaatgatctgtgaacagacaagagtgacctatgaccttgaattttacagggaaaaatacggggaacaaatgaagacagatgaactgtatctaggatattatcttcatctgattcaggacatattttatagaagatatgtatattctgagcatcactttaactcatccattccagagaatgttgaaaggctgcatcaggattatgaaaatacaaattggtttgtagcgaagcagtatggattggataagaatatgctccggacgcagacactggcaggtgagccgattatggaattagcagattttcgtgagcaggaactggtaagggaagtacgtgaacaatttcacccaatggaagaaaaaagcagcttttttctgaccagagagatgatccgggaatttattgacagggcgacggaaatctgtctgcatgaactgaatcagcttgcgcagggaaaagccggacttgacagttttgagtggagctggataaaacaaggatagaaataaagatttaagaatactggctggaggcacagatgaccaaggtagacgagttactgatcgagggaaaggtgaaggaagccattgaaataatgtgcgaccttccggaatatgagaaagaacgagaacaatatattgacttatttgaaaacgagcattatcggcaatatgaagtggatggaatactgaatgagatactgcttgcatatcagcaatatttcagagacgtgttttattgcaatagtgatgaagaaattgccgcagacaaactgataagaaagctgtgccagactttttctatatcggaaaaagagaaagacgcactggaagatagattgcaggaactttttgaacagaaaggctaccatgcacttttcggaaaaacgcaagggtattttggaccatacatctggaaagatacggttccgacgtcttatcagatagaattgccggaaggcgtagagcagtatacggtaaatattttaaaaggttttgtatttcggagctggatggattatctgacctttggaaaatacggaactggcggctgggcatctgaggacggaacgattcaatgcatcgagagtgcctatgattttgagagtgagaaatttaccgtttcacttttaaagaatgaagcacagcacgcaaaagacctgaaggaatatccagacattactccggcggaactggaatacagggcaaaattagtggaactgtattattcaagtgattgggaattattagggaaatttctgaaaatggcagatgcagacaaagtgaatgacagtcatgcaatggcttccatgcgtattaaagaagaattttctgatggaacatatgaggatttggaaaaaatcaaagagagagcgcttgaactatttaaaatcaatacgagggaactaagacatggcagcaaataaagtatttattgtggaggatgatgctgtcattgccagggcagtggcggcacatcttacaacatggcagatgcaggtacagtgtgccggcaattttgaaaaaataacagaagaagtggaagattttcaaccggacattattatcatggatatcaaacttccgtattataatggattttactggtgtgcggaaatccgtaaaacgtccaaagtaccgatcgttttcttatcttctgcggatgataacatgaatattgtgatggcaatgaacatgggcggcgacgattttatcgcaaaaccatttgacttacaggtgctgaccgcaaaattacaggctgtacttcgaagaagctatggaagcgaactcgcaagccactcgatcgaatgtggagaagtcgtattgaatctgaatgatacttcagcggcagtccgtggagagaagatcgacctcacaaaaaatgaatttctgatcttaaagacgttaatggaaaaacagggaaaagtggtaagccgcgaagaaatcatggaacgtctctggggcaatgatgaatttgtggatgacaacacgctgacggtcaacatcacaaggatacgaaaaaaattagaagccgcaggagtgaatgattttatcacaacaaagcggggacttggatatcttgttggagcataatgttgaaattttcgtcgcaggcagcaagaaaatcatagagagtttgttttcttttagcgaaaatacaggagttagataatgagcaaaaacatgcagatgaaaaaagaaacaggaaaaatttcacatagaaaatttttgtcagaaaatataggcttattattgatagctcctgttttcctgctcctgatgtttacagtatccaatttatatcagcttccggcagaatatgtcttttatctaacaagcatatttctgatactctgggtgaccactttgtgtatgcagtactggggattccggaagagaacagagcaatatgaaaaagaaagcaaggaaaagcaggaaagtaattcaaaagagagcagacaatgggaagaattacaggaaaagcaggacttttttgcattgtgggcacatcagatcaagacaccgatcgcggctttgaatcttcttttgcagggagaaaagcaggatgcggcagtatgccgacaggaattatttaaaatagagagttacgtggagatggcattgaattatctccgctttgaagagatgagcaatgatcttgtgcttgagcgaaattcactggaacaattagtccggcaggtagtaaaaaaatatgcagcaatttttatctacaatcatatctccattcagctggaacacttgaattatacagtgcttacagatgagaaatggttttgttttgcattggaacagattttatcgaatgcattaaaatacacaaagcagggaagtgtgaagatttcggcagaggagacagaaaatggtttgcagatatttgtgaaggacaccggtatcggcattaagagggaagatctgccgagaatttttgaaaaaggttttaccggatataatggcaggatggataagaaggcgagcggtcttggactttatctgtgcaaaggcgtgtgtgagaagctcggacatgaaatccgggtggtttcggaagagggagaaggaacgacggtgatacttactttgcagttggagaaagtgcagcagagggatcttgtgaacatgtaaaatcctgaaaaatgataattgaatcaatatggaaatttaatattagggtatgttatactaagagaaagcaagtaaaaatgggggatttcaaatgagtgcacagacagattgtgagatgctttctattgaagtgatggaagcatatgcaggtaaatataacctttctggtaataaagttgtagaattatttcaaaaaaatcaagtttttgaaaagatgctgattcagcatgagtatctacatcaagttagttttgaagaggttatggagtttgtagaaaatgcaatagcagatgattcaagggaattggtagtatatcatggtacttgttctgaatttgagaaaattaatctcaataaatcgcataaccgacgtgattttggaaagggattttatacaacaatactgcaatcacagtcaaaggaatgggcatacaggctttcattacgagaaaaacggaacgattattatgtatatgaatttttatttgaggaagtgccttcactaaaagtgaagcgttttgacagattaaatgaagaatggttagaatttattaagaaaaatagaagtaaaggcggtttgcagcatgattatgatgttgtaattggaccagtggcggatgacaataccatggaaacagtgcaattatatatggcgaatatacttacagcggaagaggcggtggaaaggcttcgctataataaggtaaataatcaggtatcgtttcatacagaaagggcactgcaatatgtaaaattagttaggagggtttcttatgccagaaaagatatatagttttaatggaaaagatattacgatgaatatatgtatacagattagagatgtggtgaaattactacaggaacattttcatattgcttttgaagaagcagtattgcttttttataaatcggagacatataagacactacaggagacagaaaacggtttatgggctgagtcagcggaatatatagctgacagatattacgaagagcagggaaaataacacttttcttacaaaaatgtaagattacgacaaggaaatgtaagccaaagaaagggcactacatttccttttttgctatgatagtcttacaaacaaggaggataaatcctctgctcctgtaaaagcagtcgcattttccttcggaaaacaaggaggattatatgtcaatcttagaagtcaatcatatcaaaaaagtatataaaacacgtatgggtggggacgaagtcaccgcattaagggatgtgcatttcagtgtggaaccgggagaatttgtggcgatcatgggagaatccggaagtggtaagacaacgcttctgaatatccttgcaagccttgatacaccgaccgccggaaaagtgttagtggatggaaaagatttcaccacattaaaggacaatgagcgtgcgattttcagaagaagcaatctcggattcatctttcaggattttaatctcttggataatttttccatcgaagataatatcaaactgccgctggtgctggcaggagaggattataagaaaatggatgcaaaagtacaaaaggctgccgggcagcttggaattgtggagcttttgaagaaatatccgtatgaagtgtccggtgggctgaaacagagaactgcgatcgcaagggctttgatcacaaatccaaggatccttctggcagatgaaccgaccggggcattagattccaaggcggcgaccaacctgttaaagcagctccgtgagattaaccagacaggtcagacgattcttatggtaacacacagcaatgtggcggcaagctatgccgaccgtgtcatgttcattaaggatggtgaagtattccatcagatttaccgcggtgatatgacaagaagtgcactgttagataagatctgtgacgcagtgaccgttctgatgagaggaggagaggacagtgaatcataagcttctgacaaaatttgtgttcagtggaatgcagaaaaataaaaagacactgatcccatatctgcttgcaggaacgatgactgtcatgatttattatattttgcagtcacttgcgcattgtccatacatttataaagatggagtggaagcgttttatggtgcacagattatctcgattttactggaaatcagcggtcagatcgtagcagtctttgcggcagtttttcttttttatacaaatcagtttatgataagggcgagaaaaaaggagatggggctttatggagttcttggaatgtccaaaaagaatattacctatattttagctgcggagagcctgattcatgctttgaccagcattattacaggaattatgatgggaacttttctgaacaaattaatgcttctcattctctataagattatcaatcagccaccggtaaacggactgtttttctcagtggaagcactgaaaagtacattggttttatttgttatcctttttgcagtcagtctgatttataatgtggcttccatccgggttggaaaaccgatcgcactgctgcagagtgacagaacaggggaaaaagaaccgaaagtgaaagttcctatatttattcttggaattataacactgactgcgggatataagctggcactgtctgctaagtcaatcgggggtgcggtcaacatattatttgtcagcattctgcttgttgtgatcgcaacctattgtctttttacagccggaagtatttttatcctgaagtgcatgaaaaagaatccgaagttttactataaaacaaagaattttatcagtgtatcgaatctgatgttccggatgaaacataatgcagcaggactggcgtccatctgtgtactttctacaggtgtgatcctgttgctgacctgtggcttttcactgatgatgctcatcggaaaaaatatagatgacagatatccgacagatattaaagtggcagaaactgtttcagaggcaggaaaaggcatggatgatttcgttactatgaataaagcgttgcagcaggatgggattgtgactaccgaccagatttatagacagtaccggaatatcatggtcacggaaaaagatggaaaacaaaagattgcagacccggatacattcgacagtgacatagcctccgatatcgttacgtatctgttgtctgctgctgattataacgaatatgccgatatgaatctgacacttaaggatgacgaaatactcatctacagttcaggaaaagaatggaaaaaaggtgataacctgaattttatgggaaaagagtatacagtagcaggagaggcagagtattctgcaatccgctatattattgattcgaccatgtcaattttcgaacgtgaaattcttgtctttccagatgatgagcagatctgtgctctgatggcggaagccggacagagagtgaatccggatgagtatgaagtcttcatcggataccagttagaaaaagctctgacagaagaacagatggaaacggtcagagctttgatggaactggggggattaaaccgtgaagcaattcgttttaaatcagaggagatgagcgctttttatagtatctatggtggaatcttttttgtaggaatgtttctggcagcactctttctcatggcaacggttatgatcatttactacaaacagatgtcggaagggtacgaagaccagaaacgatttcagatcctttccaatgtcggtctgactgaaaaagaagcaaaagaatccatccggacacaggttatgttattattttaccttccggtcgcagcagcgattatgcatatgatcgtggcaagcagcgtggtcagactttttttacggatgatactgatcgtggatacctttacctttaacatggcgatcgcaatcgtgagcatgatcttccttgtgatctatacgattgtatacaagatcacttcgagagaatactacaagatcgtgaataggaaagattaaatttgccctattgacagcacaatgctttttacttggctctctactgaactacagcatacatcaaactattgaaatttggcatcgcacttgtgatgcctttttcaatgattttcagcccatttcgcagcaactcattctcaaaagtactgaatgaaaccatcctgcaagaagttccagcaaccatcatttttccggtttcatgttctctttcctgaagctcaaaagcgttgcttatatcactttgcatttcataatttccgtctcccattgaacaaataagtgcaattccatctgatttcaaatgacgatgtatgaattgataaaacccgtttctgtcttcatctaaaactaacatatgaacaactgcaaccgaataaatgaaatcaaatttctcatccaaatcacttgataaacaatccaaaaccatgaattttgattcaaaatcaggcatttttttcttgcaatagtttattgcttcaggcgatatatcggttgctataaggtgaaagccattttctaaaacggtggcggagtctctgccttcaccacacccgatttccagtaacgactgctcgggatgaaggtgatatctcttaataatatccataacaattggagtatttttcatctgtgtccaactgacacccttttcatgagcggttttatatcgatcttcataggcttcataatattttcggttctctttttgcatggatgccccctcattaaaatttgtataccatccaaggcggagcgtatgcttcaccgaatggttttttatggtgatagtttatcatactacgcagaatgtgtgtaggttttcgcatcagatacaaaaagaatattatcatacagtaccgcaggctaatgtgtttttggggaaaccgtacgtagcttacagataaagaaatcaaagaacctgccgacaggatccataacgatgaaaaagcagaaaaagatgcatagaagaattaggtatgataaaataagagaagagaagtcagatgacgttatagataccgagaaacgataaaaggtggggcagtcagatgaaaaagaacattctattcggacttataatattatcatttgttcttgcaggctgtaagcaggatgtaaaagaagaaaaagaagcatcaacagaagtaacaaaagaactgtccggcgggcaggaagaagttacagagacaccggaacatacagagacaccgggacagaatacacaaagttttaagggaagagtgattgagaatcagacatttgaaattcagctggatgactggggaatggtaacatttacatcagttgcacctgaagagaattcgaataatccagaattcttattagtgaagaatgataaagttatatatgagtttccggaaataaaggcagacgcttcggattcatttaaacagatcagtggtgtaaagttttcagatgtgaatatggatgggaaaaaggatgttttgctgctactccaatactgtaatgatggagattcgtggaatatgccggttatatttttacaggaaaatccggacaatatgatgtatctggattatccaaatctggaaagctacaaagtcgaagcgaaaacagaaaatggcactcctttttatagggatactttttttgaagaatttctcggtaagcagcatctgacagaaaagctttctgatatggaaggcgtatggacagattatgtagagtatttggacagcatatcaggtgccactatggacatccaaaagcagattgaggtatttgcacaaaacagggacaagtgggcaactgacattgattttgccgatgaacaatataaattcacgctggctgatctggatatggacggacaagtggaacttttggtttcacattctggcggcacaggatttttttcttatacaagtttttacaatgtagataaggatggaaaactaaaagaactgaatacgactttttcagaatatgaatcccagccggatcttatggatcaggtatcggatgaaagtgatgtgatggtatattctaatatcataaatggaaaaggatattataattatatcgtgtacgatctcatgaaggagtcaccgagcagttatgtataccgtgtcagttcgcttgcaatcgttgatgatgttgtaacagaaacaaaactggcagtcgaatacgaaacatatgatggtccggattatgcagcgacagtcagctataaggactataccggggcagaactgacagaggaagagtattatgcttatgcggcagcctattatgatgcacaaaatgcagcagaacaaagggcacattttcaatggaaggacgtcagtgatatcgtaaatgcgagtgacgaagaggcagtccaaatgcttacggaagtgtataacgcatacagttttgattaataaggtttaggtgtcaaaaagcgggaaatagactttttgatacctgacttttaataaaaaacagaaagcagcacggttaagagaaacgattaaaaaaaactgtcatatattaaagtgtacctgaatatagcacgttgcttaacagggacaataaaaaacaggaaaggaaaaatatatggcacgttttacaaaccaggcacaattgcgttatggaagatccattgccaattcaaatatagcagtcggtgagattctggaagttttatccgctgcaaaggaggcagtgcggaatacttacagacaaaacgatacgatcacctatgtgatcagtattgtaaatgcgggaacgttagcttatacaggacttaccattacagacaatctgggagcatatccttataatacaacaacacttgttccactggattatatggaaggaacagcgaagtattatatcaatggtgtattgcagccggcacctgcagtaacagccggaccgccacttgtaataaatgggatcacagtaccggcaggcggcaatgcagtgatcgtatatgaagcagaagtgaatccgtacgcaccactggctgcaaccggaaatattgtaaatacagcaacgatcacaggcggaggcattacgccgatcgaggtgacagagacagtggtaacagataatgagccgctattaaatatcacgaaatcgatcagcccggttccggtaacggaaaatggaacgctgacctatacgttcctcattcagaacaccggaaatactgccgcggatgcagccacagcagcagagatcatcgatacgttcgatccgattctttccaacatagcggtaagctataatggaacagcacttgtggccggaacagattacacatacaacgaaacaaccggattatttgcaacgactgccggaaggatcacagtgcctgcggcagcttatacgcaggatccggctaccggaaactggatcgtaacaccgggaacaggaaccttaaccgtgacaggaacaatctgatcacaacgcatataaagagcaattccacagtattaccggagaaagaaaaggatttttgcaaaataagcggaaaacactttcttaatgtaatgtgatatagtataatgcaacttaagaataatttcaggaggcagagaaaatggatatgaatatcgtatgtctggatctggagggcgttcttgtgccggagatctgggttgcatttgcagaagaaacaggaatcccggagttaaagaaaacgacaagggatgagccggattatgataaactgatgaaatggagacttggaatcttaaaagagcatggtcttggattgaaagaaattcaggaaacgatcgcaaagatcgatccgatgccaggggcaaaagagtttttagatgaactgcgcagcatgacacaggtgatcatcatcagtgatacatttacacagtttgcagcaccacttatgaaaaagctgggatggccgacgattttctgcaattcactggaagtggcagaagatggcgagattacaggttacaggatgagagtagaaaattccaagtattcaacagtaaaagcactccagtcgattggattcgagacgatcgcaagtggagacagccataacgatcttggaatgatcaaagccagcaaggcaggctttttattcaaaagcacagaacagatcaaaaaggataatccggagctgccagcgtatgagacttatgatgaattaatggaagcgattaagaaggcgttataa

SEQ ID NO: 313 - DNA, 6226 bp, unidentified
  source 1..6226: mol_type = unassigned DNA
atgaatatgacaacaaatgtaattaacaagggttggttcaatcccatatccctttccgtattgctgatactggttatcgtatcagccgttttgtatgtttcgaagattataaacataccggtattcatcctcttgcttcttctttccgggttggtggcttctgcaatccgcatagccgaccaatgggaacgggcggtagtccttcgtatggggaaatacaacggtttgaaaggtcccggcccctttatgattatcccggttatagacagtgtgtcgacttatattgaccagcgtgtacgggtaagtgcatttaaggccgaacaaactctaaccaaagatacggttccggtaaatgtggatgcagtcgtatattggaccgtctgggacgtggaaaaagctgcattggaagtacaggagtaccaaaaagcgatcgaacatatcacacagactggtctaagagataccatcggtaagcacgaactgtcggatctcttgcaggaacgcgataagatagctgaggatttgcaacaggtcttagacagaaatacgaatccgtggggcatcacatgccagactgtcggtatcaaagatatcgctattccgcaagacctggccgaagcaatgagcaaagaggcccaagccgaacgtgaaagaagagctcgtgtcatcttgggaacggcagaaacggaaatcgcagaaaagttcgaacaagccagtaaaaaatataccgataatcctgtggcattacatctcagagggatgaatatgctgttcgaaggcttaaaagaaaaaggatcaatggttatcgtaccgagttcggcactcgacaccatgaacttaggggctatgggaggcttggtttcattggctaagaacaacgagacaccgaaataaactattttctaataacaaaaaattaccatttatgaaaatacacaaacaagggattacttttgttctccttctattagtcttcacaagttgttcacgaaaaccatcgctgcaatggattcccttcagttgggaaggtgatacaatttcggggatatacattgaaaaagcttttctaaatgttccggtaaaaatagagaatttaccctacgaattcacaatgcagtttgatttaggaacatataattctgtcttttacgggaatacttttgctccttatctcaaagaagccccatctttaatgaacaaaaaagattcaaccgggatgtataagaatgtcaacctgcaaatagggacagtggagtttagcaatgccaatatcggattcatgcagaatttcggaaatgaaatccctaaagattcacttcattcaaatacacccaagcatattggaacgatcgcatccgacatggtgcaagataaagtcttaatcattgattacaaatcaaacaagcttgcaatcacagactttttaccggctgaatacgaaaatctgccggctgaagaatttgaatcagaatatggggtaataaaattgcctttacggattaatggaaaaacatgtaaagtattgttcgatacaggttcaagccctttccagttaataacgacacaagaaagagcttggagcgtatcagaccttactattgtcgactctctaagcggtcctttatggtggggacaagaaataacattttatggctttaatgtaaccaaaccgatcgagttcggcggaaaagccttgaacaattcgaaagtctactacgccaaagacggcctttgggatagtatttatagttccctcgatgtctggggaataaccggaaatgcttatttctttgaaaacaccgtgattatcgattacaaaaacaaactattcaggataaaataaaaattcgaccccatacttcttcattcagatgcaagcgtaagttgttttctacattgccgtatatattcccgacaacgtcgaaaacaacttacacttgcatcaaaacaaaaacacattgccatcttacatcaaacctttgccagagcttggtctaggtcatcaatgatatcatcgatatattcagtacctatactcaggcgcacaatggaaggcgtgatatgctgtccggccagctcttccggagtcatttgagaatgggtagtcgtatacggatggatcaccaggctcttcacatcagccacattggcaagaagggagaatatttcgagcgaatcgataaacttccaggctgctacctgtccgccttcaatctcgaaagtgaaaatacttccggcacctttcgggaaatactttttataaagttcatggtctggatggtctggaagagccggatggttcactttggttactttcgggtgtttggataaatactcgacgactttcagagcattggcaacatgacgctccacgcggagagacaatgtttccagaccttgcagcaagataaaagcattgaaaggcgagatcgtagctcctgtatcacgcagaatgacagcccggatgcgggtgacgaaagctgccgaacctgccacgtcggcaaagaccgctccatgataacttgggtccggtttgcccaaggtcggaaacttatcggaatttgctttccaatcgaaattgccactgtccacaatcactcctcccaagctcgatccatgtccgccgataaatttggtggcggaatgaacaacaatatcggccccgtgctcgatcggacggatcaggtacggtgtaccgaacgtattatccactatcaacggaatattatgacgatgggccacctccgccacagcatcgatattggtaacatcagaattgggattaccgaacgtttcgacatacaccgctttcgtattctcccgaatagccgcctccaacgcctgcaagtcattgacatttacaatcgtgtgggtaatgccctgagccgctaacgtatgcgtaatcaggttgaaggaaccgccatagagattatcggcagccacaatatggtcgcccactccaagtatattctgcaaggcatacgtcacggccgccgcaccggaagccaccgccagaccagccactcccccttcgagagcagcgacacgcgcttcgaaaactccctgtgtcgaattggtcagacgaccataaatattcccagcatcacgaaggccgaaacgatctgccgcatgttgtgaatcatgaaatacataagatgttgtctgataaatagggacggcacgagcatctgttgcgggatcggcctgttcttgccctacatgaacctgtaatgtctcaaaatgtaatttctttgttgccatagtcgtattattttaaattgttcttcttgcttattttccagcaaaactatagcagacagagatatcagacaagatatatggaaaatacagaaaataacgctatttttacggccatcaacagaacatataaactgtatcaagatcgaaaaaaggattccgatagaattttattcttatgaacacacttgagaaattagacaaagtagacttgcagatcctccgtaccctgcaatcaaatgcccggctcaccacaaaagagctcgccgcgagtgtcaacctctcgtcgacacccgtattcgaacgcctgaaacgcctcgaaaacggaggatatataaagaagtacattgccgtgctggacgctgaaaagctaaacctgggcttcgtggtcttttgcagtgtcaagttgaggagactaaacaaagagattgcggcggagttcacaagaatcatacaagagattccgcaagtcacggaatgctacaatatatcgggaagttacgactacctgctgaagatccatgcaccgaatatgaagtattaccaggagtttatcttgaacgtgttaggcacgatcgacagcctcggatcgctcgaaagcacctttgtgatgaacgaggtaaagcatgaatacggaatccatatttaaacgccaccccgtccctatcttacatttattacttcagtgcataaatccgctggatgatgtccacaaccttcatgccttccagtacgttggtcgtaatgcattccgaacttgcaccggaaaggacacggaccacattgcggatcacgaaattatggttctgggcggaacctttataagggccgtagtcatttcccggattcgtcggcgccagttccggcatttcataatctttaatatgacagtattcgacttcgttcatatactgtccgccgattttcacgctaccgttctccgccacaatcagcatactgctttccatgttcctgttccagacagaagtggaatagctaaggcttcccattcccccgttcacaaagttgaaattcacaaagcccgaatcttcaaaagccgtaagtccggcatggttgaaatcggcaaagcgagcttggatattgcagatatccccgaaaagccagtacataatgtcgatgaaatgggagaactgagtgaaaagcgtccccccgtccaaagcggcatcaccatgccaaccaccgggtttataatagcgctcgtcacggttccaataacaattcaactggaccatatagattttacctaacctgccggaatctaccatctccttgatccaaacggaaggaggagaataacggttttgcatgacacagaacacttgtttacggtatttcagcgaagcatagaccaccttctcggcatcagcaagcgtcagtgccatcggtttctcgatcacgacgttgcaaccggcttcgacagcctgaatggccattgctgcatgcaagccgttcggggtacaaacatttacgacatctatggaaattccgctctgcaatagctccgtcagagatgaaaaaaacgggacatcgtatgcctcaatacccaattcctcacagggacgaatatcacaaagggccaccaattcggctcccggatcgcgtgtcaccatctcggcatgacgtttgccgatatggccacaaccgataactgcaaattttatctttttatccataagcattcgatgggggggatgtcaaaatctccttgtccccgcgcttgacgcggggccgcaaaaggacagaccttatcaatcagatttttatagggtcggttctaatgcgatcccacgtcaagcgcgggaacaggatagtttcgacacacccccttttttagagtttctgttatatattgctgttgtccgagggacatttccgtatgaataggcagggaaaggacggattcgcacaaacgggtggagacgtccaaattgccggatacacgggagatatgccgataagcttcctgatgatgcactggtactggataatagatcatggaagggattccccgttctttcaacaggcattgaaggacattccgcctgccgtcttttacctggaccgtatattggtgatagacatgagtcgaaaacgtcgatctcgcagggagaaccaacgaatcgcaggaggacaaagcatcatcgtaccgagaggcaacttgccgacgggtttccgtgaactcccccagatgcttcaacttcacatccagtacggcagcttgcaacgtgtccagacgggaattgcatccgatccacctatggtggtatttgcattcctggccatgattggcaatcatacggatacgggcagccaacgcctcgtcggaagtcatcaacgcacctccgtcgccatagcaggccaacggcttggatggaaaaaaagaagtcgtcccgatatgtccgatcgtcccggcctttcgtacccgcccgtcggaaaagatataatcggcaccaacggattgggcgttatcttccactacatacagatgataggcatctgccaaagccatgatcggctccatatcgcaggattgtccgaacaggtggacggccacgatcgcctttgtccgccccgaaacagccgcttctattttccggggatcgatattgaagctccggggatcgacatccaccagcacgggcgtcagccctaacaaagcgacaacctcggctgccgctatataagtaaatgccggcagaatcacctcatcgccaggctgaagctccaatgccatcaaagcaatctgcaaagcgtccgtcccgttaccacaaggaatcacgtatggaacctgaagataatcagccaaatgcccggcaaaggatttcacctgcggaccattgataaaagcacaactgtcgatcaccgcctgcatggcctcatcaatctcctctttgaaccggagatattgtccatgcaagtcgaccatctgtatctgttcttccaacat

SEQ ID NO: 314 - DNA, 9408 bp, unidentified
  source 1..9408: mol_type = unassigned DNA
atgaaaaagaaattgctgttgatgctcactctctgtttattggctcagtggagtgtggcacaagccccgaagtgggtagacaaagccaaacgtgcggttttctcggtagtgacttacgaccagaacgataagatactgaatactggaaacggcttttttgtcactgaagatggcattgcgctttctgactacaccttgttcaaaggtgcccagcgcgccgttgtgatgagctcggacggggcacagatgccggtggaggccattatgggagctgatgacatgtacgatgttgtcaagttccgtgtcggcatccccggaaagaaagtcacggcgctcactttggctgctgtggctccggctgtcggcgcggatgtatatttgctgccttattccacccagaaggaccgttcttttactaccgggaaagtaaaggaggctgataagatttccggcaactattcctattatacgctcgatatgcgtctgaaggacaagatggtgagctgtccgctgatgactgtggacgggcaggtcttcggcctggcgcagaagtcctccggacaagacacggctaccatctgctatgccattgacgctaatttcgccatgtcgcagaatatctccgcattgtcttatggagatatgtcattgaagggcatcggtatcaagaaggcattgcccgataccgaggagcaggctttggtgttcctctacatggcttcttcccaactgtctccggagaagtatatggagactctgaacgatttcattgcacaatatcctgccagtgccgacggttatctgcgccgtgcttcccagcatctgttcatgtcccgtgaagatgcttccatggataaggttgctgcagacatggataaggctttggaggttgccgcaaagaaagatgatgtgtattacaaccgggccaagataatctataattatgcattgggcaagcccgagaaagtttataaggactggtcgctcgacaaggctctggacgaggtacggaaagcgatagccattgacgaacttccggtttatgtccagttggagggtgacatcctgtttgccaagcaggagtatccgtcggcatttaccagctatgataaagtgaataagaccattctggcctctccggctaccttcttcagtgccgccaagaccaaggaactgatgcaggcacctgccgaagaggtactggctctgatggacagctgtgtggcccgctttacccagccctatacggaggaagccgccccttatttgttggagcgtgcccaagcccgcatgaatgcagaccaggcgcgcaatgccatgctggattatgacgcctattacaatgccgtgaacggtaaagtgaacgacatgttctactattaccgtgagcaggctgctttgaaggccaagcagtaccagcgtgcgctggacgatatggcgaaggccatcgaattgaatccggaggatttgacctaccgtgccgaactggcagtggtgaatcttcgcgtgggacgttacgaggaggcgttgaatgtgctgaaggctgccttggagaaagaccctaagtatgccgaggcctaccgtctgatgggtatcgcccagctgcagatgaagaaggacaaggaagcttgtaccagctttgccaaggcaaaggaattgggtgatcccaatgtggatgctttgattgagaagcattgcaagtaaagggatgggatagaataaaggctctgctttcgcaagcagagcctctgttttggggaactcccccgtgttaaatgagttaagtctaggtataacaggttatgagtgaaattacgttgttttatttataaaatgcgtggatttccggaatactgcatatacttctgatttttttatttcaaaaaagaaaatagactcgattattaataaaaacaaactttaacaattatgaagaaagtgatttgcagccagcaggcaccgggcgccataggcccttatagccaggctatcgaagctggcggaatggtatttgtatcaggtcagttgcccattgacgcagctaccggaatgatggctgaaggtgcggaagcgcaagcccgccagtccttggagaatataaagcatatcctggaagaggcagggctgggtatggcgaatattgtgaagacaaccgttttcctggcagacatgtccttgttcgctgatatgaacaaggtatatgccacttattttgacggtgctttcccggcacgttcggctgtggcagtgaaggcgctgcctaaagacgccttagtagagattgagtgcatcgcggttcgctaacaagtcggccacaatgaaactgctgcctcccacgaagatgaaatcttccgggaggcttttttcttgtgcggcccgcacagcggcgggtacatcaggatagcaatctccttccagacctgctgcttcggcaagctcctgcagttcgctttcgggcaatgcccgcttcacgctggctttggtgaagtagtaggtcgcttcccggggcagcagggccagtaccccccgtatatccttgtcattgaccatgcctatgacgatgtgtagctggcggtaagtttgctgtttcagttgttctgtaatgtaggtgatgcctcccacattgtggccggtgtcacaaatcagggtgggcgactcctgcagtttttgccagcgtcccatcaagcctgtcagttccaccacacgggcaaagccattgcgcaccgcttgtccgtccagccggtagccggcttctttcagtagcgggagggcggtgagtacggtccgggcatttttctgctggtagagccctttcagttcgtattctattccgggatagtcctcacagtcgttctcttcggcaaagtagataggagcacccgtcgcctgcgctttttccagaaacaccgatttcgtttcgggagtggtttcgccgattacaacggggataccgcttttaatgattcctgccttctctcctgcgatttttgccaaggtgtcccccaggaattgagtatggtcaaaactgatgttggtaatgatgcatacatccggacggatgatattggtgcagtccaggcgtccgccgagtcccacctcgattacggctacatccaccttttcatccgcaaagtagcggaaggccatggcagtggtcagctcaaagaaggaggggtggaggggttcgaagaatccacgttcctgcgctacaaaacggatgacgtattcctcgggtataggctgtccgttaatccggatgcgctcccggaaatccaccaggtggggcgaggtgtagagtccgaccctatatcccgcttcttgcagtatagcggcaagcgtatgcgagcaggaaccctttccgttggtaccggccacatgaatgctgcggaaactgcggtggggatgtccgaaatgttcgtccagggtcagagtattttccaacccctccttgtatgctgagccgcccacctgctgaaacatgggcacactgttatataagtaagttaaagtgttctgataatccatcttttataatatttaacggagaagcaatcctttctccctattaatttgttatctttaaaagcgacaaagataatgcagaccggacgcaatcaagcttgcttgaaattgcttgcagtgtaacttatcttaagcttatgcaaaggtattaacaatttaaatctaacgtgtatgggagctaagaaaaattttgtgattgatacgaatgtgattcttcacgattataactgtttgaagaattttcaggagaatgacatttatcttcccatcgtagtccttgaagaactggacaaattcaagaaaggcaatgagcagattaatttcaatgcgcgtgagtttgtccgtgagctagatttgattaccgatgacaatctgttcaccaaaggggcgccattgggagagggcttgggccgtctgtttgtggtggcaggcatggtggactctccccgggtacgtgattcctttcccgaacgcatccccgaccatcagattctgtcggtagtggactggctttccaccaaaaagcctaaaatgaaaaccatccttgtcacgaaagacgtgaatctgcgcatgaaggcgcgttccatcggtctgctgtgcgaagactatatcaatgataaggtaatcaatgtggatatattcgaaaagtcgaatgaagtgttcgagggtattgaccctgtgctgatagaccgcatttattcttccaaagaaggactggacatcaacgagttcgattttaaggacatcattcgccccaacgaatgctttgtgctgaagagtgaccgcagcagtgtgcttgcacgttataatccctttacccattcgatttgtcgggtcaacaagacaaggaattatggcattgaaccgcgtaatgccgagcagagctttgcttttgaggtgctgaacgacccgaacatcaagctggttgccttgaccggtaaggcgggaaccggcaagactttgttggcgctggctgccgcattgggaaaacttaccgactacaagcagattcttctggcacgtcccatcgtggccttatccaataaagaccttggattccttcctggtgatgccaatgagaaagtggctccttacatgcagcctttgttcgataatttgaatgtaatcaagcatcagttcgctgccaattcctctgaagtgaaacgcttggaggatatgcaaaaaagtgaacaattggtcatcgaggcattagcctttatccgtgggcgcagcttgagcgaaacctactgtattatcgatgaagcccagaacctgaccccacatgagattaagaccatcatcacccgtgccggcgaaggtacaaaaatggtgtttaccggtgatattcagcagatagaccaaccctatctggacagtcagtccaacgggcttgtctatatgatagaccgcatgagagaccagaatttgtttgcccatgtcaatctggtgaaaggggagcgcagccagttgagcgagttggcaagtaatctgatgtagcggataccgcattttccggggcaaaactatttctatcccgctttctgactgttaaaacgggggaggtgggatggtttctttatagacgataaataattgttataacatttttttatcgatttattgtctgttttgactaaaatagtgtatctttgcctcgcctaaaacaaaactgtcaagcgaaatgaagcgaaatttttttcatcggtatctttccgcgaaagtgcttccgatatggactattctgttaattgatgtatttatcatcgtcatatccagtctgttggcctatgctctccgatatgatttcagaagcatttttctggaatcatctaccattgacaagaccattttatggacggttgctgtcaacctgattttcttccgtgttttccgtacgtattccaatgtactgcgcttttcctcctttgtggatatcatgcgcatttttgtgtcattgacggtgtcgtatgcactgctgatgataacgagcgtcctgacggaaagctatttggagtttaacctggctccggtcagcgtgctgttcatgtcctatatcatcagctttgccatgatggcatgctcccgtgtgattgtcaagactttcttcgaggcgctgaacttcgacggcacccatagtgccaatgtgttcatttacggtgccaaggaagccggggtcaacattgccaaggcattgcgtgtcaatctgcgcaactactaccgtctgcgcggattcattgcggacgaacctgaacttatcaataaggtgatgatgggtgtcaaggtgttccctaacgacgatacgctgattgatgtgctgaacgaccgggatgtgcagaccatcatcatttctcccgccaagatggaggaactgaagaagtccgacatggctgaccgcctgctggtgcacaacatcaaactgatgaccgcaccccccttgagtgagtggaacggtcaggcgctgagccgtacgcagctgaaggaaattcagattgaggacttgcttcagcgcaatcccatcgagatagatatccataaggttgcctctcatctggaaggcaagcgtgtgatgattacgggcgccgccggttctatcggcagcgaaatcatgcgccaggtggcttcgttcaatccctacaagcttattttagtggaccaagccgagactcctctgcatgacatccgtctggaacttcaggaccgttggcgcgacatcgatgccgagaccatcatagccgacatctccaatgccacgcgcatggaggatatcttcagggagttcaagccccagtatattttccatgcggccgcctacaagcatgtgccgatgatggaggacaacgtttccgagtccatccaggtgaacgtattcggtacgcgcaccgttgccgatcttgccgtgaaatacggtgccgagaagtttgtgatgatttctacggacaaggctgttaaccctacaaacgtgatgggctgttccaagcgtatttgcgagatttatgtgcagtctcttgcgaagaagttgcagaaggagggaggccatgccactcagttcatcactacgcgtttcggcaatgtgctgggttccaacggttctgtcattccccgtttctgcgaccagattcagcgtggcggcccggtgacagtgacccatcctgagataatccgttacttcatgaccattcccgaagcttgccgccttgtccttgaggccggcagtatgggtaacggcggtgaaatctacatcttcgacatgggtaagccggtgaagattgtggatcttgccaagcgtatgatcagcctttccggacgtacggatgtgaagattgaatttaccggtctccgtcatggcgagaagctctacgaggaactcttgaatgtgaaggagcttacaaagcccacctatcatgagaagattatgattgccacggtgcgtgagtatgactatgacgaggtgaaggagcgtatccagaagctgattgatgtaagttacacttatgaccagatgaaaattgttgctgccatgaaggatattgttccggaattcgtgagcaagaattcctgctttgaggcgctggataagaagaaatgaaaagatagcggtatagtataaaatgaaagggtgataacgtcattgtagtgttatcaccctttcaattttattgtcttcttgtcagccttttgtctcattcatgtgaagagaagtatttcaagaactgtgtacgttcgaaggtattgactcccttcgggtcgtttacgttcagaatacctttgaactggctgatggtttccatacctttgcggtccatccacaagttgaggaagcggatgtattcttcaatgatggtagctgaattctgataaagcacactgcatatctctacggccgaagcacctgccaatattgtcttgacaacgccttcgggcgagtggataccaccggaagcggcatagtccagcttgtttacggccgccgaagcgatgcctatccagcgcagggctttagacaaatcggcttcattgctgaatacgttaccggatacttgtatcattttctcaatgttgatgtccggctggtagaagcggttgaacagcactactgcggcggcaccgttggcgtacagctggtctatcagcgctatcgggttggtcaggttgtcacccagcttcatgatgacgggtatcttgaccgtcttcttgatgtggctcagaatgtcgatgtggcgttgctcgaaactgccgtaaacatattgtacatccgtctgcagtgcaaggatattgatttccagtgcgtctgcaccggcttcttctattttggcggcaaattccacccagtcggcattctgatagcagttgatgctggctatgatggggatattgcaaacctttttgctttccttaatcaggttcagatattcacccagcttatgttcgcggatatatcctacaaggtagtcactgccttcggggtacatgttcgggtctcccatccagtcagcctccatcatgatttgctcttcaaagagtgattttagcacaatggcacctgcgccggcctcagatagtttctggttcttggcggcgctgtctgtcagtccggagctgctgacgataatggggtttctgagtttcagccctgcaaaagtagtttctaatgttgccatgataatgattttttatggttaatagtttctttctccaaaaatcttgcttcctacacgtattaaggtgctcccggctgcaatggcctcgtggtaatcgtgagacattcccatggacaattcccggaatgactctgcatcggcaaaccacttggttttcacttcattgaagaagctacttaaagaacaaaactcagttttgatttgttcgtcattgtccgtattcgtggccatgcccatcaatccgcatatccggatatgattgagctctctccattcaccggctgccagcatttcccggcattcgtcaaagctgaatccaaacttggtctcttcccgggcaatgtgtagctgtagcaggcagttgacggtttttccggctttggcagcctgcttgttcacttcggccaacagcttgtaggagtctatgccatgaatcagcgctacgtaaggaacgatatattttattttgtttgtttgcagatgcccgatgaaatgccattctatgtctttgggcagactttcgtatttggcggtcatttcctgcaccttactttctccgaacacacgctggccggcacgatacgcttcttctatcgcctcgttggggtgaaatttggaaacagccaccagccgtaccttttcaggcagttcgctcagtacttgttttaaattctctgcaatcatcgtttttttgagttatgagttatgagttataagttatggggcgcaataataactcataacttataactcatcacttaaattaaacttccggtttgtcgtcgggctctgcactgtacggatatacatccataatggcagtttccgctacagatgctatctggtagtcggccattgtgcctttcatgccctcatccagtttcttcactgcatcacgcagatcggcagcctgcaccaatacctgggtagaggttttcttttccgcaccgcttttctcgtccagtgtgatgaaaaccagtttacatttaaaccagcggtcggcagcttcctcttcgctggggaacaattcgctatagttggcacgtttgatgtccgatacggtgaactctcccgaaatgaacggcgtcatctcttcgatgatgcgtgcttccgcttccgtaaaactgagggcatctaccaggtacggttcggtcaccttcttgttcattccattttccattgttttctcgtaacggatcttacattcaaaccatgtatgcattgccat

SEQ ID NO: 315 - DNA, 7781 bp, unidentified
  source 1..7781: mol_type = unassigned DNA
ttataaagcctttcggttactgataactcgcatggcggcagtgtactgctgacaaggcacagacacgtgaatgccattacctttgtcctctgttgaagcggtgatgtaagctgacttcagcaattgcttcacactttccacttcccaggggctacctgcgaaaacgttaatctgagaaatctttctacttgtaatcatgtgctttaaactttttagttgtactttccggtcgcaaatgtaagtggtttgcgggaaaccgaatagctcaaatcgatcaaaaagtaacataaaaggtgcaaacgatttagaagtagcttattcctcatatttttttcttatttcgtatcgttcttccggatttccacacgacggatctttccactgatggttttcggcagttcgtctacaaattcaatcacacgaggatatttgtaaggggctgtcactttctttacatgattttgcaattccttgataagtgcttctccctctttccctttatattctttagccagtacgatggtagctttcactacctgaccgcggatttcatcaggtacgcctgtgatggcacattctattacagctgggtgtgtcatcagagcactttccacttcgaaggggccgatacggtaaccggaactcttgatcacatcgtcggcacggcctacaaaccagagatagccgtcctcatctttccaggcaacgtctcccgtatagtagatattattgttccaggcttcgtgtgtacgttccggatcgcggtaatactctttgaacaatcccagtggcttacccttgtctgtacggattacgatttgtccctgttcaccggcttctacggaacggccgtcattgtctatcaggtctacatcgtattgtggattaggcaatcccatacttcccggtttcggttccatccaaggcatggtagcaatggtcagcgtggtttctgtctgtccgaatccttccatcagtttgatgcctgtcagtttcttgaaggtctcaaatacggctgggttcagagcttcgccggcgatggtacaatattgcagtgatgagagatcgtactttgtcagatcttcgtgaatgaggaaacggaagatggtgggaggtgcacagagagaagttacgtgataatcctgtatcttctccaggatggcggcaggggtaaatttctcgtggtcatacacaaatatatttgctccggcaatccattgtccgtaaagtttgccccatacagctttcccccaaccggtatcggcaatggtgagatgcaggctgttttccgtcaggttatgccagaaactaccggtaacgatatgccccaacggatatgtaaagtcatgggcgaccattttcggttcaccggtggttccgctggtgaagtacatcagtgagatatcttcgttcgtattcggatgttccggcttcacgaaaggtgcggcattttcgatccctttgtggaaatcatcgaatccttcggctacttggggacctacactgacgagtttcttcacgctgggagaatccggcatggcagctacaatatgatccgtgataaccgattctcctgcacaaacaatcatcttgatgtccgcagcgttacagcggtacacgatatctttctttgtcaacaagtgagtggcgggaatgacgacggcaccgagtttatgtaaagctatggtgctgtaccagaattcaaagcggcgtttcaatatcaacattaccatgtcaccatggccgatgccgaggctttggaaatacgaggcggtcatgtccgtataacgtttcatgtcggcaaacgtaaattgccggtgttcacccttatcattagtccataacaatgcaggtttgtcaggttgttcggcagcccaggcgtctactacatcgtatccgaagttgaagttttccggtacgtttattttaaagtttttgataaagtcctcttgtgtagtgaaagaggtttgtgataaaaatctttctaccataattataggaattaagaatgagagattcccttcattctccatttagttgttacatgataattgccaggaatcgtaccgtttttccatccagtgctttcatgccatgcggcaattttgaattgaagtacaggctgtctccttcgtttagtataagctctttgccatcgatgttgaccatcatgcgcccttcgagcacaagactgaattcttgtccggcgtggctgttgtaatgtatcggttcatcgtccggtttaggttcaacggttacaatgaacgggtctacgctacggttcatgaaaccagaagcgagggcttgatatttgtaggccttggtacgttcgatgctgacaccttttccggcacgagtcaggaagtagctgctcattttaggttcttcaccaaacatcagtgcgtccaatgaaactccgtatctgcgtgctatcttttgcaacatacttacggagatatcaaaatctcccgtttcggcaagacggtagtcgtaaggagagatgtcacattcacgggcaatgtcttcagcggtcagctccagtacatcacgaagcccgcgaaggcgttctgctatttgcttaatttgttcgtccatgtggttgtttatttaatgaattaattgttagtcttattgcttacttgctttgatagcattgatgatggcggatgtataaccgtcatgttccagttcattgatacctttgatggtaataccgccgggggtacatactttatcgatttctacgctgggatgcgtatcattattcagtatcagttcggctgctccctttaccgattgagccaccattctcatagcatctttgggataaacccccatttctataccggcttgcatggcagcctggatgtatttcaacacataagcgattccgcaggaagccatggaagtgcaggctgcgaatttttcttcggggatcagcatggcaagtcccatctgattgaaaatatccagcatcagttgttcttgttctttggtcgcattacgactggcaatcagtgtcatactttccatctcgctgatggcggtgttaggaataatgcggaacatggtcatttccggttcgggtacgtagtgagccagctcttcaaagttgatgcctgcagcaacagaaatgataatttgtttactcttcagtttcagttcgcgcagcacacctttgataagccacggtttcacagcgagtatgatgaattcggcgccgatgatggcttcctgattgtcatgggtgatttgtaaagcaggaaactctgcttgtagttcatccaactttccttgtgagggattagaaactatgatatccgaggcggggataatacttccctttgccaatccacgggctatagagccgcccatgtttcctgctccgataattgctgttctcatatcattctgttattaaaagggttgtcgatgggcaaaggtagatattttttctacctttctaacctaattgatgtaaaaaaagtgcttgtgtatttaaaacaacaggcagccttaagaaacgctgaaacgcttgaaggctgcctgtttattgctgattatgttatcaaatatactttaaagtacttttctgaaacgttcgaggaagagattggcttcttccatgctgaggcagaggggtggaagcaggcggagtacatttgtaccgctgacaccggtaaatacatgttgttctttcaacagtttcagacgaagttcctttatcggttcttcaaattcaagaccgatcatcagaccacgtccgcgaacttctttgatctgcgggaactttttcaactccgtcatcagatactcacctaccttggctgcattttcaaccagattctcctgacctattacgtccaagacagcaagcgctgcgctgcatgccaggtgattaccgccgaaagtagtacccaactgtccgtaaaccggagtgaacatcggactgataagtacaccggccattgggaaaccgttaccgatgcctttggctaccgtgataatatctgctttgataccgttatattgatgagcgaagaacttaccgctgcggccataaccgctttgaatttcgtccagaaccaatatcgtattatgagctgtacaagcttcacgcaaagcctgcatgaattcatctgtcggcaattgaataccacccacaccttgaataccttcgataatcactgcgcaaacatcacctttggccagttcgtttttcatagcttcaatatcgttcagcggaaggtaagtgacatgtccgcagtcattaataggagctatgattttgggattattagtcacttccacggcaagtgaagtacgtccgtggaatgccttgttgaaggaaaccacacgtgtacgtccgttgtagaacgaagcgagtttcaaagcattttcgttggcttctgcaccgctgttaatcaggaataaggagtagtcatcataaccacaaacttttcccagacgttcagcaacctgttcctgtagcttgttaatcacagagttggaataaaatcccaacgtggcaacctggttgctgatcatctccacgtaatgcggatgtgcatgaccgatggagataacagcatgtccgccgtagagatcgaggtactcagtaccgttctcgtcccacacgtggcagccttttcccttgacaatgttgatgtcaaaaaggggatatacgtcgaataagttcatttctttaattctaaattacaaaatacaaattacttagaaggcgctgggtttcaatcgtaagccgacggtttcttctaaattgaacatcagattcatgttgtgcaccgcctgaccactggcacctttcagcaggttgtcgatgcaggagatgataagcagcttatcaccgtgcttttccaaatgcagaagacatttgtttgtgttcactacttgtttcaggtcaatgttcttttctatgatatgtacgaaagagtctttggcgtaatattcttcgtacatacggactatttcatccagtgcaactttagtttttactacgatggtagcaaaaataccacgtgcgaaatcaccgcggtaagggataaagtcaatatccgcatcaaaactgttctgcaattgcttcagagattgcttgatttcgggtacatgctggtgctcgaatgccttgtaaacactcatgttgttgttgcgccaactgaagtgactggttgatcccggttttacaccagccccggtggaaccggtaatggcattcaccatgatgtcattgttcagcatcagatgtttggcaagggggagcaatcccaattggatacaagtggcaaagcaacccggattagccacatgctttgctttgcaggtagcgcgacggttcaattccggcaaaccgtaaataaagtcatgttccggagaagcgatgcggtagtccatagaaaggtcgataattttcaattcctcgggaaggttgtgactctccatgaacttcttcgtgtcgccatgggcggtacagaagaataacacgtcaattttgtccaaaggtaactcgtcggtgaagacaaggtccgtttcgccgtacaatccttcatgtacgtcggtaattttgtttccggcgttacttgagctgttgatgaatacgatttccgcttccggatgattgatcagcaaacgaattaattcacctgccgtatatccggctccgccgatgattcctactttaatcatgttagtttatactattattcttttatctgttatacaagttcttttcctcgggaacaataagccacattataaggtacacggggataccggcaaatacggtaaaaaacgtcaataacgcatagccgatacgtacgagtgaagggtcgagtccgaaataagcggccaatcctccgcagacgccggcaagcattctgtcgctgcgtgagcgagttagttttttgttattattatccatatctgttcgtataattgttctatcccctaaccgttctctatgagagatgggttaggggataggctttttagatttcttcgtctttatgattgttataatatactctcagtggagtagaagtaaccttgatgaaacctttcgcatcttctgctgtccagcctttttgcatttcgccatattcgccgaacttcgttttcacaaggtcgtcttctgattctacacctaccgtagagaaagataatggacgaagttccagaatagccgtaccgtttacgttacgctggctttcctgtagcatggcttcgatgtcgcgcatcaccggttccagatattggctttcgtgcaggaacataccgtaccaattggcaacctggtctttccagtattgctgccatttactcagtgtatatttttccaggaatttatgtgcaccgataatcagcatcggagcagcagcttcgaaacctacgcggcctttgataccgataattgtatcacccacatgcatatcacgaccaataccgtaagcggcaccgatttcttctactttctgaatggctttgatgggatcatcaaatttctcatcgttcacagctttcaactcacctttttcgaaagtaagacggagttgttcgctgccttcctttacacagtgtttcagataagcgctttcgggtaatccttgtgcggaatccagaatctcaccaccgcagatagaggtaccccacaaacctacattgtaagagtatttcagtttggtgaagtctgctgagaaaccatgtttgttcagataatcgatttcttcctggcggctcaatgccatatcacgagttagtgtgatgatttccacgcccggagccaatacaaggaatgtcatgtcaaaacgaatctggtcgttgcctgcaccggtagaaccgtgagcgatagcatctgcaccgatctcgttggcatagcgtgcgatggcaagtgcctggaagatacgttcggaacttacggaaataggataggtaccattacgcagcacgttgccaaataccatgtatttcaagctcttttcgtaatattcctgcgtcacgtcgatagtgacatattcttttgcgcccagtttataggcattttcttcgtttgttttcagttgttcggggctgaaaccaccggtgtttgcacaagctgcatacacttcataccctttttccttggcaaggtacattaccgtaaatgaagtatcaagaccgccgctgaatgcgactactacttttttcttttcttccatatcctttgttttttaaattttatcatcttcatgcagagccgggtcgtagagcattgctgtgcagatgcagaatttgcggttcttggctactaatatatcatggttgatgcagccttcgcagcctttccagaaggattcgtcatcagtcagttcattgaaagtgacgggaacgtatcccaattccgtattcattttcatgacggcggctccgctggtgagactgaatactttggcgttgggccatcgtaagcgtgccaggcggaaagatgccattttgatacgcttagccaatccaataccgcgaaagtcgggatgcacaatcaaaccggaagtcgcaacatattgtttgtttccccaactctcgatgtagctgaagcctgcaaacacgtctccgcataaggcgatgatggcttttccttctttcatttttgtcgccacatattcgtgtgtgcgttctgcgatgcccgttccacgtactttggccgcttctctgatggtatccaaaatcttatccacataaacttcgtgagaggcgtcagccaccatcacgtccacttttttggtatccat

SEQ ID NO: 316 - DNA, 18730 bp, unidentified
  source 1..18730: mol_type = unassigned DNA
  misc_difference 15466: note = a, c, g, or t
  misc_difference 15467: note = a, c, g, or t
  misc_difference 15468: note = a, c, g, or t
  misc_difference 15469: note = a, c, g, or t
  misc_difference 15470: note = a, c, g, or t
  misc_difference 15471: note = a, c, g, or t
  misc_difference 15472: note = a, c, g, or t
  misc_difference 15473: note = a, c, g, or t
  misc_difference 15474: note = a, c, g, or t
  misc_difference 15475: note = a, c, g, or t
tcatgctttgctggaatcctcataattatttttaagcagctggctgataaggtcggctgcgatttttttgtcagaaggacgcagatgacgataattatcaaaaaccacagcttcctctttgtcgtggatcccgttcccaatctgaagcagtgccgaccggtctgttatatagtcgacggaaacccgcagatagtcagcaatttcgcatatcacatcatccggaacatgaagatatttgccatgcagatacccattcagcgtggttggggaaatggcgagatcctgtgccatttttcgctgtgtgattccgttttcctccattaataagagtacacgttcttcttgaattttcattagtgagagctccttttcgttaaattaaaaggattttagctcacttgactggtaaatattggaaagtaccgattttctgaatttattcttaaaatctaagaaaaaagacgatggctaaatccagccaccgtctaatgttatgatttgacctgtcagatattcatttccttcggcaagcgtcagaacaagggaggcaacctcctccggcattccgaatcttccggctggaatttcatctgttaatgcagcacgttcttcttcggaaaagcatgcattcatctgtgtgtcgatgcagccgcatgcaatggcgtttacctggatattgcttggtgcaagttccttggcaagacctctggtaaaagaattcattcctcccttgcaggcggaataggctacttcacaggatgctccaacatttccccagacagaggaaatattaatgatttttccggattttctggaaagcatatgaggaatcgccagtttacaggtggaaaatacggaagtgagattcacacccagaatatgattccattcatcgatcgtcatgtcagttagcagaccgacatatgagatcccggcattgttgactaacacatcgacaccgtgaaaacgctgctcaatatgtgaaaaaagctgtgtcacatattcgaaatcagagatgtcaccaatacttgcaaggacatctacggaatagtctctttccagatcgttttttaaatgtaaaagttctgtttcacttttggagcaggtgatgacaaggttataacctgcttttgcaaaagcaacagcgattgcacgtccgataccacgtgacgcaccggtaattagaactgtttttttcatgccattatatctttcttcatagcttccttatcgttatcatagaacttggtcaacagggcgagaagcttcattttgcggtattcctctttgctcacaagtggttgatagtaagagtaacgtcctttctgataagaagccagaaagccttttttcttagctcttgcaagaaaagtagatactgtctgtggtttccaggcagtatgatagcgctcgtttgtctgagtcatgactgctgctaaatctaattcagcctcattgttccagataattgtcattatcatttcttcgcaggctgacaattctatattcttcatagtgtcatctcctttttttgcttgtccgattattatagcatatagccagcagcaaaacagccggaaattgctattataatgtgaattttttgttaaattttatatttgtagtatgtttgggtgaaattttgtgtgaaagtaataaaaaaggatattgatgtgatatcaatatcctctcagtcagtcggaatgacgtgattcgaacacgcgacctcttcgtcccgaacgaagcgctctaccaagctgagccacattccgatatatttggttgtacgtccaaaaccgtactttgttatattagcataattaaatgcaattgtctagaaaaaaatgaatgtttttgcgggtaattatgtttacaattaaatttggatgtagtattctttgatgaggtgatacataacggtcactgtaaaaagaataaatacagagaatagaaaaaggagaacttatgggaagagatgtcattattgcctgtgattttaacagcaaagaagaagtagtgagctttttaagcaaatttcaggatgaaaagccatttgtaaaaatcggaatggaacttttttacgcagaaggacctgagatcgtcagaacaattaagaagatgggacataagattttccttgatctgaaattacatgatattccaaatacagtcaaaaaatccatggcagtattatcaaaccttgatgttgatatgtgcaatgttcatgcggcaggaaccaaagcgatgatgtccgcagcgattgagggactgacaagagcagacggaacgagacctctgctgattgctgtgacacagcttacctccacaagtgaggaagtgatgcaggaagaattgtggattgacaaaccgattgacaaaacggttatgcattatgcaaaaaatacaatggaagcagggttagatggtgtggtatgctctccattagaggcaggaaaagtacacgaagtatgtggagaaaaattccttaccatcacaccgggcgtgcgttttgcagacggagatgtaggagatcagaagcgtgtgacaacacctgcaaaagcaaaagagcttggctctgattatatcgtagtcggcagaccgatcacacaggcagctgatccggtagcggcatacagaagatgtgttgccgagtttgttggctagaaaaaggaagattatggagaagaaaaaaggaattagcggaagtaccttaaaaatgatcgccatcgtcaccatgctgatcgaccatatcggcgctgctgtgctggcaagacttctgatggtaaacgggctgggagaacttgaccagacaaatgcagatgcaattatgcagtggctttcagcaaatggagcactgtattggacatacacgatcatgcgaatgatcggacgtgtggcgtttccaatcttctgctttttgttggtggagggatttctacatacgcatgatgtgaaaaaatatgcgatgcggcttggactgtttgcattgctctcagagataccgttcgatctggcattcagcagcaaaatactcgaattcaattatcagaatgtcttttttacactattcattggtttgctgacgatgatcgcttaccgtgcagtggaagaaaaagaagagtggaatcaggcgttgaaggtgatcttgtatatcctgatcgtggcagcaggaatggcactggcgtattttttaaagaccgattatgccgaaaaaggtgtattctgtatcatggtcttatacattttccgcaagaaaaaaatgtggcagctcatcgcaggatgtgcatcattcatctgggagacaccggcgctgttcggttttatcccgatcgcattttataacggaactcgcggctggaagatgaaatatttcttctatattttctacccggcacacttattgattttatatctgctttgctatttcatgggaatcagcggatattcagcggtttagcttttgatagaaaatgaaatacaggcttgacataatacaaaaggggcaggaatcgtgaatatatatgacacaaatgaatcagtggaattgtacgacaaccgcggaattgaaatggcaagaaaatgcatacgcagggcaaagagagagtatgcgctcagatatctgattttactgttattatttgcgcttggcatggtggataaaatactgtttccacagatagaaataaagctttcaagctacatccttctttacagtctatgcatgctttcgatgatggggtttcgcattttccataatggaattgttgcaaagcggatgaaggattttacgctgcaggaaaagcacgattataatctggtcatctatcgagaaaatcataataaaaaatttttcttaaagagtataaccctgctgacaatggccaagcaggatatcctgatggaaaaaccgttggctgcaaaacaggcactttcccagattgcggtagaaagtctggaaaaaaatgtattgaagacctattattttctgcttgcagcagcatcatttcgtgcgagggaggatagctggcagatcgaactggagcattgcgctgcggtgccttctaagaccgttaagctgtcggatgatgaattacaggagattttcagaagcggggatcagaccaggctgatggacactgtaaaaacgtgggagattatggcagaacaggacacaaaaacagagccatatctgaatctttggtttggaatattgatggctgcaactgccgtcggttatggaatctggacatttgttgtgggaagttcagatagttattataattttatgcttattggggcaacgctgtttttagtgggcttgtggattttagtcagtgtaaggattgtttatcttctgagacgttcccaaaataatgggaagggactaggaaaaaagaagggaataagatttttaactatttttatcctcgtgctgatgtggtgctttattgtaggattgagtcttgtgatttttgtgggtgcaggaagtgatatacatacacaatgggaagcaatgaagacggggaagcagcaggaaagccaggatgaaacatatcataatggcacagagatttccacagaagctgacataaaaaatcaggaaactgaaaacacagagatggcatcagaaataatagaagatatggaacttaaaccggatcagagcaatatagtgaaatctggaccgatcacagacagtgaatatgcgtctttccagatcacagcagatgcatcttcggtggaaggctttgatgtgtttgatgattatgctgagacaatggaaaagaatttcattggcacatggtattgtccgagctggggcatggcgttccgtattcaggaagacggtgcttatatttatacattagaatctgaaaatataggattttgtaatcaggaaccatatgtatgggaactgacagaccgctcccaacaggggttatgcccaagactcagcttttattatgatgatagcaaggctggagatatgtttacatgctatgtagcaggctgtacagatgattatttctggtgtaatctgcaggaaatggtctggtacaggcaataggtgtaattttgtggatgaattgagagtaaaaaggagggcagcatttccacttccgaaatgctgcccatatattttaaccctgtggatacgggagaaaacggaacccacggctggaaaatgaaatatttcttctatgttttctatccggcgcatttactgctcttatatctgctttgctatttcatgggaatcagcggatattcagcagtttaaaatgtggaatgcttaaaagttttataagaaattatgcggcagattattaagaatgattaagaaaagcttgattgaatcccggactttctttttgtaacatgaattcagacaggaagtactgaatgattacaaaaagaaagccggggatgaaaaatgagtcagagagaaaacgtaaatccgagaagggaacaggatcacagaaaaaacagcagaagatatcagaaaagagcggcagcgagaaggcggcgcaacacgatttttatcatggagatcgtgttgctgcttattcttgcggtggttcttttttttgtgtcaaaattaagcaaaattgagaaaacaaagctggatatggacaagattgaggtcaatgaggatatttcgcaggaatcccggaaaattatgaagggttaccagaccattgcgatgtttggtctggacaatcgctccaatggaaatttgtcgcaggggcggagcgatgtcattatgcttgccaatattaataatgatacaaaagaggtaaaattggtttctgtctaccgcgacacttatttggataccggagatggaattttccagaaatgcaatgccgcctacgctaagggtggaccggagcaggcgatatctatgctaaatgtaaaccttgatttaaacattacagattatgtgacagtcgacttcaactcgatcatcgaatgcgtcgatttacttggtggtgtggacatggagatcacagatgatgaggcgtctctcatgaccggatatatccgggagttaaacgaattgactggaaataaggccgagaatcttacgcagggaggcacatatactttaaatggtgtgcaggcatgtgcatatgcgagaatccgatatggaggcggtgatgattaccgcagaacagagcgtcagcgtacggttttgaccgcgatggtgaaaaaagcacagcagtccgatcttacaaccgtaaataagctcatcaatgaggtatgtggtgatatccagaccagtttttcaaatgcagaactgttagcgcttgcgtcacaggttttccaatattccattggagacaccacaggatttccatttaccaagacaactagggttttgagcaaaaaaacaggtgatgtcgtgataccgtgtgatctgagcgacaatgtaaaagaactgcatatctttttgtatgaggacagtgcttacaccgcttccgataccgtgaaacagaacagtgaaaaaatcgtgtcagataccggatttaaatccggcgacggacattaaaaaggagggcagcatttcgaactttacgaaatgctgcccatatatattttaaccctgtagacattggaaaaaataatgtccacaggaattgtatttagacggaactgttccaaccccaaactgctttgaaaccggcagctccttttgatgattttatattaaaggaaatttgtgacagaaatttgactggaaagtgaagaatctcttaagcagttctatgatatttataaactgggtatcagtttttttcataacaaatctgtggaaatgcttgcacaaattgcccgaaaatggtaacttagttttgaagattaagcagggtggctttataagccgccctattctgttatagaaagcagggagacaaaatcctctgctcctgtaaggacagtcgcatttgctccgcaaacaaggaggattatgaataaatttgtcttacgtcaatcattattattacttttaactgcgaccatctggggcgtggcatttgttgcacagagtgtcggcatggattatgttggtccgtttacgtttaatgtgatgcgaagcatcattggaggtgtggtactgcttccatgcattgcccttttgggaaagataaatggaaaaggcaacacggaagctgcaaaaaaaatggatggcaaagagcggaagacacttttcattggcggtattgcctgcggtgtgcttctctgtattgcaagtaatctgcagcagtttgggatcatgtatacatctgtcggaaaagcaggatttatcacagcaatgtacattgtggttgttccggtacttgggattttttttggaaaaaaagtgagtggtaaagtctggtgtggcgttgggatcgcggtagccggattatatcttttatgcatgacagagagtggattttctgttcagaaaggcgattttctgttgatgctttgcgcactggcattttccttacacattttagtcattgattatttttccccaaaagcggatggagtgaaattatcctgtatccaatttttcacctgtggaatcctgtccggtgtagggatggttctcacggaaaaaccacagctgacgagtattcttgctgcatggatgccgatcctatacgcaggtgtcatgtcctgtggcgttgcatataccctgcagatcatcgggcagaaaggaatgaatccgacggttgcatcgttaattttgagcctggaatcagtggtttcagtaattgcaggattccttatcctgcatcagacgctttctctcagggaactgatcggctgtgtattaatgtttgctgcgatcattctggtacagcttcctgaccgcaaaaaatgaaaaggcattttacaaaaatatcgtagtaacatcaaaaaaactatgttatgatatttattagagaaaatgcgacgaaatgcaggaacaggtgacaattatgatgacttattataggacggacgatcaggtcatacatgaagaagaaaaattaagtgatggtgtatgggtgcagatgatcaacccgacacacgatgagtgtgaggagatcgctgagaaattaatggtagatattgatgatgtgaaggcagcactcgatgtggaggaaagttcccgtatcgaactgcaggatggatatacgctcatacttgtggatattccaacgattgagatacgtcatgaccagagaacttataccactattcctctgggtatcatcctgacacaggatatcattgtcacaatttgcacggaggatacaccggtattgcagaactttgtgcggagccgggtgaaagaattcagcacaaagaagaagcttcgttttgtgtatcagatcctttaccggacggcagcaatttatcaggcaaatctccggatcatcgataaaagacgtactgagatagaagaacgtgttggaagcgatacagacgactccgatctgatcaatctgcatgaactggaatccacgctggtctactttgcaacatcgctccgggcaaatggggtagtgcttgaccggctgacgcgctataaacggctggagcagtacccggaagataaggaacttttggatgatgtgatagtggaaaaccgtcaggcgatcgaaatgacaaccatctaccgagatatcatcaacggaacaagagagctgatgtcctctttgttggataaccgcctgaataacgttatgaaatatctgacatctattacaattgtaatggcaatcccaacggtcatttccggtatctacggaatgaacgtgaacgagaactggatgccgtttgcaaatacaccgcatggatttctgatcatttgtattatcacattgctgatctgtgttattacgatgttgtttttgcggaaaaagaagatgttgtgatagggaaagacagaaatttttgagataaaaggtatatgttgttttgagataaattctgaaaataacatatgcctttttacgtgaaatatcatggacaaggttattagaggatgttagtatgatttataattatgacgggattaggaaattagggaatgtttgacgaagataaaagatataaaattgtaatttgtgatgatgatgagacgtttatagatttattaagtgaaaaaatagaacaggactttgttcagagaaagatagtatgtcttatagaaaaatatagtgacagcagaaagctgttagataatatcggggcagaaactcagttgtattttttggatattgatatgcctgaaataaatggaatggagattgcagataaaatattagcaaagaatctacattccgaaattatttttgtcagtaatcatgaagaaatggtttttgagtctttccgttataaaccacttcgatttataagaaaagaaaaaatgaatcaggaattacaggaagccatttcggcatttctggacaaaaaagaaaaggaaagcagaatattagagattacaacaagagaggggaaatgttgtatagcagttgatgatattatatttttagagagcagacagcattacttgaagatttgttgtgaaaacgaaaatttcgaattaagaggcaggatttctgattatgaaacaatgctggaaaaatatggttttgtacgtgttaatattggattcattattaattgtaaatacattaaaatcttaaagaccaagaaaataattttatgtaatggcatggaaataaacatcggaagcaatagacacgataaagtgcggcacgcatatatggaatatgtccgggagaaaaataaatggaagttgtaagtatggctgcagagatatatgcaagcgcagcgggaacaattgcacagatatggattctttcagaattatttccaagaaaacagtctgtaaaaaaagtatatatagtgggatggattttgttaaatttctgcatcgcgcattttgtgttgttgccgaatatatggcagtcgctgcttggcatgggtgtgatgctattgatgtcgtgtatcatgcttgagggaaggacagaacaaaagatgttagttatcattgcctgcaatgtttttatgattctggtaagtatgctgagagggagaataacctttttcttgtcaggggaatctatcaatgagattagtattcagggatcggagagtctggcaagggtattaggaattgtacttacgaatacattatatttggtaacagcctatattttaacgcgtttttttcatgataaaataaaactgaaaaaagaagaatatattattataataatttattatattattttccttatagtggttttattatcaatagctatgtcacgaaatgtggacttttcgcttatatggcagaaaacatttttgattttagacatgttgatgtttattgccaatattatagttttaaaaatgatatttcatataaatcagcaaaatcactatgaaatggaaaatgcattgctgtatatgcagataacgcagcaggagaaaagaatcagggaagaggaaaaaaactatcgggaagttcaattattgcgtcatgatctgaaaagatatttggttacatatcgtcagttgcttcaggagggaaaatatgaggttatagaagctgacattgataaaatactggggaaaaggttaaatacaaatcattgtgtttatacagaaaatacaatactgaatgctgtaatttgtgagaagatggaacaatgttccattaaaaatattaaaatagaggtgcaggtaaatgcagacaaagatatggattctatagaatatggagttgtgttatcgaatttactggacaatgcgattgaggcggaggaacaggaaaaagaagaaaatagatatatctgtttgaatatgggagtggaacagaatatgattcatttggtagtaagtaactatatcgcagaatcggttctgcaaaataatacattattagaaacatctaagaaaaataaacagttgcacggaataggtttaagaggtgttaaagagtttgtaaaaaataagaaaggtgagatagagatatttgaagaaaatcatatgtttgtagtgcatatttgtgtatgtgtataaagtatgcctaaaatgggaaaagtacgccagatatattgtgaaataaataaaatgcggctattttagtagtaaagaggagatgaggtgatgccaatgaagttttaacatatttgtttaacaaaaagctatcaatcattaaatgtttactaagtaaaaattgagataggagaaaaaatgaaagataaactaaaaaaattaacaatttttataatagctatatgcattttatttatgtcatcttctgctacatatggggcaaccgttgaaaataatacaacgcaaatgtatagtttaacaacaatggaataccaaggacaaattatagaaattcctgtacttacccaaactactatgtctaaattaagaaatagtgtttttacatcagaggtttatgtgttcattccagatatgacagaagaaactatggaaaaaaatgaagaatatgtaaaggaaattaaacgaacagggaattgttcggcaatgcgtcaagctagatctatctattttggacttccgggatatatagcttaccattcaacattaaattacaatgtttcttattatcaaggctatttgcggctttatgatttaatatcatttaagctggaacgagaaatttacacgcaagcaccatttagaaatttttataatgcgactgcaaaggcacttcaagttggaaccattggtgatccgggaaaacctgaagtattgcaaaaccagcaaaaagaatacggagaaattaaatatgatacattatatacaataccttcagaatgggtgccaatagcgccagttgacagcggcacaaaagtgggggtaaagtatgttgttaaatacgaatatgcagacggtacggtaggttatttggaacagtttcatgaggtgcaataatgaattcgaaaaagggcaaaaaagtacatctggaaataattttattttttatagtaagcatttactgcttattggcacctaatagggaaacatgcatggatgatacctggatatcgagcatagtaggactgagtggttctgtgaaattattttcggtaaaattatttttgctggcaccattatggtggggaattttatgttacatattgttaaggcttgcaaatccttatttaaaggaacatggcgtaaaactgcaaataaataataggatatataaagcattgataaaaatatttacaattgcatttttaattgcattaatatattggtcatgcggatttaccttgtatgtagtgtttccgcctatgccgtttttggttggttactatattatgaaccatcgtattattttaggaattagctggtgtattgaggcaattcttatttatgtttcgtttgaaacttgacggttatctgtataaaattgtttatggaaattataatggtaaatatatgtgcgtgcgtataaagtatgcctaaaatgggaaaagtacgccaaatatattgtgaaataaataaaatgtggctattttagtagtaaagaggagatgagaaagattactgctaggatagtccatttttttattgaaagtaaagttattgatgaaacagatcaagagatttatgaatatggtttggaaatattgagtgaaaatgtaatgttaacagtctttcttatattatttggagttgcgattgggagaggcgtagaaacaggtatttttttgttctcgttttgttggttaagaaggttctgcggtggataccatgcaaaaacaaagcgaggatgtcatatagccacatttattacttatatagtatttcttattgaaatagttcatttttacaaggtgataaataaatatatggttgaaatatattttgtatgtttagcgattattattctttatgcaccggttcaacataaaaataaaatactatcagaatcaatgcatagaaaaaacagattaaaggcgatagtatatacattattattcggagtgattatttatatattcaaaattgagtttcctgtggtatcatttgccgttttgggaactttaatacaagtagcactactaatgataattggaaggagggaaaaaggtgattaaattgaaagttgcaaaaatgatggctgatattgtatatcgaatggcagaaaaaagtgttgatgaagcttctgcatggtatgaatatcaaccggaagtaccagaaaaattaaaaaagagaaatagttgcaaattagtttcgaaaaggtctactaaatagtatggtggaggagaaaaaagcaaatggatgaaatgatgttggaggtacaggtatggcttaataaaacttacaatgtaggtgtcgtggaggatagaaataccggtcagtgaacagcttgtagagacaacgcaggcaggaattggtattgataaatgtatatggtttcaataagaggaacagcaacaggtcctacgttttttactacatatgaaaatccagttgaaccagacatttcacaggaatttactgttttcaaaaatatatataattcaggtttatcaatgttttataactggttgatgagatagtgctattagtaaacatacttaattgagaaggagaatatgtatgaaaaacaaaattaaaatggatttagcgttattaatgttcgcaactgtaattccaaatactgcgtttgcacaggattcaagtaatcaagttccaagcgaacaggttgaatttgcagatatttatatcggagacgaattgattacagttccggttgtgatcgagtctgaaattgcttgcaaaacagcacgaagtggtgtacaatatgaagatacaatagagagtgcaacttattatatcccggtaactgaagaagggaaagcatataatgaagaatatgtaagcggtgcgagagcaagaggaacagcgacagatacttacttagatccgagaaaatatctgacagcaacgagtattatccgatatacaatgtcttcaaatgatgagtatgttttgattaacaatgttgcaattacgaaaaacagaaatccagaatcatcttctactggtggatatttatatgggattggaacaccgacggctagaattgtgtgtgttggtcttgcaaaaaataacaggggatatgagcaggtagtagattcccagagtgttccatggggaacaacaggagtgagcactccatcatggtggactcctgtaatgtgtggcagttattcggatcagtatagggggcttgtacaatatagctttaatttgatttacagtgatggcacagtcagttgtgcgtttacgcatggtctggcaaaataaagtaaaaaaggaggaggcaccatggcaacaaacaaatcattaagcagaagaacgattttcctgttagcggcggcaattttgtatctgatgattccacagaatgctacaatgcctatgccggaggaagcggtattcccattttcattgttgtcgttgtcgcaaatagcaagagtgtttgctttcagacaatggattgccatggatttgattctttttacagcagtgctggtcatcatgcagctgatccgtggaaagcatgaaggaggaatgtttcttagaaataaaactgcaagaatcatttgcatggcagcattcttagtagtatttcttccacttgcatacataacgataccaaccgtattcattctgggcaaaccagcctttatgagcatggatgcctgggtattcatgttcggtaaacagggcggcgcgaaccagtacattcttcatctctggtgggcagcatcagcggtactgctggacatgggaattgcgaaataaatttataaaaataacccgcatggaatcagaacatattctgtttgaaattccatgtgggttgtgttattttacgcaatttgaacataagttgggaacgttgttattgggagaatggatgggtttatcgttcaaaccgtccactcgctccacaaggcagcacaagtccattcgaggataccggaagcccaatctcatcggcggctaccgttccgtggtatttttttaacaccgtgttcatcatatagctcaataccgccggctgcaatccggttgtgtaagaattgatcaggaaaaacaaaggttcatcggacaataactgtccacacaactgtaccagaggataaattgcgtcctcaattttccagatttctcctttaggacctctgccgtaagatggaggatccataataattgcatcatagtgatttccacgacggatttcacgttctacaaactttacacagtcgtccacgatccagcggatcggagcgtccttgagaccggaggagacagcgttttcttttgcccatgtcaccataccttttgaggcgtccacatgtgtgacagaagctccggctgcggcagnnnnnnnnnngggttgcaccgccggtgtaagcaaaaaggtttaatactttgaccggtctgccggcttttttgatcttttctgaaaaccagtcccagttggcagcctgctccgggaaaagacctgtatgcttgaaactaaaaggctttaagttaaaagtcaggcttccgtaatggatctgccactgctccggcagatcgaaaaattcccattctccgccacctttggcgcttctgtgataatgtccgttcattttacgccagcccttttctgtttttggcgtgtcccagatcacctggggatccggacggaccagaagatatttgccccagcgttctaacttttctcctttggaacagtcaatgacttcataatctttccaattttctgcaatccacatattttaaattacctttctataagttcgtataatataaacttcaattgtttacataattatttcctgcgccacagcgatggcatgaacagaattagcagtgggtacaattccagacgaccggctaacatgtcgaacatcagcacaaacttggaaaaatcggaatacataccgaaattccttgtaggacctacaccgtcaagaccgggaccgatattatttaaagtagaagcaactgctgtaaaattcgtcgtcaggttgaaattatccacactgatcaaaagggtggaaaccagcaggatgaaaaaataaattgccagatacacattcgtagagcgcagtgtattgtggtcgatcggttttccatccatacggattaccttgacctctctcggatgtatcacgagagaaagctgcttcgggatcgctttgcataaaatcagcaatcgcgagattttaaaaccgccaccggtacttcctgcacaggctccgataaacatgagcagcaccaatatcatcttggatgtctccggccacagatcaaagtctgtagtcgcatatccacaggttgtgataatggaacccacctgaaaaaatgcatggcggaatgcctcgccaagtgagccgtacaagcttcggatattaagtgcgataaaagtaccagcacccagaatgatgccaaaatatacccggatttcttccactttaaaaatttctttcaactgctttgtcataatgtaaaaataagcgacataattgacaccgcttaaaatcataaagacggtgataatattttgcaacacagggctatatcctgcaatgctgtcattgtggataccaaatccacctgttccaactgtaccgaatgtcagcgtcagggagtcgaacatcggcataccgaaaatacataataaaacaatttcaatgatcgtaatgaccaaataaatacgatacagaatttttgcagtgtccttcacatgtggtactaatctgctgacggaaggtcccgggctttcagctttcatcaggttgatcgtcgaaccgcccatcagagggagaaaggacatgatgaatactaaaacccccatgccgccaacccagtgggtaaagcttcgccacatcagacttgtatgtgtgagtgcctccacgttcgagagaatgcttgcgccggtcgtggtaaaaccggagatcgtctcaaacagggcgtccacataagatgggatctcaccagtgatcacaaacggaatggcaccgaaaatacttaaaacgatccagcttaaggcaacggcaacaaacccctcgcggttaaatatctgcggatgctttactttttttaacgtgatcaggcatccgaggacaaaacagatgatccctataataaggtaagaatacgcttcgttttcgtgatagatcattccggtcagaaacggaagcagcataaaaataccttcgaatttcaaaacctgtccaagaatatagcctattgttgaatacttcatagcagcttaatcctccagaatctctttgatatcggatatattgtaaccggaggtggcgatcataacagagtcgccgggcatcatgcaatcctgtccacttggcacgatgacctgatgattacggtaaatacagcagatcaaagtatttttgcggatctttaaattctgaagaggaatattgcagacggcagaattctctttgagcaggaattccagaacttctgcttttccatcttccagtttgtatagcgcctccacattgctgtttaaagaattattcatggaacgcacatatttgataatgtactctgcagtgatcactctcgggtaaataatgcttccgagatccagcttattgatgacggaggtaaagttaatgcggtttacctttgtcactgtctttgcagaagagattccattcgcatacagggataaaagaatattttcttcatccagatcggtcagcgccgcaaaaccggctgccttttcaatgcattcttcagataaaagctccttgtcagtggcatcgccgcagagaattgtagctttcggaagctgctcgcttaaaaactcacagcgctgctggttgatttcgataatggtcgtcttgattccggacatcagaagactcttggcaaggtaataggatatcttacctccgcctgcgatgatcgtgttggatacacggtttttctctaagccgatcttgcggaaaaagtcgatggcatccctgcgttttgcaacgatggagacgatgtcatttgccgcaaattcaaaatcaccgtttggaatgatgacttcctcactgtttcttgcaatcgtgcagaccagaatatcattgcagtgcagggttgcgtggaatttggaaagtttcaggccacataaaggggagttacttcctattttaaagtgaagtaattccacacgtccctttgcaaaggtatccacgcggatagcagaaggaaactggaaaacctttgcaatctcatttgcagccgtaagttccggattaatgatcatgctcaatccaaattccttctggagaaaatctttttcttcattatatataggattgcggatgcgggcgatggtctgacagtggccactcttcttggcaatgacgcagcagaggagattttcctcatcagatcctgtgacagcaatcagcaggtctgcggtttcgataccggcctgctttaatgttgtgtggcttacaccatttccaacaatccccataacatccactgtatccgtaagggcacttactttttcgggacgggagtcgatcactacgatattgtgattttcgatacttaaggcttctacaagcgtgcatcctactttaccgcagccaacaattataatattcat

SEQ ID NO: 317 - DNA, 7351 bp, unidentified
  source 1..7351: mol_type = unassigned DNA
ttattttatggcgtcgagtgcgtttgagatatctgcaatcaaatccaccttgtcctcaagacctaagcttattctgataagctctgccggcactcctgcttccttaagctgctcatcattcatctgacgatgcgtgcttgttgccggatttaagcagcaggttctcgcatctgccacatgtgtctcgattgcaccaagccttaatgccttcataaatgcagacgctgcctctctgccgccctttaagccaaatgatacgactccgcagcctccgtttggaagatacttctgtgctctctcatagtatttgtttgaaggaagccctgagtagtttacataggcaacctttggatgattttccaaaaattcagccactgcctgtccattttccacatgctttggcatacgcacatgaagtgactcaaggccaagattcagcataaatgcattctgtggtgactgcacagaaccaaaatcgcgcataagctgtgctgtacatttggtgatgaacgcaccttccttgccgaatttctctgcatatgttatgccatgatagctgtcatcaggtgtgcacagtcccggatatttatccgcatgtgccatccagtcgaatttgccgctgtctacgattgctccgccgagtgtggctccatgtccgtccatgtactttgtggtagagtgtgtgacaatatctgcgccccactcaattggtctgcagtttacaggtgtcgggaaggtattgtccactataagcggtactccgtgctcgtgtgccacctttgcaaaaagctctatatcaagcaccgtaagcgcaggattggcaatagtctcaccaaacataagctttgtgttcggtctgaatgctgcattcagctcctcctctgtagcatcaggagatacaaatgtagctgtaatacccatctttgccatagttaccgcgatgaggttgaaggtgcctccatagatggatgatgatgccacgatatggtctccgcactcacatatgttgaacatggcatagaaattggccgcctgtcctgatgatgtgagcatggcagcaatgccaccctccatagctgcgatttttcttgctaccgtgtcacaggtcggattctgcagtctgctgtagaaatagccctctgcctcaaggtcaaaaagctttcccatgtcctcgcttgtgtcatatttgaatgtagttgactgaataatcggaatctgtctcggctctccgtttccggctgcatagcctgcctgtacacactttgtacctatactgtattctttcattgtgcttctcctttattatgttaatgtttcagttggatatagtatattacatttggcgcgttttgacaaattcagattatataacttttatcatcataaattcttaagctttataacatattgtatctaccagtgcttcatagctgctgtcatcagcttgcagtatctctctgacattgtgctgctctaatgctgctgttgttttttcacctatcgagtatgctgtttccacgtatgcattctccggcagcatatgaaaaaatctttccacatttgatgcgcttgtaaaaaccgcttcacttaccatgtttccaatgctttcagtaatactctcatatgcctgctcatttacatatgcatcaattttttctaattcacatatttctttaagccctgcctcaatgtcaggtgaagcctcctttgccgagaaaatgcagactttgatttcatcattatcgcccatatacgaactcaattctcctgcaagtccttttccggtctgttctgccggaataatatctgcctttatgtgatgctttgcaagctctttttctgtagcttttccaactactgcaaaccttgcatttgctataagtctgatgtctgcccctgccagatccagattatagaaaaatgatcttacaccatttttgcttgtaaaaactatccagtctgccgatcttactttatcggcaaattcaggaattattatcggctttattatgcctgtcttaaccggtgtgacatctgctccaagctgctgtaattttgctatcaattcgtttgttttgatatacggtactgtgatctttcttccaaacagcggtcttttttcaaagaaatcaagcctgtcattcagtgaaaccacatctcccacaacgattatagccggtgatgtcagctttgcttcctcaatcttttctccgatatccgcaagcgttccgatacatttgcgctgtgcggcaagtgtgccgttcgatatcactgctgccggagtatccgctcttcgtcctgctttcataagccctgctgcaatgctttttacatgcgcaagacccatcaaaaatacgcaggtgattgtctcatctgtaagaagggaatagtctatatctgcctcctcatcctttctgctgtgcgcagtgatgacctgaaagccttttgctatacctctgtgtgtgataggtattcctgcagccgcaagcgctgcaaccgatgaactgacacccggtaccacttctacctccacatttctatctaccaggtagagagcttcctctccgcctcttccaaagacatacggatctccgccctttaaacggactacaagctcatgatattttgatttctcgtacaaaagctcgtttatggcattctgcttcatgacatgcttgtgattttccttgcccacataaataagctcacagcctgcctttgccattgaaagaaactctggtgatgacagcctgtcatacaccagacaatccgcctgttttatatatttttctccttttaaagtgagcaggcccgtatctcccggtcctgctccaactaatactacttttcctgtgttttctctcatgattttcctaattactttccaatttataccgaatatcgtgcaccgcacgctccacaatattgtttctgtctgatgtcatatcccatacctgctctgtccttgcaagctgttttccatcctctgagccaaacatcgcaagaagctttagcctgttatttttgttgctgtcattaccgcggtctttttcacttacaatatcacagtatgcagctacaggcaaatgacagtttccaccgatccgctttaaaaattctctctcaatgcctgcgcacagattggttttctcatctgacaaagcatcaagctttgccatcagcttagcattgtcagcacgtagctcaatcgccagtgtgccctgtgccggagccggaatcatatcatcctccgaaaagtactgtgtgatctcagaatctcttccgatacgctttattcccgccgctgcaagtacgattccatccagcctgtattcgttatacttattctgtttttcgttagctatctcattgttatttacagtattatcggcaacctcttcatatataatttcaccatcatatagcttacgaagcctcgtatcgatatttccgcgtatgccaaccaccttaaggtcaggacgcagctttaaaagctgatattttctgcgcttgcttccggttcctatcacggcaccatgaggaagctcatccagtgaagcggcattttttagcaccaaaacatcccttggatcttcacgcttccatgcctttgcaaatgtaagccctgctgccggttcatcaggcatatccttcatggaatggactgccatatgaatctttcccgataaaagctcgtcctctatctcctttacgaagataccctttgagccaatcttatcgagtgcctttttctgctctaaatcgcctgttgtctttatgataacagccttaaaatcatcatccggatatgctctttttaacttatctatcacgtaatcagtctgaacaagagcaagctttgagcctctcgttcctattaaatacctcattttactctcctacggatcatgccattttccatttatcatttataaatgaacaacaacttaaaatctgtaataccatactttaaactatatttccggaatccttccattatcaatagctgcacacaatatttctttaaacacacgctttctctcggcttccgtgtcatattgcgctattactctttcgcggatctgtcccatgtattcgttcagctcaccaagaaacggagtaagaatctcctgctctttgcctttcagatactgagtcagcacagggctgtttcctccgctcgaaaatgccgcaacaagattcttttcctttatgtatgacggaaaaataaagctacaatcagccttctgatcgaccgcatttaccatgatgtccttagctttgcaatactctgcgatctcatgatttaaagcattgtcatcagtggcagcgataaccatttccatgccgtcacagtctttttgctcaaaccttctttttatgaacgtaattctatctgctgcatccgggtccgtctgattgttttctttatttgccgtatatgagcccgttttatcctcgcttgctatatcatcaattgtaagctttctcagctcatcacatatatcctctgccacaaccgtgaccttcgcgccaaaatccagcattacgatcaccttgcggtatgccacatttccaccgccgacgatcagacactctctttccgtcatatccacaaacatcggaaaatacgccatttttatctccctgtaataccatatccatactttatttcatacattatttcatgccttattttatactttattatacgctttatgctttattttttgccttatgcttcacactgtatccattgagcattccttcaaaaacaggacgaagcttagcagaaaacactgctgccgatacgcataatataaagtccggtgcaacagttatcagacagtaatctactattacgatgccccagttgacaggtgttgccgcatagaaatttttcatgcagtaaaagtatattgcaccaactgtataatatgccaccagtccaaccgttgccggaagaatgagtgtaaacgcattggtctttttaagcttttctgtgatagctccgattaaaaatgctgcaagcacaaagcctaggaggaacccaaagcccggtcttaaaatgtatgtaggaccaccacctgccgcaaatacaggcactcccaccagtccgatgcacaaatatactatcacgctaagcgatgccagctttgccccgagcagaaatcctgccatcagcacaaagaaccactgtaatgtaaaatgcatggtgtacataggaagcggaatatcaatcttgataaatgctccaactgctataagtgccgcaaaaagtgcacatgttgtaagttccttcgtttttaatttcattttcgaacgctctttcgttttattaaatatacatgctataataacatctttctctaaaaaagaaaagccatcttcgatgaagctgacttttctttgcagctttcgctgcgactcaaaacattaacatatgatttagaagtaatattcatcagaatatattcgtaaatcctctttcgtgacctgtccaccctcgatatgaaacgagttgattacaggattttctgccataagcgacattatcatgtagctcgcatttggatcgtatgcaagctttatatcctcatccgatggccttgaagggctagacggatgtgaatgccagttgccaagcggcttaaggccatttactctcatgtcctttatggctgccagctgctcctttggatccattgtgaaatggtcctcagcatggtctgtattcgtcaggtaatatacctttgtgatgagacgaccgttttcgtcctcactgcctgctatcagaccgcacgcctcctccggcagatgctctttagcatattttgctatttcatccagaaacggatatttcattcttatgatactcatatcgttcctttccttactgtctttttattcctgtgtacgaggtgcatcaaatctgcccgctgtctcctcgcagacctcctgctcgtagtcgattggctcgagaatagtcggatggtcgccacagactgcacagttgtgtatatcctttggaagcttaatcttgtggaactccatggtgagtgcatcatatgtaagcagatatcctgtgagcagctctccaacaccgattaaatacttgatagcctccatagcctgaagcgaaccgattactccgcccatagctccgataacgcctgcctgcttacatgtaggcactgcatcctttggtggcggattcttgaatacacatctgtagcaaggtccctctcccggcacatatgtcatgagctgacccttgaaacggatgattcctgcatgtgaaaacggctttttctcaagcacacatgcatcgttgattaagaactttgccgggaaattgtcagttccatcgatgatgaaatcataatccctgataagctctctgatgtttgacgcatctacaaacatacggtatgtattgacctgaacgtccgggttcatggcattcattgtctcttttgctgactttaccttggctttgcccacatcggctgttccgtggataatctgtctctgcaggttggataaatctacctcatccgcatccacaataccgattgtgccaactcctgctgctgcaagatacatggctgccggagctccgagtccgccggcaccgataataagcaccttgccctttaataatttcttctgacctttaacgcccacctcattaaggataatgtggcgtgaatagcgttcgatctgctcatcagtcattgccattagcatccacctcccatgaagtaaaggaactctacattgtcgccatccttaagcactgtcttgggcttatcctctgtggcaacaaattcctcatttattgaaactgttacatactcaggcatatctacattctcaagctcgataagctccggtaatgtaagtccatccttatattctttcttctctcctgctactgtgatagtcattttatttcctcctgtgtcacagattgtggtatctgtatgtgttattatcctgtatcagactgctttatataataatctaaaaactataataattcttcaacccatgctttcaaatcggcaggcttttgtgcgccgacctttctgtctaagacctctgcgtcttttacaaaaagcagtgtcgggtttgcagtcacctcatactcatcagcgagctctccgtcaaagtttgtgttgaccttgtatacgtgaagcttatcctcataatcatcctcgatatctccgagaaccggtgccagcttcttgcaggccacacatgaatccgagtaaaaatcaacaattaccggaagcttgctttttaatactttttcatcgaaatcagcctttgaaattcttgctgccat

SEQ ID NO: 318 - DNA, 7831 bp, unidentified
  source 1..7831: mol_type = unassigned DNA
tcagccattgtatgcctccttaatcactttttcaaatttatcttcgcctacgcgctcgatcgtaaattggaaacgctcgcttggatttgcattgtcatcaaagaactggatcgctgcatccgttacgcggaacaatgtctcttcgtccttgatcaccggcacgacttcttctcctttgtgaatgcggtttccgaaaagtccaccgaaggatacgagatatcctgtcgtcacatcccaggcatcggttggacacgctttggcgcatcttccgcagtagttacacttactttcttccactttgatctttccgtcttccagtttgatcgcatcggtgcggcacgcttttacacacacaccacactggatacaggcatcctctttccattttacgatagaggcacctttcactccgacatcgttttcctcggacttcaaacagttattctggcatccggtgacaccaaatttgaatttatgaggaagctctcttgcaaaatatctctcgtccagtttctgagcgatatcgtaggaatcaatgtttccacttggacagatctgatttccctgacaggctgtgacagtacgtacacgtgggccgcagacacccggcttacaatcgcctttctccagttctgctttcacttcatcgatctgatccagtttgataaatgggatctctacgccctgtctggatgtcagatgtacatgtccgtctccatatttttctgccacttccgcaatcttagccagctgctttgctgtcagatttcctcctaccactgccagtcgcagggaaaagttatttttttgtttctggcgcatgaatccgccttttttcagtgtagcataatctactgccataattcacttcctccttatttcttctcaatcgcgtatttaaaatcttcgatgatatcctgaatatcttcaatgccgacgctgattcggatcaggtcgtcaaatactccggcatcttctttctctttttccgtgctgtgcgcattcagcgtcgattcgggatgaatgatcagggactttgtatctccgatattggagacaatttttggtaattttaaatcattcataatctggaaagcacgttctttgcttccgacccggatcgtaagtatcgcgccatagccatgttccagagttttttctgcagtctcgtgccatgggctgtctggcaatgccggataatttactttgatgtccggatactgcgtcaaaaactcggctaacttttcggcattgaaacaggcacgctccatgcggagtccgagtgtttcaagccccagcatattgtaaaatgctgtctgtggtgccatgcaggcaccggtatttcgaaacaagccatttctgagtttcgcggtaaatgcaaattttccaaattttgcatattctttcatgccgggatatttttctttatcccatttgaagtttccgctgtcggtgatcacaccgctgatggcatcgctgtttccatttacatatttcgatgtcgaattgacgacgatgtcggcaccaagttcgagtgggcggacaagatacgcggttgcgaccgtgttgtccatcacaagcggaagtccgttctcatgtgccatctccgccagctcgcggatgtctacgacatccagtttcggatttccaatcgtctcggcaaagatcactcttgtcttgtcattgatcgctgctttgactgcctcttcgtcatgaatatcgacaaatacggttttgatcccaaatgcctcaaaatcatgaaagacatcgatggaacctccgtataaactcgtgcttgccagaatttcctctccggcattcacgatattaagtaaggcattgaagatggctgccattccggaagcacaggcgatcgaagaaagtccattctccaatgctgtcatccggttttcaaaggctgtgatcgtcggattattcaatcttgtatacgaaaatccgtttgccttattatgaaacaatttttcatgctgttctgcagacgtctgatagaaggcgctggattggtagattggcgtgagcgtcgctccggtcgcctcatctcccatttttccactgtgcaaaagtgctgtgttgaatctcatacgttccctccattttcgtctcttcaaatgtagttgccattgcgtacggatgcttctccataaaccgactgtttgcggatataggctgccacttcttctacctccgtaccattttcactccaattcgtgatataattttcatttttatttgtaatgctgtctgcctgttttttgtcaacaagaagcaggacaacgattcctgcgcggtgcaggtgtttgagtaccagagaaatgtcctcgccctgtgccggtgcatacagatacgtatgtctgccatcgatgtgaagaactttttccacatcttccacaaacgcacgattgactttatcggatttgataaattctaccgtaactgccgtctgtcctttgactgctgcgcggactttgcggtccacacgtccttcatacagaccatgctcttcagcatttacattttctaccactccacaggcagatgtcatattagttacacggtcaatgagaataaattcacccattgtcttatgtttcttaaattcatctacgacgatcttgtctgccagtgagatcttacataccgcgatctcgtttttgctgagcgtttccaccggtttctgctcgccggtattgacatcaatcgcatattcaatcttggtaaccgctcccgggatggtctttgtacccagtttaaagaagaagttctttccactgatgagttcatcgtcgtccatccaaaggagtgtcgttgtcaaggtcgatgcgattttcacctgagaatccacagaaagcacgcagcctcttgatacatctacttcgcggtcaagctggatcgttaccggctggcctttcaccgctttgtcgctctgcttgtcgccgacataaatactctttactttcgctgtctcattgctaggcagggttgtcagttcgtcgccgacatgaatctcgccatcttccacctgaccctgaaagcctcggaatgtgtggtctgggcggcatacacgctgtaccggcatatagaaacctatttcgtggtcgtcttcagaaatgtcaatgttttccaagtatgtcaggagtgcctcaccgtcataccatttgatattgtcggattttgtcgtaacattgtcgccttctgtcgccgaaaccggaataatcttgacattagcaaggctgagttcttcggaaagttccttgatctgtgcttcgatctcgtggaatctctcttcgctgtaatccacaaggtccattttgttgacggcaaatacaaaatatttgattcccatcagctcacagattcttgcgtggcgtcttgtctgtacgagcacgccctgttttgcgtcgatcaaaatgactgcgaggtcagcaaaggaagctcctactgccatgtttcttgtgtattcttcatgtcccggtgtgtctgcaacgatgaagcttcttttctctgtcgtaaagtaacggtacgcaacgtcgatcgtgattccctgctcgcgctctgccatcaatccgtcgagaagcagtgagtagtcaatctcgccgccgcggcttccgactttactgtctaattccagtgctttttcctggtcggtatacaatagctttgaatcgtataaaatatgtccaattaaggttgattttccgtcatccacgcttccgcatgtaataaatttcaataatccgctcatattagaaatacccttctctctttcttcgttccatactgccagctgcttcattgtcgatcactcgtgtcgttctctcggaagatacggcgctcagtgtctcgtcgataatttcgtccagtgtcgtcgcagtggactcgcatccaccggtaagtggataacatcccagggtgcggaatcgtacactcttgtactcgatcttttcccccggacgaagtctcatacggtcatcgtctaccatgataatgttgccgtcgcggtaaacgaccggacgtacttttgcaaaatacagagacgggatctcgatattttcacggcgaatgtactgccagatatccgtctcggtccagtttgacaatgggaatactcgtacttcctgatgtttctgaatcttggaattgtacaatttccacatctcgggacgctggtttttcggatcccacgcatgatgttcgtttcggaaagagaatattctctcttttgctcttgatttctcctcgtctcggcgtccaccaccaaacgcagcggtaaatccgtatttgtcgagggcctgtttcaatgcctgtgttttcatgatatcggtataagcagaaccgtggtcaaatggattgattccgtcttttaccccttgttcgttaatgtactcgatcatatcgatgccgagttttttggccgttttgtcacggaactcgatcatttctttaaatttccatgttgtattgacatgtaaaaacgggaacggcggtttctccggataaaaagctttcattgccaaatgcagcattaccgagctgtcttttccgatggaataaagcattaccggtttttcacattctgcagccacttcacggatgatgtagattgcttctgcctccaatttgtcaagatgtgaaaactcactcatatctgtgtccttcctttcgctagtacttatttgattcttttttgttgataataacctgttctttgctgccatcttttcgtaatatgttccagtataactgattttcttccgaaagtacagtcatcttgcttcccatacctccaatatctgctcccaggtaaagagcaatcgcgccaaaccggcactctttgatacaggatgagcatccccagcagtctttcgggtacttgatataggcttttttgtcgtcgtccatcttgatcaaccttcccggacaaactttcgcgcaggcggtacagcctttgcacaatgccttgttaattgctatgctcataatgctcctcccttccaaccaggtctcggaagcggatgatgatctcgccatcttccattctggaatttacatattttaaccatttctggtcttttttaggataatctaaattttcggcaaaactgtgccatcttgtctcttttcttgcttccaaatgtgcaataacgacaaggcacacggtaagccgttctctcaactcatagacaaacatcaattcatgcatatcctccgctgcaacatcctcgctgagttcgatcagctgtttgatcttgtctttcgcaagtgccagctgcttttcattgaactggtaatgcgtcgaaattcctccggcgtaattgtccatgactttctgcatcgcctcttccaaggcttcgacggtaaacatatcgttggttcctgtcaaataatggttatattcttttatcttctcttccaatgccgtttcttcttctgcctcatttaccggcagttcctgcccggcatccagttcttttaccatatgaagtgccgcgatctcgccttcgaccattgccccggtcacgtatttctgcggacatcctccggcgacatctcctgccgcatacagtccgtggatcgtcgtctggcggtccgtgtccacccaatatccgctggcggtgtgtccacccacgatataaggttcggttccctcgatttccacattctgctcgctcggtttcttgccggattcaatccatttgagtgtctggcttggtgccatattgaggtaagcttttttcaatgactcatcctgctcgtcggaaattccttcggtccgcagataacaaggacctcttccctccagattttccatcaccgttccatacactcgttccgaagtcgtcagaccgtatttatcttcgtaaacttcgccttttgcattgacctgttttgcgccgacgccctgtgcgatggttccggtcggtgcaatcgtatctttgcaccggagagcgataaagcgcatctcaaaggttgtcatctcggctccgctccgaatccccatcgcatatcctgcgccggtattaaatggcggataccacattttatgtcttgaaaatcccggattgttcggacggtaaagccctgccgctccaccggtcgcacaaagcactttctttgcgcggatctcgtacgcagtgttttcttccatcgaaaatccaaacgctccgcggatcgtattattctccacaatgtaatcggttatattaatccggtttaatacggtcacattcggaaggcactcaactgccgaagccagcaacggcttcatattttcgccgttgatctttatatttcgatttccgcgtgcgacgtattctccattttcatctttcaaaatgacaagtccgagtttttccattttttccgttacccggttgaggccctctgacattgtcataagcagatcttctctcacgatgccatccgcatcttttttcgcatattccacataatcttccggctttctgccttttacgatatatgcattgatcgcgttgacaccggcagccaggcagccactccgcttaatatttgctttttccgcaataatgatcgaataatcggatttttcgcggatcgtcaatgcggcgtaacatcctgccgttccaccaccgacgatcaaaatgtccgtatgaagtatttttttattttcaatctgcatcgcagctcctccttgaatttcctgttctttttgtgttggcaatttgcctgtttgccagctgccctacgggatgcttcgcagcttacgctgctagatataaaacacgtcttgttcctgcatctctttattttcgagcagatacgtctgcgcctcgtcaaacacatacaatcggtagatcaacacatgtactgtctcgccgacggacaccagatctttttccagcgaccgctcgccgacaacctcaattccgtttatatccacggtaatgtcgatgcggtttccgcggaataccacgtcttttacgacgccggtctctgccgcgctgatgtactgatcgagttttccactctttgatatttttataaattccggtcggatgacggctctgtctgccccctcgacctggtcaaacccttttaatttcccatattcttccaccaccgaagaccggccgatgaatttggcgacaaatggggttcccggtgatttgtaaatttctaccggcattcccatctgctcgatggttccgtggttggtaatgatgatctcatcggctacctctacggcctcatcctgatcgggggtaacgaaaatactcgtaattcccagtttttctaccatttctttaagccagctccgtagctcggttcttactttggcatcgatcgccgcaaatggttcatccagcaaaagtacctgtggattcggcgccaatgctctggcaaatgccactctctggcgctgaacgccggacagctgattcggatatcgtttttccatccccgaaagtccggttaattcgagaagttctttgactctctctttaatctgttttttcggcatcttctgcaattccaggccaaacgccacattgtcaaaaactgtcatatatcggaacaacgcataattttgaaatacaaagccgatgccccgctttgatgccggaatgtcattgacccgctttccgtcgatgaagatatctccggaatttggattttccagccctgcgatcattcgcaaaagtgtcgtttttccgcttccggaaggtccgagaagcgcgaccagttttcctttttcaatcccgaaactcacattgtcggaggcaaggaaatcgccgtatcgcttgtatatgttcttcatttctacgtacat

SEQ ID NO: 319 - DNA, 9807 bp, unidentified
  source 1..9807: mol_type = unassigned DNA
tcaggacagggtcacagcaccgccacggcgaggaaccgcacaacgagcgcggcaagccatgccacaacgcactggtttacgaccataacggtggcccagcggccgcccatctcccgcttgaccgatgccacagcggcgatgcagggagtatagagcaggcagaacaccagcaggggaggagccatacaggatggtaagggtggagacaacgctctcctttgccataaagccggtgatcagcgccgtggacacccgccagtcgccaaagcccagcggtgcaaacaacggcgcgatgccgctggcgatccaggccaggatgctctcctgcgggtctgcggtcaggctgagctggaagtcaaagttctgcaggaaccagatgatgatggttgccaggaaaatgaccgtaaaggcacgctcgaggaaatcccgggccttttcccagagcagctgggccacatttttcaggccgggcaggcggtagttgggcagctccatgacaaagggcacggcctcgcccttgaacagcgttcccttgagcagaaaggccattccgatgcccacaaggatgcccaggaaatacaggcccaccatgaccagtgcggcgtactccgggaagaaggtcaccgcaaacaggctgtagatcgggagcttggccgagcagctcataaagggcgtgagcaggatggtcattttccggtcccgctccgagggcagcgtgcggcttgccatcacgccggggaccgtgcagccaaagccgatgagcatgggcacgatgctgcggcccgaaagaccgatacgccgcagcagcttgtccatcacaaaggccacgcgggccatatagccggtatcctccagcagggaaaggaagaagaacagggtcacgatgatgggcaggaagctcagcacactgcccacaccggtaaagatgccgtcgatcaccagcgaatgcactgcatcgttgacgttccatgccgtcagggcattgtccacaaggatcgtcaggttctcaatgcccagttccagcaggccttgcagccccgcgccgatcacgccaaaggtcagatagaacaccagcgccataatgcccacgaatgccggaatcgccgtgtactttccggtgaggaagcggtcgatccttgcgctgcgcagctgctccttgctctggtggggctttaccacggtctgattcaccagctgatggataaagtggaaccgcatatctgcaatggcggcggcgcggtccagaccgcgttcctgctccatctgcaggatgatatgttcgatcatctctttttcgttctgatccagcttcagggcctcctcaatgcgggggtcgccttccaccagctttgtggcggcaaagcgcaccgggatccccgccgcccgggcgtggtcctcgatgaggtggatgatgccgtggatgcagcggtgaaccgcaccgccgtggtcatcctcgccgcagaagtccatccggcccgggcgctcctgatactttgccacatggatggcgtgatccaccagctcatccacgccctcgttcttggcggcggaaatggggaccaccgggatgcccagcatcgcttccatctcgttgatgttgatggtgccgccgttgccgcgcacctcatccatcatattcagtgccagcaccatgggggtgtccagctccatcagctgcatcgttaagtacagattgcgctcgatgttggtggcatccacgatgttgatgatgcccgtgggcttttcgccaatgatgaactggcgggtcacgatctcctcgctggaatagggcgacatggagtagatgccgggcaggtcggtgacttcggtatcagggtgctcccggatggcaccgctcttgcggtccaccgtcacgcccggaaagttgcccacatgctggttggagccggtgagctggttgaacagggtcgttttgccgcagttctgatttccggccagcgcaaatgtcagcaccgttccatccggcagcgggtgttcgccctttttggtgtggtagcggccgccctcacccaggcccgggtgctccaccatccggccggccttccgtgccggggccgctgcgggtgcttccgccggggtgatctcgatccgtgccgcatcgtccagccgcagggtcagctcatagccgtggatctgcagctccatggggtcccccatgggcgcgaatttcaccagcgtgaccttctcgccggggatcagccccatatccagaaaatgctggcggagttctcccgttccgcccactgtatcgatcacggcactttcgccgatcttcagttcctttaatgtcatggcagatgcctttccttcgacaaaatgttagtgtatgtgaacagtcttaatataagctaactcaaaggcattgtcaaggcaggaagcggcaaaaattctcgcctgtccccgctgttttttgtggaaatctttctcctgttccggcaggtttccgggcaaaagaaaacgcacccctgaattttcacgttcaaaggtgcgttttgagaacagttctgtttacttcacggtgtggtagccgtcggggttgttcttctgccagttccagctgtcggcacacatctcctcgatgccgtactcagccacccagcccagctcattcttggccttggtgggatcggcatagcactcggcaatatcgccgggacggcggggatcgatcacataggggagcttcttgccgcaggccttctcaaaggcatggatgacatccagcacgctgtagccgtggccggtgcccaggttgcagataaacaggccgcagttggtctgcagcttcctgatggcgcagacatggccccgggccaggtcaaccacatggatgtaatcgcgcacgccggtgccgtcgggggtggggtagtcgttgccaaagacgtgcaccttttccagcttgcccacggccactttggcgatgtagggcatcaggttgttggggatgccgttggggtcctcgccgatcaggccggacttgtgggcaccgatggggttgaagtaacggagcagggccacattcagggtggggtcagccttgcagacatcggtcaggatgcgctcggtaaaggccttggtggtgccgtaggggttggtggtggcacccacggggaagtcctcggtgatgggcacgctggcggggtcgccgtagacggtggcggaggagctgaacacgaagttgcggcagttgtggcggcgcatcacgtccagaatgaccagcgtgcagttgaggttgttatagtagtactcgatgggcttggagacgctctcgcccacagccttataggcggcaaactggatgacggcatcgatatcggggcactcggtgaagatcttctccacgtcctcgtgctttgtcatatcggcctgatagaaccggaagtccttgccggtgatctgcttgacccgatccagcaccacgggggaagcgttgtaatagttatctgccaccacgatgtcaaagccagcgttcagcagttcgatacaggtgtggctgccgatataaccggcaccgccggaaaccaaaattgccataaaagtacctctcttctcgtcaccaaaattgcttgcgcggggcaggcccgctttctgccacaaggatacaacgttttggccgcagaatcaagtaacgggaattttataaggatggatttttgtttccatttatttttccgcgcattgatttacaagcattttttgttttttgcgcatggagtgatggaacgctttgtgcaaatcagaaaaaaagccctctcaggcaaagccgtcaggctttgaatgagagggctgcattttacagcttcccgcactgtttgccggtgaagaaccgcagggtggtgttggcgcggaacactttcccggcccgcagggcggtggaggggaactccgggtgggaggggctgcagggaaagtgctgggtctccagcgcaaagccgccgtatttctgcatcggcacgccgcccttgccgggggcagggcagtcctgcaggaaattgccggtgtagagctgcacaccgggctgggtggtatagaccttcatgctgatgccggtcttatcgctggaagcccaggcgcacaggctctggctggccccgcggcccctgtcgatgacaaagcagtggtcatagccgccgcccaccatggtggtctgggaaaagccggtgtcgatgtcccggccaatgggcttgcccgcccggaaatccatcggcgtgcctgccacgggcaggatattgccggtggggcaggtctcgttgttgccctccagatagcgggacgcatagatgcgcagcttctggcccagcacatcgccgccgccatccagattgaagtaggtgtggttggtcaggttgatgatagtgtcggcatcagaggagacacggtagtccatccgcagggcgttgtcctcggtgaggatataccgcaccgagatcttcagatttcccgggaaaccatcctctccatcggggctttcggcctccagaagcagggtatcgccaaaggtctttacctcatacagcttgcgcgggaaggtgccgtgcaggtggtttttgccgttgttggcttccagctgataggtcttgccgcccacgttgaacacggcattctcgatgcggttggcgtaccggcccacgaacgcgccgcagcaggtactgccggacgattcaaagtccttgacgtaatcggcgtaggtatcgtggcccagcaccacatccaccggcccgcgcttggtgggcacccagatattcttgatgatacagccgtagttcagcacactgaccgccagcccgccggggttcgagatgatgtattcattgatcttttcgccgtttggagtcatgccaaagggcttggagagaaactgtgccatagggctcgcctccttttgtattttttggggacagcacactctctgttttatcctttattgttttgattatatcacaattttctccttctgtgttggcattttttaagggaatctatccaatatttcgagagattttttgtaagttctgccccataggcagaaaaaagccccggagggccaggggtaggcgctccggggcttgtatgtcagattagatattactgctggggctttgcagtaacctcataagtcattgcaactgcagcgtaagtcttgccattgacagtcttagctgcaacaccaattttcgtaattttgacagacacaccatatgcacttgccattccatccagcaaatcttgcatagtatccgtaccctgattcagacttccaatgttatctgcagtaatttccattacttcatagatgccattctgcattttgccatccttcatcagaggcaatgccatcgtcatagaacccttaccagtcaaaatatcttgctggaactttttgtaatcctcaacggagtaggatttccgagaatcaaaagtgcccttctcggtgtcgatcaaatcaatcttgctctcagcgagtttcttcaaatctgcatcatttacctgaatacctgtggcctgcttcatagcaccaaaagctgcatcttcagtcttctgtgcgaaagaaggtgcgctgtcatcgccgcaagcggtgagcagtgccagagccattacgccggccagcagaagggcggccattttcttgagcattttcatttgtagaacctccaatgtaaaatgatattttaccacacagaaagcatacccctacaccttctgcattgtgaactcattttacatctcccccccccctgtcaagattttttattgaattcctcaatttttggagactgtgccaaagctgcggcaaattttttagcagattgacaaaaagcacccctcacatagctgtgaagggtgctttgggaggttttcttactccggctgagcggtgttctgggcgatatactcggcagcatcatcggggatgtcgtcaaggttttcatcgccgatatccacgttcagcggcggcttcttgaagaggatgtcgtacatcaggggcacaacgtacagggtcatcagggtggcgtaggtcaggccgaagatgatgacgatggccataccgctcatcagctggctggccatatcgccgctgaacaccagctggagcatggccagaacggtggtcagggtggtcatcaggatggggcgcattcgtgttttgccggtggcgatcagggccgcgcggcgctccatgccgccgatgcgcagctggttggcgtaatccacgaacacgatgccgttgttgacgaccgtgcccatcaggacgatgaagcccatcagggagatcatggtcaactgctggccggtgagcagcaggcccagcaggccgccggtaaaggccagcggaatggtgaacagaacgatgaagggggagagcaggctctggaactgggccaccataacaaggtagacgaagggcagagccaggaacatccactggcccatctgatccaccaccatgccgttgatctcagagccgccgcccatgtagaagctgcagccctcgggcatttcatcggatgcggcaaactcgttcagcttcttttccagcgcgcgggtctcggtggtggtattggtgccctccaccgcgtccgccgtcacgctgatatagcgggtctggttcttgctggtgatggagtccggggtggagccggtgacccaggtggccatatcgcccagcgtgcaggtgccggtctcggtggtaccgtcggcagccataacggaggtcgtaaaggtcatatccatcatgttttccttggtcatggggtccagattgttgctgatctggacgttcatggtggagccatcgatggcaacgggggtctgggccgtggtagtggtggtcagcttggcggcgatctgctggtagacctgcgccacggtcaggccgtaggaacggaccttatcccggtcgatctgcaggttgatggtggcatcgccgctgcccagaccgttggtggcattggtgaagccgtccatctcgttgaccatatccaccaccttctcggagagggcagtcatggtatcaatgtcgttgccggagacctgaacggtcaggcccatatccagctggctggtcagctcctgcattccgctgatctcaacggtggcggtgcagttctccacgccgttcacagcttcctccagcgcctcacgggcctgttcgatctgccgggaggagaggctctcgtccagcatcacgttgatctggtaggtgccgtagctgttggcggctttcagcaggtcggtgatggtctggggcaggcccagctggccgacatccattccggccacgcggctgtcggtggtaacgcccacctcttccacgttgtccacagccagcagggcatcaatgacattctcggccacagcataggattcttccttggtcagatccttctcggtggagagggtgacgatggcctcgttgctggtgatggtgggcagcatctcaacgcccatggacatcacgcgccagccgcagaacaccagcagcaccactgccgcgcccaacggtgcccagcggtgctggaagcaccattccaggctcttgacgtacttttcctgcaccttgtcgaaccacttgagctctttgggcttggagtttttcagcagggtagaggaggccgccggggcaaccgtcagcgccacgatgagggaagcagccagacagtagccaatgcacatggacatgggctgcagcaggctcttgatgacacccgatgtgaagatgacgggcaggaacacgcagacagaggtgagggtggaagccatgatggccatgcccacctgcttggtgccctggaccgccgcgcgggcagcgggcacgccgcggctgcgcagacggtagatgttctcgatgacgacgatggagttatccaccagcataccaatgccgagggacaggcccgccagcgtcataatattcatatccagaccggtgaagtacatgagcaccacggcaaacagcaccgacagcgggatactgatgccgaccaccagcgtgggcttgatatccttgaggaagatggccagcacgatgatggcaagggccgcaccgatgagcatactgctcaggatgctgctgacgatgatgctgatgtagttgccctggttggacagcacgaccacatgcaggccgtcgtatttctgttccagctccttgaaggcggccttgcagttgccggaaacttcaccggcgctggaggagttgctcttgaagatcttcagcaccacggagcgctcgccgttcaggcgggtaaagctgtcctcggcgttgtcaatgatctgcacatcggccacgtcagacaggcggacatcgccaaagccgtccacatggagcagcagggcaccggagatatcctcgatgctgtcgtactcctcgccgaccttcagcagccaggacttgttgctggaatccttgacataaccggcgggcatggagaagttctgggcatagatcagctgtgccagcgtgtcaatatccagcatcttggccacgtcggagttctccatggccatctgcttggcatcctcatactgctgcttggcatcggccagctgcttctcgtaatcattcagcatctcgcgggcctcggtgaacttgatataggcctgcagctgctgctgggaatagctgcccacgatctgggtgaactgatccatcaggccgggcacgtcgtccatggccttgatggtgctctccagcgtgttataaatgttgctcaggctctgctgcacctgcagatcatcgaccagctccccggccgttgtgccggcggtgtcgccctgcgcgttcaggcgctgctgcagatcctgcaaagcggtggtcagcttatcggtgatatcgcgcagctccgccacgatctcgatcagagaatcgatatcctgcattccggtctcgttgaacttgtccacgacccgctgcaggccgtcccgcacatcgatcagggcctgctggatctcaggctcgttgaccacggcaatgagctggttgacgctctccagaagggcctgtgcctgcttcttgaccagcatgaaggaatcctgcagttcgccggaatactggctgttgatggtatcgctgaccagcttgtcgtaactggccagctgggtctcgtactcctttctgcctgcctcgatctgggcctcggcagcatccagctgggcctttgcatcggccagctgcacgtcaatgacttccagcagcttttcattgatggcatcgatcttttcctgatcgagctgcacctgcaccatccgggtgaccaggccattggcggagatattggaaacgccgccctgacgctcgatataggggaccatggtgtcgttgacgaaatcggccagctcataggaatcgctgccctcgcggctgacggccacggtcataaaggcgttcatgttcagggtatattcaatgatggagggggtcatacaggtgcttggcaggctggaggtggtctgatccaccttgttggacaccttgaccacggcactgttcatgtccgtatcgtcctcaaactccatcagcagcagactgtagttttctgccgaggtggcggtgacgtttttcacgcccgagatggtgcccagcgcactctccatcacgtcggagacctcgttctccacacgctccgggctggcaccgggatagaccgtgaccaccatcaggtacggtgtgttcacgtttggcagcagattggtctgcatattctgcacggacacaaggcccagcatgatgaccatgatgactgcgaccagaacggtgaacggttttttgacgctgaatttttccat

SEQ ID NO: 320 - DNA, 7105 bp, unidentified
  source 1..7105: mol_type = unassigned DNA
gagggctaccgccctgccgccgacgtgctgatgttcgcccacaagtatggcgaaaagtttcacctgctcaccgaccccgccgagggtgtgaaggatgccgatgtggtggtgaccgccgcatggaacacggcccccggcacccccgaaagtgagcgccgcctgcgagacttcgcgggctttcaggtgaccagcaggctgatggagggcgcaaagcccgatgccatgctcctccactgcctgcctgcgcaccggggcgaggagatctccaccgccgtctttgaggagcacgccgacgagatctttgacgaggccgagaaccgcctccatgtgcagaaagccgtgttggccatcctgctggccggtctgtaaaaacgagaaagagccctggggctgcagaaaattgcagctccggggctcttattgtttctctcagggtctgcggctcaggccggggccctcatcagacaccagagtaggcggagaagccgccgtcaatgggcaggcagataccggtgataaagccggcagcctcgttgttcagcaggaacagcagggcacctaccaggtccttttcgctgtcgccgaagcggcccatgggggtggcagccaggatcttttcggtgcgggcggtgggggtgccgtcctcgttgtagaggagccgtgcgttctgctcgctggcaaagaagcccggggcaatggcgttgacccggatgcccaccttgctgaagtgcactgccagccactgggtgaagttggtgacggcggccttggagccggagtaggccgggatcttggtcaggggcagataggcgttcatgctggagatgttcatgatgttgcagccggggcggcccaccatctgccgggcaaaggcctgcgtgggcagcagggtgccgatgaagttcaggttgaacaccatctccacgccgctctcgtccaaatcgaagaaggtcacggtgtcatcgtccagatccgccatctcgaagaattccttgtcggtgttggcccgggggttgttgccgccggcaccgttcaccagaatgtcgcagggacccagatccgccatcacctcctctgccacctgcaggcagttggccttgttcataacgttgcaggtgtagcccttggccacgccgccttctgcctcgatcgcattggccagctccttcagcttctccatgttgcggcccagcagagccactttggctcctgcccgggccagagccttggcgaaaatggaacaaagggtgccgctggcaccggtgaccacggcaaccttgccggacaggtcggtgttcagaacattcttttccacgaggatactccttttttgatcagatggttgtggtgatacggatgattgttttcaagcggacaaggcatcagaccctgccagcgcccttgtccaggatcttattgaactggaggaagaaggtggtggcggtcacggcagcggcgatgatgtcactgacgggctcggcaaggaacacgccgaacacggggtttgcgaccacatggggcaggatgaagatgagagggatgagcaggatgagcttgcgcaggcaggccagcagcaggctgaccttggcctgacccagcgccataaagctctgctggcaggcgatctggacaccggtggagaagatgcccgccatgtagatgcgcatggcccaggtggtgtaatcgatcagggaggcatccgaggtgaagatgccagccactgcaccgggaaccagcatcatcagcagccagaagatggtggtgtagctcaggcagagggtcagctggaagcggaatgcctgcttgacgcggtctttcttgcctgcaccgaagttgaagctcatcaccggctggccgccctggcagatgcccgagatgggcatggtgcacagctgggaggcgctggtgatcacggtcatggcacccacggccacgtcaccgccgtagcgggccaggctggagctgaagctgatggacagcaggctctcggtggagagcatgacgaaggtggaaatgcccagtgccagcacgggcaggatgatcttcccttccagcttcatgtcctctttgcggatcttgaggatggtcttggggccggtgaggaagcggatgacccagatggcacccactgcctggctcagcacggtggcaatggcagcgccctttacgcccatgcccagcccaaagatgaggatggggtccagcacgatgttgatgaccgcgccgataacggtggtcagcatactgatcttggcaaagccctgcgcggtgatgaaggtgttcatgccaagcacgatcagcacgcagatggtgcccagaatgtagatgcggctgtaagccagagcgtagggcagggtggtgtcactggcaccaaacagccgcagcagggtgggtgcggcggcgtaaaagacgatggtcaggacgaccgagaagagcagcagcatggtaaagctgttgctgacgatcttttctgcctgcttcttgtcgccctggcccatggcgatggcggtgcggggtgcgccgccggagccgatgagcatggcaaaggcgttcaggagcatcaggatgggggtaaacaggcccacgccggtcagagccgctgcgccgatccccgagatgtggccgatgtagatgcggtccacgatgttgtacagcaggttgaccacctgcgccacaacggcggggatcatcagctggagcaggagctttttcacgtcacccgtgcccatatcctgctgttttttctgcgtttgtgccatggaaagtgtctcctttggtttgagcgagacggagagggctgccctcagaacgtcaggccgaagttcatctcgtagtagttgcctgcggcatcacggtaggcgtaagccttgccgttttcgtccttcatgctgtcgggcatgtaggcatcctttgcaaagccgggcacgtcgttggggctgatgcagacaccgtccgcgttcacagccagcacctcgtcgcccttgggcagggtcaggggcagcttgccaacgggagcaaagcggccgaacatcacatccagcgttgcggaggggtaggtgtcaaagccgacggtcagagcgtcggagaccttctccacattgccgacctcccaggccagcgggcagttgatgttggaaacgaccttgccgccgtgggcgtggaccgcagcagcgataccggccagacggtttgcgcccaccagagtggtctccttgtgggtctcggtggtgggcttgccgctctcgtccacgttgcagaccgtcttgtcctcgcagatgtccagctccaggtagcccggggtggcgttgaagtatgcaccggactgggggctgaccatcagcagggccacctgggcctcatcgggggtgtccaccagagtgacattgcccagcatctcgcgcagggccttggtggcggcctcaccggcctcggcgctcttgccaaaggcctcagcgtagaccttggtgccgtccttcaggggcagggtgccgtcgttcttcagcaggacaacggactcgcggtgcacgcgggaagcttcctcccagtcggccttggtggcaacgacctcggcggccttcctggggtcggcgtaggtgtcctcgaacataccctgacggaacagctcggtcagggtgcggctgacagcgcggttcaggctggcatcggtcagcaccagatcttccttcttgaagccggcgggcaccgcgtgggtgtcgtagtagtcgttggtgccgcgggcgtagctctcctcgcccagctcgttgtccagcaggccggagatcaggtccacgccgctctgggtgacagcatagccgatgcgctcgggctcgtccagcatgtcaacgccccagcacatgttgtggacgatgccggtgtcggagttgatgtagcccttgaagcccatctggccgcgcagcaggccgtcgatgaacaccttgttgtaggcaaagccgtagggctgaagctcgatggggttgccgttgaagtcctcctgcggagcgctcttctcggcgctgggcttggagtagtagggcatgatggactcggcattgtggcggatggcggcgcggaatgccgggatgtggtacttctgcagggagccgggggtggcgtagatgttccactggcctgctgcatagtgggggtcaaagccgttctcacgggcaccgccgccggggaagtgcttcacggtcatggaaacaccctcgggggtaacgccgttgctgccgccctggatgccggggatcaggtggtcgaagatctcctcaatcagtgcggggtcctcgccaaaggtgccgaaggtgcgctgccaacgggggtcggtgacgcagtcggccatgtacatgtagcccttcttcaggccgcaggcgttccactcgcggcggatggtgtcggcgaacttgtcgatgatgtcgatgcgtgcagtgcccttgacagcagcagcaatgcccagggtgccgggataggtggcaaacacgccggtggcatcgttcatgccgaacacgacctcgccgttctcgttgcggctgttggacatgacctgcatgggaacaaagtgatcacaggtctcggtcagatactgcagctggttcaggtaatctgccagatcctcgggcgtggggctctcgcgcaggatgacgtggcggttgaagctcttcttgaccatgtcagaggtgctgggcagggactgggagccgaagatgctgtcggagacgttcacgggtgcctcgtccagcaggccgctttcgtccgccacgggcttgtggccgttggctgccagacggggggaaggatacttggggcccatgcgccagtcggaggtgaagatctggccgatcttctcgctggtggtcagaaccttgacataggcctcggcgcgctcagccggggtcaagcgccagtcgttgactgcgctgacggtgccggtgccgtcgatgtccttgaaatacaggccgtcctgctcgatgaccttgcgctccacggtgctgatggtggggccgttggggttctggtagcgctttacacgctcggatgctttcactgccatagtgttttctccttttcttttgaacgcagcggcccatgccacagagccgcagatgctatacctattataataggccgccgcgcggaacaactagaaaaatttttggatatttccgcactttccttgtattctttttttgtgcgcggttagaatacaagcccgttttgtggaatgtgctgtactagtatcttgcaatcatgtgcaaaatgacgaacgctgttttttaaaactgttgatttcgcccaaggagagtaaaattgtcctgttttacctcaaaattttactaacagaaatttgatggatagttcataatgtatacataaaaatcccccggttcgcgatgtggcagccgcagcccacgggggaccgaatgaaaggccggagtgagtggcagcacaccggccgcagaattgaaaggagagcttctctatggcaaaggtcaaacagccgcttgaagaaaacggcatccacagagcgaaaatgtgggagatcatgatgtacgctctgaacaacacctccaccaacacctacatgatggtggtcggttacatcagctacttcctgatcggtatcgtcggtctggcatccgtgctggccggttccattgttaccatcatgcgtatctgggacggtgtcaccgacccgttcgttggtatgatggtcgataagaccaacggcaagttcggcaaaaaccgtccgttcattgtcatcggtcagatcatcatgttcgtcaccaccttcgtgatgttcaacttcatccccaagatgggcactggtgtccgctttgttgcgttcatcatcatctacatgatctacatcattggctatacctgccagtgcgttgtcaccaagtctgctcagacctgcctgaccaacgatcccaagcagcgccccatcttcgcaatgtgcgataccgtgtacaacatcatcctgatgaacatcgtcatccctgtcatcgttaccgacagcctggttcccaagttcaccctgactgccgaggccaacgctgcagagatcgcttctctggtggcacagaaccccgctctggcaggcatcgtggagaagtctggcggcaacctgtccgctttctacaaccccggcctgttcaccaccatgcagctgatgttcggcggcctgtctgcagtgtttgcagtctgcgccatcattgctctgtggcgtaaggaccgtcccaagtacttcggcctgggcaccacccagaaggtcggcgttaaggattacgttgacaccctggctcacaaccgcgccatccagatgctggtggtctccgcatctaccgataagctgttcatgtctaccatgagcaactccaccgttatgatctgcctgttcggcatcatcttcggcaactatgccgcattctccagctactctcagatcacctctatccccatcgctctgatctccatcctgctgatgaacaagatcgctcgtcagatgggccagaaggcatccatgatgaccggcacctatggcggtatcatcggttctatcatcatcaccctgttcctggtctttgtgaaccccaagggcgatgcttccaagtttgcgatccccgcattccgtatcatccgtcccgacacctggggcaccctgttcaccggctggagtgcagtgggcctgatcttcatcctgctggtcatcgcatggcgcggtgtgcaggctctgtcctcctctatcgttatcaccatgaccgctgactgcgccgactacgaggtttatcgtaccggtaagtacgtccccggcctgatgggcaccctgttcagctttgtggataagctggtctcctctctggcaaccactctggtggccctgttctactccatggtcggcttcaaggacgctctgcccgataccctgactccgtactctgacggcatcttctgggcaaccatcggctgctttgtcctgctgcccatcgttggctggctgtgcaacgttgttgccatgcacttctatcccctgaccaaggagaagatggaagagatccaggctgagatcggccgcatcaaggctgaggctgctgcaaagcaggcttaa

SEQ ID NO: 321 - DNA, 5549 bp, unidentified
  source 1..5549: mol_type = unassigned DNA
atgacggacaagaaacggaaactgacacgtccccgaaccggaagaatactttccggtgtatgtgcaggactggcaaactttttcggacttgacgtatctttagtacgcatcgtttatacgttcgctaccgtctttactgcttttgcaggtgtaattatatacattatattattgattatcataccagaagaatccaatagatattatagaaatgattaaagtaggaatcatcggcggagccggatacacggcaggcgaactgatacgtttactgctcaaccatccggaagcggaaatcgtattcataaacagttcaagcaacgccggcaacaaaattactgatgtacacgaaggactgtacggtgaaacagatttggtatttaccgaccagcttccgctggaagaaatcgacgtgctgtttttctgtacggcacatggcgacacgagaaaattcctcgaaagccacaacgtgcccgaggagttgagaatcatcgacctctccatggactaccgcatagcctctcctgaccacgatttcatttacggcttgccggaactgaaccgccgcgccacctgcaaggcaaagcatgtagccaatccgggctgctttgccacctgcatacaattggggctgctgccgctcgccaagcacctgatgctgaatgatgacatcatggtgaatgccatcaccggaagtacgggtgccggagtgaaaccgggtgccacgagccacttcagctggcgcaacaacaacatgagtgtttacaaagctttcgagcaccagcacgtgcccgaaatcaagcaatcactccgccagctgcaaaacagtttcgatgcagaaatagattttatcccctaccggggtgacttcccgcgcggtatcttcactaccatcgtagtaaagaccaaagtggctctggaagaaatcatccgtatgtacgaagaatactacgccaaagattcctttacatttgtcgtggaaaagaacattgacctgaagcaagtggtgaataccaataaatgcctcatccatctggagaagcatggcgacaaactgcttatcatttcctgcattgataacctcctgaaaggcgccagcggacaagctgtccataacatgaatttaatgtttaacctggaagagaccgtaggattacggttgaaaccttctgcattctaaaaaaaatgaatttattcgacgtataccctctctttgacatcaacatcgtcaaaggaaaaggctgccatgtatgggacgagaacggtaccgaatacctcgacctctacggtggccatgcagtcatctcaatcggacatgcacatccacattatgtagagatggtgagtaaccaagttgctacgttaggattctactcaaactcagtaattaacaagctgcaacagcaagtggcagaacgcttgggaaaagtctgtggctatgacgactactcattcttcctcatcaacagcggtgccgaagccaatgaaaacgccttgaaactcgcctctttctacaatggccgtacccgtgtgatatccttctcaaaagcattccacggacgtacctcactggcggtggaagtaacgaacaatcctaaaatcatcgctcccatcaacaactgcgggcacgtcacctacctcccgttgaacgacatcgaagccatgaaggccgaattgtccaaaggagatgtctgcgcagtgattatcgaaggcatacaaggtgtaggcggcatccaactgccgacagacgaattcatgcaggctctccgccagacttgtacggaacacaacacggtcttgattctcgatgaaatccaaagcggctacggacgcagcggcaagttcttcgcccatcagtacaacggcatcaaagccgacatcatcaccgtggcaaaaggcatcggcaatggtttcccgatggcaggcgtactcatcagcccaatgtttacaccagtatacgggcaacttggaaccactttcggcggaaaccacctggcttgcagtgccgcccttgccgtgctggatgtgatagagcaggaaaacctgatagagaatgcagcccaagtcggcaacttcctgataacggaactaaagaaattccctcaaatcaaggacgttcgcggacgcggactcatgatagggctggaatttgaagaacccatcaaggaactgcgcctaagactactgaaagagcagcatgtattcaccggtgtaagcggtacgaatgtacttcgcctgctgccgcctctgtgcctcggcatggatgaagcaaaggaattcttggaacgcttcaagaaagtactttaatatttgacacaaataatcagccagcaaaagaaacgaccgaaaagcagaatacctttctctctcggtcgttttttgtagaaaatttatctacctttgccagcaaaacaactcttttaacaacaaaaagatatgaaaacagtaattatcggtgcaggaaatatggggggagccattgcccgagggctggcaaaaggaacaatcatccctgccggtaacatcattgtctccaaccccacccagggcaagctggacaagctgaaggcagaattccccgcattgcaagtgaccaatgacaaccaggaagcggcagccggtgcagatatgataatctttgccgtgaagccatggctgatggagccagtgataaaggaactggaactaaaaggcacagagattcttatatccgttgcagccggcattccttttgaagagctgacacactatgtagcagacaaagaaatgaccatgttccgtcttattcccaataccgccatcagcgagatggaaagcatgacactcatcgccagccgcaatgccaccaaggagcaggagcaactgatgctggacattttcaaccagatgggactcgccatgctcattcccgaagaaaagattgcggcaaccactgccatgacttcctgcggcatcgcctacgtgcttaagtatatccaggcagccatgcaggccggcgttgaaatgggtatctatcccaaagacggcatgcgcatggtggcacaatccgtgaaaggggcagccgagctgattctgaacaacgacacgcaccccagtgttgagattgacaaggtgtgtacccccggaggaattaccatcaagggaatcaacgagctggaacatgaaggattcacctccactgtgattaaagccatcaaagcgagtaaatgatatttaatgtgctaatgtaacgatgtcccgatatgcctatgagctacggtataattaaacattgtgcagcctattggcacattgccacactttaataacaacccattaaaaaaatataattatggacgaacaaatcagacaaatagccgaacgcctgcgcggactgcgtgacgtattggaactgactgccgacgatatcgcccgcgactgcgacatctctgcagaagagtaccgtctggccgaaaccggagaattcgacatctcggtcagcatgctgcagaagatagcacggcactacggcatatcactggacgcactgatgtttgggcaagagcccaaaatgagctcctacttcctgacacgtgccggaaaaggaaccagtatagaacgtaccaaggcatataaataccaatcgctggcagccggtttcatcaaccgcacggcagacccgttcatcgtgaccgtagaaccgaaaccggacagcgagccgatacattacaacagccataccggtcaggagttcaacctcgtactggaaggccgtatgatggtcagcatcgacggcaaagacttaatcttaaacgaaggagacagtctatacttcaactccaaactgccgcacggcatgaaggcgcttgacggaaagactgtaaaattcctggcagtaatcatgtaataaagttatggtagaaagatttttatctcaaacatccttcacctcacaggaggacttcatcaagaacttgaagataaacgtaccggagaatttcaacttcggctacgacgtagtggatgcctgggcagccgagcagcccgacaaacccgcactgttgtggaccaatgaccagggcgaatgccggcagtttacctttgccgacatgaaacggtacacagacatgacggcttcctatttccaaagcctcggcatcgggcacggagacatggtgatgctgatactgaaacgccgttatgaattctggttcagcattgtggcactgcacaaactcggtgcagtggtgattcccgccacccacctgctgacgaagaaagacatcgtataccgctgcaacgccgcagacattaaaatgatagtctgtgccggcgaaagcgtcatcaccgaccatatcacggcagctatgccagagtctccttctgtgaaacgcctcgtaagcgtcgggccggaagctcccgaaggattcgaagacttccacaaaggtatcgaggccgccgctcctttcgtgaaaccggaacatccgaacacgaacgatgacatctccctgatgtacttcaccagcggtactaccggagagcccaaaatggtggcccacgacttcacctatccgttgggacatatcgtcaccggcagcttctggcacaacctgaaagagagcagcctacacctcaccattgccgacaccggttggggaaaagccgtgtggggcaagctctacggacaatggattgccggtgccaacgtatttgtatacgaccacgagaagttcactcccgcagccatactggagaagatacaggattatcacgtcacgtcgctttgtgcaccgcccaccatcttccggttcctcattcacgaagaccttacgaagtacgacctatccagcctggaatactgcaccatcgccggagaagccttgaaccccgctgtattcgagaccttcaagaaactgacgggcatcaagttgatggagggtttcggacagaccgaaacgaccctcaccgtcgccaccatgccctggatggaaccgaaacccggcagcatgggattgcccaatccgcaatacgacgtagacctgatagacaacgacggccgttctgtggaagccggtgagcagggacagattgtaatccgtaccgacaaaggcaaaccgctgggattgttcaaggaatactaccgcgatgccaaccgtacccacgaggcatggaacaacggcatttactacacgggagacgtagcctggaaggacgaagacggctacctctggttcgtgggccgcgccgacgacgttatcaaaagtagcggttatcgcatcggcccgttcgaagtggaaagtgcattgatgacccacccagccgtagtggaatgtgccattaccggtgtgcccgatgaaatccgcggtcaagtggtaaaagctacgattgtgttggcaaaagagtacaaggcacgcaccggagaagagcttgtcaaggagttgcagaaccatgtgaagaaagtgacggctccctacaaatacccgcgtgtcatcgaatttgttgatgagctccccaaaaccatcagcgggaaaatccgccgtgtggaaatccgggagaacgaccggaaataa

SEQ ID NO: 322 - DNA, 12016 bp, unidentified
  source 1..12016: mol_type = unassigned DNA
tcatactatctcacctgccgtttcccgatagatttcaaagaacttatcctcaagtggcatttccgccgtcacatgggaaagcgtgtcacacaaaaccatttttccgttgatgataatgccgacacggtcgcagatcttttcgatcagtgaaaaaatatgtgttgatacaatgatcgtttttccttctgctttcaattcctgcagaaaatcggtcacaactttcgccgtgataacatcaagtccgtttgtcggctcatcaaaaataatgatctgcggatcatgcaccagtgaaatgatcagggatactttctgtttcataccggtggagagatttgcaaccttcacttccgcaaactcatccacaccaaatttctgaaacaggatacgttttctctcatcccgctctgcctgatcgacaccgtataattctgagaaaaaatcaaacagatagttcggagtaaaaaattcttccagttttaattcactcgtcagaaatccgatctttttccgaacaccgttcggatctgtcacaatactgcttccgtcaatcagagcatcacctttatccggtttgatcagcgttgctaacatgcgaagcgttgttgtctttcccgctccattgggccctaataatccaaaaacttcccccctgtaagtacaaaaggaaagatcatccaccgcaaccttaactttttccgttgtcttttctaatttctgctgtttttttgacaagtgaaatgtcttggataatccactgactgtcaataactcttccataaccctctccattaaaaatttctatatcatgatcgtgatctacactcgcttcgctcggcagtcttattatatcgttccgtcatccatactgtcttcaatatcatcatagatatcatcgtaaatatgatcatagatgtcattatagctgctataagatccaagtcctgtaaaaaaaatcaggatatacagaataatcgatgctgcaaaaccgattccacctgtgatcaaaccaacgatcgccattccttttttgtttccttttaccagctgtaaaataccgaaaatgattgcaaggataccggtgatccagctgatacaagtgcagaacagcaaaacggtgatgattccaagtatcaacgacgcaataccaaatccttcactttctgacttgttattgccatttggctgtccataattataatctgtactgccgtttgactgtccatagttataacctgcactgtcatttgactgtccgtaattataatttgtattgccgtttccatatgacgtatttgtataatacggattgtctgtcatagtcttttctgaatttacacgctcttcatttccggtcacagtcttctctaaatttacacctgctgtaccatcagtcgtacttttctccaggctgacaggatttccctgatttacattcggctcatcatttccataattccagttattttcttcactcatactctcactacctcttaattaaatccgaccactttctgtgacagtcgatatgccgcaaccgaaatctttctgcctcccttgcccggcagattcattgcatttcccataattccggcgcgcagatgatggaataaacggatgtcgtgatccttaatatatttccacagttcacgttttttcagaagattttcctcagtgccggagcggatcaacataatcgtggaaatgaccgtgatgatttccagataattaaacatgtaatgacgcagttttcggtttggaatcttccagagatcaaattcatctaccataatcttatttacattgatctgctggtcgatacggctgatcatcactttctcattgaccgactgatcttccctgccaataaagtaacggtaaaaatctacatccatataatacagtgtttttacacttggtaatggtttgtacacataaatattatccacataaaatgtatgtttcggcagctctaatccacattcacgcagcagttttgtacgataaatcacagaatgcatcaaaatgtactgaccctttctgaaacgtgacacatcattccaggtaaaaatctgattttggggcaggttcgtgtagtgcatcacttttttatgatgcgcaccttctttttcatatacataattggcaataaacatatccagggtctgattgccgccggtcagctcacgaagtttatctaaaatcttcttataagcctcctcatctacccagtcatcgctgtctaccactttaaaataaagtcctgtcgcattgcggattccagcattgacagcctctccgtgtcctccatttacctgatggattgcacggatgattcccggatatttcttctcataggcatctgctatgtcaccggtgctatcttttgacccatcatcaatgatcaggatctcaacatcatcgccacccggcagcagggatttgatacagttttccatgtaatcctgtgaattgtaacacgggatcgcaaatgtcagtaatttcatatatgaatcctccgattatctttttgtattttctgccatgatcgcatcagcaagttccatcgcttttttcgtcatcgcatcgatattatagtatttgtattctgccagtcgtccgagcagataaaaatgcggcagtccacctgcaagcgcatgatatttttcatagagttcctggttcttcggctctaatatcgcatagtaaggaatttctccctccgctcctgtgtaggcaaacggatactctttcacgattgtggttccgtccgtgttcttttgtccggtcagatacttaaactctgtgattcttgtaaaatcctcactgaccgtgtaattgaccacgctgtgtccctgataagattctttctcataatgttcaaagtcaaatcttaaggaacgatatggaagccttccaaactgacagtcaaacaactcatccagtgcgcccgtatagataacctctccgtcaaacgttgttccatcaaaataaatctgattttcttcaaaacgcaatctctctttacagtcaacacctgtctcaaccgtgatgttctcatggtctaacatgcgctcaaacatcggtgtgaaaccttccttcggcactccctgatatttgtcctgaaaatagcggttgtcataagaaaccagcaccggcacacggcctgtcacttccgggctgatatcctccggtttttgtccccactgcttcatggtatattttaaaaatacattttcgtacacaaactgtgcgatctcgcggatgtccggatcttcattttcccgcagtttcatgatcggcacgcggcttccctctccgtatgcagcaatcagtttctgctctaatgcatctgctttttccttttcatataccatatgaagcgtatttaaattaaacggaaccgggatcagacgatccccgacctttgctaccacctcatgtccgaatacataccagtccgtaaatcttgagagatactgatatacttcttctattcctgtatgaaaaatatgtggtccataattatgtattaatattccatgttcatccggctcatcatagcagttacctccgatatgactgcgtctctctaaaaccagtactttctttcctgcttcctctgcaagctttctcgcactgacagcacccgcaattcctgcgccgatcacgatactatcgtacatgtaatcctccttgttttccactttgttttaccatagccattctattatacacattttcctaccgcaaaccaatcaaatttttctttagatattcttaatttctgccaaagtatgtagttgttcatattttatttacataattctcacaaacagggcatacggcggtcacaattccccgatatactaaattcaaagttaaggcaacaagttaaaatttttcatagaactttttttcatacctgatgtaagtcaggtagccttgcttatccgataagcaaggttcctcccagcaaatagtgaattacttcacttttcatacacactctttttcataatgaatagccggtgctgttgcaccggctccctctttttataaatattttcttttaagctttcttttcatttccaagaagaatgttcatatatttcgcatacgcagcaaaagcggacggaatagcatatttttcttttgcatcttctgcttccacaaataataatccatctgcacgatttttttcacacttcacctgtggatgcatttccggctcctctacacggactgcataacctgtcatgtgccattcgatatgggaaaaaatatgtttcgcctcacctaacggctgaatacggatcggtgcataccccatctcttttaccatggaaagtacttcctcctgtcccatatttccttccacattcggaagctcatacagtcctgccaaaagtccctttgccggtcttttccggattgcaaccttctcatcatcccttaaaatcagaaccgtttttttctcgatctttcgcggttttgccttgctcttgactggtatctgtccgatcagttcctgtttttttgcctcacaaaaatccttccatggacattcggtacaaagcggtgcaccgtttggcacacagatcgttgctccaagttccatgagtgcctggttaaacgcaccggcaagattctgatgatatacctttgccctcagatcatctgcatcctccatccatggaaatacatttttttcatttctgccgtctgccccatgcatcagtttttctaataatttttccatctcattacggaatgactgtttcatgatatccgtatcatccgcagaaacgcgcgttaaaacacggagcacatttccatcgaccgccggaaccgggattccgtatgcgatagatgcgaccgctcccgctgtataatggccgatcccctttagtttcaacagtttctcataatctgccggaagttgtccaccataattttccacaacttccacagccgctttttgcatgttcctgacacggttataataacctaacccctcccaaagctttaaaagttcatcctccggacacactgcaagtgcctttgcatccggcagtgccgtggtaaaccgctcaaaatacggctttaccgcctccactctcgtctgctggagcatgatctccgaaacccacacccggtatggagtcggttcctctcgccatggcaatacacgggcatgatttaaaaaccattgcaataatggggatacaagttgctttaagtcgtaatcttttaacatgtatgtctcaaactttctttgttatatagcagccttcatgtctgcgcttatttttttcaaaccagtaccttatttgaggtcaaactggctgacaaatactgcgatcttctctaaacatttcttaataatgtctttggaataagcataagagcagcggatgtaaccctctgcacaacttccaaatgcgtctcccggaatgactgccaccttctgttcctgcagcagacggttacaaaattccatgctggtaagtcctgtttttttgatcgacgggaatacataaaatgcaccttccggttctgtcacatccagtcccatattccggaacccgtccaccatgatctttcgtctctcatcgtattctttacgcatcacatcgatctcttcgtcacgaaccggactcgtcagtgcttcaagcgccgccacctgtgacgttgttcctgcagacatggtcgtaaactgatggatcttattcatatgaaaaataacttccgcaggacccgctgcaatacccatacgccatccggtcattgcaaatgcttttgaaaaaccatttaataccacacaacgctcatacatatccggcagcgccgcaatagatgcatgctttttgccataggtcagctctgcataaatctcatctgtaatcacaaaaatatcatgtgcggtcacaacctcacggattgcttctaaatcctctttttccatgatcgctccggtagggttgttggggaatgagatcagcagtacttttgttttatctgtaattttttcttcaagttcttccttcgtcaggcggaatttattctctgcctttaacgggatggaaaccggaatgccgccacacaattccacacacggaatataggaaacatagcaaggttctacaactaacacctcatcccccggatccaccagtgcacgaagcgccagatcaataccctcacttgctcccatcgtgatcaggatctcattttccctgtcataatgaagtccaaacttctctaaatactctgcagctgccgcacggagttcgaccgtaccgcgattatcggtatactttgtctcacctcttttgattgaagcaatcgctgcctccctgacatgttccggtgtcggaaaatccggctcgccgacaccaagtgacaatgctccctccatcgtatttgcaatatcaaaaaagtccttgatccctgaatccggcatctcctttactaccttagataagtatgatttgcttgtgtccatggtttttcctcttttctgtgtctttgtcaaaatatcataccacctatcatagcactttttctaccaaatttatagtgaatttttcccataatctattgacaaattcagggaaaagctgtacgctattaataacgtatattgttaattttttatcaaactattcaggagggttccaaacgatgagcgattttaacaatttaaaactggaagttgctgaggagattgctgttcttacaatttcaagaccagcagcattaaacgcattaaacagcgagacattagacgagttaaacacagcattaactgagatcgaagcaagagacgacatcaaagtcgtaatcttaaccggcggtcctgacaagaaaggcaacgaattcaaatctttcgtagcaggcgctgatatttctgagatggtaaactttaccgcagctgaagcaagagctttcggtatgagagcttccgtaccattcttcaaattaatgaacatgcgtcaggtaacgatcgcagctgttaatggttttgcacttggcggtggatgtgaaatttccatggcatgtgatatccgtatcgcatctgacaacgctactttcgcacagccagagacaggtcttggaatcattcctggattcggcggtacacaaagacttgcccgtttagtaggcatgggacgcgcaaaagagatgatctttacctgcgattccgttgatgcagcagaagcttaccgcatcggtcttgttaataaagtagttgctccggaagagttaatgaacacagcaaaagctatggctaagaaaatcatctccaaaggaagctacgctgtttccgttgcaaaagcagcaatcaacaacggttatgatatggacatcaagaacgctgttgagatggaagcaaacttattcggcgtaacctgctctactcatgacaaaacagaaggtatgactgctttcttagagagaagagctgctgatttaacagatttctaaaaaaacatatcaaaaaaacgggctgataattcagtccgttttttttgatatactcatattccaaatttaatgtgcaggtaatctctgattacctctacgcatttttcacgcccccatcaaaaccgacaccaccggcatcgtcaccacagcaagaattgccgtaagcgcaactcctcttgccgccagatcataatttccatcatactgctgctgataacctttttccgctgtgagctcactaaggcatcttttttgcagatcaggctctttgcctcctgataacttttgccataatcctgtggattctgatatggtctgccaagaatacaggtgcttttcatccggtgacaaaactgtggattgtcatccagttcatttaataatctttccagactgtggatcagtctgtcatcttcatagtccggaaataaaatgacacctttattcaaaaaattcataaacagggctgcatctccaagatccgaaatcatttttgccatacagctcatataataatggtatgtatgttcatcattttcaagattttccccatagacactgtctaccacaataatccccacacggtgtggaaccgaaaaatccatatgaaacagtcccgcgattttttcaatataccgcgtgttgatatcatacccaaacaataaattatacaaaaattctcctttgcggtttgtcttattattttcctcaatcacataatttccaatgctctgcgcaatatccacaaaagacgctttttcccaccggatttgaaacaaaggtaaagttaatttttccgcgagatcaataatatccactggcacctcttccctctcatccttaatggaaattgcaaaacctgatatcttaagttcatcaagttcgcgcatggcactctttacttccgcccatccaaaacgctcaaaatctacactgcagagtgcaaaatccccggcattcatatggtcggcaaacggtctcgtcataaccacataactccatgacactacacgatccagaccgccttctccggctaacagccacattccatccagattcatctgtaagatatccctgcattttaccatacaaacaccttcttttctattgaatcaaaaaaagcgtcagaaccctcttagttccaacgcctttgtcaataatttttatcatttgtatgtaatatagtcgatagctatatttttgtcaatatcccgctgtttctatatttcagtggagaaatgccatatgtttttttgaaacttctgataaaatagcttacattctggtatccgctctgcatagctgtctccgtcactgaaagatcggtgtcctgtaacaactgttttgcattctccaaacgtaaatatgttatatattgcgacaatgtaatatggaaatgttccttaaaataccgcgatatatatttttccgaaagatgaaactgttccccaaattcctttagcgatatctttcctgtaaaattctgctgtatatatgaaaccatctctttttctacaatatttctgccgcttgtatcattttctattacaaatcctttcttccacatttcaagaataaattgtaaaagaattatttttgtctttatctgcgcagttatttttgactcagtttcatcattttctgccatatatatatcaatcagctgctcacacagttcttttgccgagtcttttactcttgggtttatcatcaaatgaccgctatttaatggttcaagcaatttatcatctaacatgtcatcggtccgaaaagatatatattttaacggaaacaaaaatgtaaaataatccacggtgccggtctgtgagcccataagatgcagattgcccggcgatacaacgaacgcatcccctgcttttccaatataactctctcctgatatacttaccgtcagcaaaccactttttacatatataatctcaaattcatcatgccaatgtaccggtatctgaaatgaccgccccgcattctctatgtgatatatactaaatggattgtcctttgtaccatgtggtttattttcctttaattcaaagtacatactctctcctacaattctacaaggctcttgcttttccattttccgctcttccatctaagcaccattccaacagctctcgcgcactcatcacctgccatggcaatatatgctcctactgcctgaagtcccatatgtattccaagaaaatatgttccaccaactgcaaacagatacataaatatcgcacccattataaccggaaaaaccgcatctccactggtttttaatgcctgaccatatacaagatttgtcacccttccaaattcaaggaatatatctactattaacagccttaccacaagatttatcatttgcgcatcatccgtaaatatatgaactataaaatgtccggacatcgcaaatgtcacagagaagcacgtcgctgttataagaccatataccacagctttccgcgtacccctgtcacattcttcaaactcctttgatccaattctccagccagtcataatagcattagcctgtgcaagtgcagctcctatacaatacgaaaaatttgctatctgcatagcatatgaacgggctgtaacattcattccgactgcatccatctgattcatgaatcttactataagtgtcattgcaacattataaagtgctgtttcaaatgcagaaggaaaacctatcttaacaatctgcgcaagtatcttccgtggcggaatgcgctccggactctgctttgcctttatcagtacagcacccatgcctgctacaatgataaggttcacaacttttgaaataactgtggcaatagcaacgcccattactccccaatgaaatacaaacaggaacactgaattaaatattatattaatggcatttcctgcaatcgttcctatcaaggaatgctttgtatatccaaacactctgagatagctggaaaaaatgggaataagcgcatttaaaacacatgcacctccaacaattttaaggtatgtttctgccggctcaagcaaagccggagaaatacttacgattctaagtatttctccagaaaaaaaggcaataataaccgacataaggatacctgtcagtgcgttaaacataagtccaagctgtctggcctgatatgcaattccaggtctccccgctccgatattttgtgacataactgctaccataccggatgatattaccccgaacatgatgataaaaacacttatatacgtatttgctgttccgacagctcccacagcctggtcgcttacagacgataacataagtgtatcgaccatgcctgaaagcatataaaataaagtctctaagcatattggcacagccagctgtgtcaatgtttttctttcagttgccatgtttttctcctatgaaaactaatataacatacattatcaataatatggtatttttctgcatatttcttgtataatattatgcaaaaattgcattatttctacttatttacgaagtgaatcagcaagtctgttaattttgccctgatctgcattatcataggaaaatattttatgattccacattctcatctctgcataaaatgttgacgtttccccccaaatagactaggatagaatttgaatgataaatacgcaaaacaaggaggaaaatcctctgctcctgcaatggcagtcgcattttgctccgcaaaacaaggaggattttatgttagataaaatgattggttttatcggtgccggcaatatgggaagcgccatgatcggcggtattctggatgcatctttagtgactaccagccagatcatcgcaagtgcacactctcctgagacacttgataagatccggacaaaattttccatagagacaacccagtcaaacgaggtcgttgcagaacgaagcgatattttgtttctcgctgtaaaaccaaataaattttccgaagtacttccgcagatcaaaggtcatttaaaaccggactgtatcgtagtttcgattgcagccggacagccgatcgcaaatatcgaggcgctgctcggtgaggtcagactgatccgcgccatgccaaacaccccggcgcttgtaggcgctgcgatgagtgcactctgtccgaatgacaaggtaacaccagaggaagtaaagctcgttgagtccttattcaacagcttcggccgtgcagaagttgtaccggaaagcatgatggatgccgttgtcggcgtttccggttcttcccctgcctatgtctatatgtttattgaggcaatggcagacgccgccgttgcagacggcatgccgcgcgcacaggcttataaatttgctgcccagtctgttttgggcgccgcaaaaatggtattagagaccggaaagcatccgggcgaattaaaagatgctgtctgctctccgggcggtacgaccattgaggcagttgcagctttagaacatggcggtttccgtgatactgtgatcagtgcacagcgcgcatgttctaaaaaatcatatgatatgagtcaaaaataa

SEQ ID NO: 323 - DNA, 6174 bp, unidentified
  source 1..6174: mol_type = unassigned DNA
ttattttccaatctcttctctagtctctttaaaacatttgataatgaaatcaatatcttcttttgtatggctcgcgcatacctgtgtgcggattcttgcttttcctttcggtacaaccggataagagaatgcaaccacatatacccctttttccatcattttctttgcatattctccggcaagtctttcatcataaagcataaccggtacacatggatgagttccttcgatgatatcaaatccattttctaccagctgcttgcggtagtatgcggttacttcttccagatggtcacgaagctcggtgctttcttccagcatattgaacatctcaatacttgctcctgcgattgccggtgcaagagagttggagaacaggtacggacgacttctctgacgaagcagatcgatgatctcttttcttccggatgtatatccaccggaagccccaccgagtgcttttccgagtgttcctgtaatgatatccactcttccttctacgccacagtattcggaagttcctctgccgtgtgctcctacaaatccaactgcatggctgtcatccaccataaccagtgcgttgtatttatcagcaagatcacagacaccttttaagttacagatgattccatccattgaaaatacaccgtctgtagcgatcagtttgactcttgctcctgctgcatctgcagcctgaagctgtgcttccagatcttccatgttgttatttttatagcggtatctttttgccttacagagacgaactccgtcaatgatggaagcatggttcagttcatcactgatcactgcatcctccgcagtcaggattgtttcaaaaagtccaccatttgcatcaaagcaggaagaatataaaatcgtatcatctgttcccagaaatccggaaatcttcttttccagttttttgtggatgtcctgtgttccgcagataaatctgacagaagcaaccccatatcctttttcatcataagttctcttcgctgcatcgatcagtctctgattgtccccaagtccaagatagttattggcacacatattaagaagctctcttccgtcttccattacaacctttgcgccctgcggagatacgaacggtgcttcccctttgaaaagaccatctgctttgatctgttctacttcttttgtataaatacttaaaatatcattttttcttgccattttattctctccttcttctgcttttcctaatcgttaatatgtgcccagtcaaggatcacctttcctgactgtcctgagatcattgcctcaaatcctttttcataatcgcggatatcaaaatggtgtgtgatgatcggtgaaatatcaagtcccgcctggatcatcgtagacatcttgtaccaggtatcccatacttttcttccataaattccgcggatattcagcccattgaagatcactgtctcaagatctacggttgcatcctgtctctgcaatccgagaagtgcgatctttccaccatgtttcatgttatggatcatatcagaaagtcccggctggcttccggacatttcaagtccgatatcaaagccttctgtcattccgatctcatgcatcacatccgtcagtttttcctgtgtcagattaacgcatctggtcgcacccatttttgctgccagatccagacggtactggttcatatccgtgattaccacatgtcttgctcctgcaaattttgcgatcgccgctgccatgatcccaatcggccctgcacctgtgatcagcacatcttcaccaagcatgtcgtaagataatgcagtatgggttgcatttccaaatggatcaaagatcgcatataattcttcatcaattgccggattgcacggccatacatttgaagcgggaataaccagatattctgcaaacgcaccgttccggtttaccccaacacctttagcatctttgcagttctctttgtgcccttccagacagtttctgcattttccacaagtgatatgtccttcaccggataccagatcgcccaccttgaatccctgtacacctgcaccgacttctacaacttccccgacatattcatgtcctgcggtcagtccgatcggaatagtatgctgtgcccattcattccactggtaaatgtgtacatcggtaccacagattgcatttttatggatcttgatctttacgtcatttggtcctacttccggaatctgtactcttttcagccagagtccctgttccggtttttcctttactaacgcccacattttattatcattcatcttcattacctccgcatgacacatatgtccgtttaacgcggactttttattacttttgtttttctatacttaggataccctatttttcttctcttttcaatctattttccgtgatacacaaacattttacatgttcatgtttttgtagcagatacaagcacatgtgtctttctattgcaagcacatttattatatatatacaaaaacagacagataaatctgtctgtttttcacaatgccctactgtcgattttcacaatttcgttctgtttataacaatcttttttctttctgatgtaccctttttctcacaaaatagaagcacacgacctgaagtacaatggtaaggatccatgacaccggataggatacaaaaagtacggataaagatctgtggttcggaaaaattccaaatacccacacaattcttgttcccaccgttccgatcactgaaagcaccatcgggactgctgaatatcccattccacgaagcgcacccggaaacaaatccatgatcccacacaggaaataagtgatcgatgtatacgccaggatttccattccgcagttgataacctttggatctgaagtataaattgtcagaatctgcggtccgaagcaataggcaagaccaccaagcactaccgcgatcgatatagacagaatcgcacagtcacgcagcaccttatccattcgtttcagcttaccgacaccataattctgactggtaaaactcatacatgcctgagttatcgaattcactgacatataaaggaacccaagcatattgttcgctgctgtatagcctgccatcgcaatcgatccaaatgaattaaccgaggactgcaacagtgcattggacaaattgatgaccgtactctggattcccgccggaactcccacctggaaaatctgttccatgtaggcaccattgatcttcagtttggagaaacgaagctgataacttccttccgaccggtacagacaggtcagtaccagcacacaggaaatcagctgtgaaataattgttccaattgcaaccccggcaactcccatatgaaaaagaataaccagtatcatgttcagcgcggcatttgcaattccggaaatgatcaggaagatcaatggcctttttgtatcaccaatcgcccttaaaatggccgccccatagttatataacataaaaaatggcattcccataaaatagatccgcatatataaggcagactgcccgatcacatcatccggcgttcccataatttcaagtgcccactttgcaagaagcaccccgataactgccatcataattccactgatcagcgcaagtgtgatcgaagtatgtactgtttccgacatctcccggtctttgcccgctgcataaaatctggctgcaagaacattggcaccaagtgaaattccgataaacaggttcgtaaacacattaatcagtgctgttgtggagccgactgcggcaagtgcctgactcccggagaatcttcctaccacgatgatatccactgcattaaacgcaagctgcagaattccggaaaccataagcggcagtgaaaaagagatcagcttgtccatgatggagccgttgcacatatcaatttcaaacttattttttttcacattattcacccagcccttcatcaaatgtaagtctcatctgattccagaccacgtttccatgtactgattctgagacaccttcatttttgaatccaaacctggcataataagatatcagccggtccttgcaggtaaggacaagtccctttcttccctgcttttttgcatctgtaatcgctcttttgatcaattctcctgcatatccatgtttccggtaagacggcagcgtatttacaccaaaaatcatctgccagtcacctttttcatcatgcatttccgctttttcatacatttcgtctgtcagatcttcctgattcgtcaccataccgtccacgaaggcgatcaacttctcttcttcaaacatcagccagaaatgatctttataaaaagtaagtctcttttcaaattcttcttctgttgccgcttctgctgccgggaaacacgctgcctccacacgggcaatttctttcagatcactcagatctgctgttcttattctcatctttactctccctctttttctaatattttcagcattttttctacattttcgctggtccatgccggaaattccagtaccgcatccgggatatcctgccttccagaatccgggttgtggaaccagatacatttcataccggctgctctggcagctcctccaccgttagtcgaatcctctactaccagacagtcctccggctccattcccagtttctctgccgttacaaggaaagtatccggtgccggttttggatgctctacataatctccactcatgaccactgtaaaatatttctccatatccagagactttaatgcatctttgatcgcataagccggagaggaagacgctactgcaagcagatatccttcgtcttttaactgcttcaatgcttctttaattcccggcatctccggaaatccttctgcctctgtaatctgcgcttttttctctttcatgagcgcattcatcttatccacatcatcaaaaaccggcccataattctcattgatcaaatccatgaagaatccacgggtagaaccgatacacggaaggtaaacctcatagtcaagatcgattccgttcttctcttttaaaatttctttccagcaacgatagtgtaatggttctgtgttgatcagaacaccgtccatatcaaaaataactgctttcatatctttttagcctcgattaaatgatttaaattctctttccgttcttattttgaatgacgtttttaaagatgtcaagacggagaagctaaaaagaatgtgccaaggcacattctcgcgccgagcgcagtcgcttgcgacattcttcatcttcgtgcgagtgcgcatctccggcacacagtgccttttatttcataggaaatttcttcggaatttcctatgaaataaaaagagagcgactgtacgattcaaaaaacgcacaggcactctctttggcttttatggatttttcttaaggtctctgtcccattccgccttctaaggtgatcgtctctccgttcatatatttgaaatccggtgatgcaagctgtacgcatgcacgtccgatttctttttctacatctccgtaatgtccagccggcggcatctttacatttgccttgaatgcttccggataagctttctggaaattctcaagctgtgctgtccatgcgagcgggcatacgatattgacattgattccatctggtccccactctgttgcagctactctggaaagtccacggattccttcttttgccgctgcatatgcgcactgtccgtaatttccgaaaagtccggcacctgaagcaaagttgataacagatccctttgtctctttcagatacggataacatgcctgcatataatagaataccgcatatacgccggaatacattgccagattgaactggtctgttgtatgatctgcgatcgtaacaccagatgcggatgcctgtgcattattgatcaggacatcaattcttccgaatgtatcaattgcctgctttactacgttctgtactgttgcttcattatcagcccccgcgctgacatcagcctgtacaggtaatactttgataccatagagtctctccagttcttctttggcatcttcgagtttctttacattacgcccggtaattaccagattcgctccttcttttgcgtaagctgttgcaattccatatccaatagatccgcagcttccatcacttaatacagctcttccgccgcctgtgataattgcagtctttcctgttaaaaatcccat

SEQ ID NO: 324 - DNA, 10823 bp, unidentified
  source 1..10823: mol_type = unassigned DNA
  misc_difference 5831: note = a, c, g, or t
  misc_difference 5832: note = a, c, g, or t
  misc_difference 5833: note = a, c, g, or t
  misc_difference 5834: note = a, c, g, or t
  misc_difference 5835: note = a, c, g, or t
  misc_difference 5836: note = a, c, g, or t
  misc_difference 5837: note = a, c, g, or t
  misc_difference 5838: note = a, c, g, or t
  misc_difference 5839: note = a, c, g, or t
  misc_difference 5840: note = a, c, g, or t
tcacagcactgccacggcgaggaaccgcacaacgagcgcggcaagccatgccacaacgcactggtttacgaccataacggtggcccagcggccgcccatttcccgcttgaccgatgccacagcggcgatgcagggggtgtagagcaggcagaacaccagcaggggagccgctgccgccgggctgagcgccgcgcccagtgcggcagaggagccatacaggatggtaagggtggagacgacgctctcctttgccataaagccggtgatcagcgccgtggacacccgccagtcgccaaagcccagcggtgcaaacagcggcgcgatgccgctggcgatccaggccaggatgctctcctgcgggtctgcggtcaggctgagctggaaatcaaagttctgcaggaaccagatgatgatggttgccaggaagatgactgtaaaggcacgctcgaggaaatcccgggccttttcccagagcagctgggccacatttttcaggccgggcaggcggtagttgggcagctccatgacaaagggcacggcctcacccttgaacagcgttcccttgagcagaaaggccataccaatgcccacaaggatgcccaggaaatacaggcccaccatgaccagcgcggcgtactccgggaagaaggtcaccgcaaacaggctgtagatcgggagcttggccgagcagctcataaagggcgtgagcaggatggtcattttccggtcccgctccgagggcagcgtgcggcttgccatcacgccgggaaccgtgcagccaaagccgatgagcatgggcacgatgctgcggcccgaaagaccgatgcgccgcagcagcttgtccatcacaaaggccacgcgggccatatagccggtatcctccagcagggaaaggaagaagaacagggtcacgatgatgggcaggaaactcagcacactgcccacgccggtaaagatgccgtcgatcaccagcgaatgcactgcatcgttgacgttccacgccgtcagggcattgtccacaaggatcgtcaggttctcaatgcccagttccagcaggccttgcagccccgcgccgatcacgccgaaggtcagatagaacaccagcgccatgatgcccacgaacgccgggatcgccgtgtactttccggtgaggaagcggtcgatccttgcgctgcgcagctgctccttgctctggtggggctttaccacggtctgattcaccagctgatggataaagtggaaccgcatatctgcaatggcggcggcacggtccaggccgcgctcctgctccatctgcaggatgatatgctcgatcatctctttttcgttctgatccagcttcagggcctcctcaatgcgggggtcgccctccaccagctttgtggcggcaaagcgcaccgggatccccgccgcccgggcgtggtcctcgatgaggtggatgatgccgtggatgcagcggtgaaccgcaccgccgtggtcatcctcgccgcagaagtccatccggcccggacgctcctgatactttgccacatggatggcgtgatccaccagctcatccacgccctcgttcttggcggcggaaatggggaccaccgggatgcccagcatcgcttccatctcgttgatgttgatggtgccgccgttgccgcgcacctcatccatcatattcagtgccagcaccatgggggtgtccagctccatcagctgcatcgttaagtacaggttgcgctcgatgttggtggcatccacgatgttgatgatgcccatgggcttttcgccaatgatgaactgccgggtcacgatctcctcgctggaatagggcgacatggagtagatgccgggcaggtcggtgacttcggtatcggggtactcccggatggcaccgctcttgcggtccaccgtcacgcccggaaagttgcccacatgctggttggagccggtgagctggttgaacagagtcgttttgccgcagttctgatttccggccagcgcaaaggtcagcaccgttccatccggcagcgggtgttcgccctttttggtgtggtagcggccgccctcgcccaggcccgggtgctccaccatccggccggccttccgtgccggagctgctgcgggtgcttccgccggggtgatctcgatccgtgccgcatcgtccagccgcagggtcagctcatagccgtggatctgcagctccatggggtcccccatgggcgcaaatttcaccagcgtgaccttctcgccgggaatcagccccatatccagaaaatgctggcggagctctcctgttccgcccactgtatcgatcacggcactttcgccgatcttcagttcctttaatgtcatggcagatgcctttccttcgacaaaatgttagtgtatgtgaacagtcttaatataagctaactcaaaggcattgtcaaggcgggaagcggcaaaaattcccgcctgtccccgctgttttttgtagagatctttctcctgttccggcagatttccgggcaaaagaaaacgcacccctgaattttcacgttcaaaggtgcgttttgagaacagttctgtttacttcacggtgtggtagccgtcggggttgttcttctgccagttccagctgtcggcacacatctcctcgatgccgtactcagccacccagcccagctcgttcttggccttggtgggatcggcatagcactcggcgatatcgccggggcggcgggcatcgatcacataggggatcttcttgccgcaggccttctcaaaggcatggatgacatccagcacgctgtagccgtggccggtgcccaggttgcagatgaacaggccgcagttggtctgcagcttcttgatggcgcagacatggccccgggccaggtcaaccacatggatgtaatcgcgcacgccggtgccgtcgggggtggggtagtcgttgccaaagacgtgcaccttttccagcttgcccacggccaccttggcgatgtagggcatcaggttgttggggatgccgttggggtcctcgccgatcaggccggacttgtgggcaccgatggggttgaaataacggagcagggccacgttcagggtggggtcagccttgcagacatcggtcaggatgcgctcggtaaaggccttggtggtgccgtaggggttggtggtggcacccacggggaagtcctcggtgatgggcacgctggcggggtcgccgtagacggtggcggaggagctgaacacgaagttgtggcagttgtggcggcgcatcacgtccagaatgaccagcgtgcagttgaggttgttatagtagtactcgatgggcttggagacgctctcgcccactgccttataggcggcaaactggatgacagcatcgatatcagggcactcggtgaagatcttctccacgtcctcgtgctttgtcatatcggcctgatagaaccggaagtccttgccagtgatctgcttgacccgatccagcaccacgggggaagcgttgtaatagttatctgccaccacgatgtcaaagccagcgttcagcagttcgatacaggtgtggctgccgatataaccggcaccgccggaaaccaaaattgccataaaagtacctctcttctcgtcaccaaagttgcttgcgcggggcaggcccgccttctgccacaaggatacaacgttttggccgcagaatcaagtaacgggaattttataaggatggatttttgtttccaattatttttccgcgcattgatttacaagcgttttttgttttttgcacatggagtgatggaacactttgtgcaaatcagagaaaaagccctcccgggcaaagccgtcaggctttgaatgagagggctgcattttacagtttcccgcactgtttgccggtgaagaaccgcagggtggtgttggcacggaacactttcccggcccgcagggcggtggaggggaactccgggtgggaggggctgcaggggaagtgctgggtctccagcgcaaagccgccgtatttctgcatcggcacgccgcccttgccgggggcggggcagtcctgcaggaaattgccggtgtagagctgcacgccgggctgggtggtatagaccttcatgctgatgccggtcttatcgctggaagcccaggcgcacaggctctggctggccccgcggcccctgtcgatgacaaagcagtggtcatagccgccgcccaccatggtggtctgggaaaagccggtgtcgatgtcccggccaatgggcttgcccgcccggaaatccatcggcgtgcccgccacgggcaggatattgccggtggggcaggtctcgttgttgccctccagatagcgggacgcatagatgcgcagcttctggcccagcacatcgccgccgccatccagattgaagtaggtgtggttggtcaggttgatgatggtgtcggcatcggaggagacacggtaatccatccgcagggcgttgtcctcggtgaggatataccgcaccgatatcttcagatttcccgggaaaccatcctctccatcggggctttcggcctccagaagcagggtatcgccaaaggtctttacctcatacagcttgcgcgggaaggtgccgtgcaggtggtttttgccgttgttggcttccagctgataggtcttgccgcccacgttgaacacggcattctcgatgcggttggcgtaccggcccacgaacgcgccgcagcaggtactgccggacgattcaaagtccttgacgtaatcggcgtaggtatcgtggcccagcaccacatccaccggcccgcgcttggtgggcacccagatattcttgatgatacagccgtagttcagcacactgaccgccagcccgccggggttcgagatgatgtattcattgatcttttcgccgtttggggtcatgccaaagggcttggagagaaactgtgccatagggctcgcctccttttgtattttttggggacagcacactctctgttttatcctttattgttttgattatatcacaattttctccttctgtgttggcattttttaagggaatctatccaatatttcgagagattttttgtaggttctgccccataggccaaaaaaagccccggagggccaggggtaggcgctccggggcttgggatatgttcagttttaagatttacagagcaggctgagtaggagcagtaccatattctacagtataggtcactaccattgccatataggttttaccattagacaaagttttagttgctacaccaatggctttgatttcgccattataacccttaagaacatcgtcaatgccatttgccttgggatcctgcagttttgccaaatcagcagcagttacttccattgcatcaaccaaatcatcgggttttttgacttctccaaaattcttcacagcaattccaagggtaatctcgtaaacatttttcttatcagtcggctttttgattccggtaatgccatcttttgcaacaatcttaccgtcagcattgaccttttccagcatctgagcagcctgtgcacgcagagtactatcattggtaagtgcagaattctcacccagtgcagtattcactgctttgatagctgcatcctcaacctgcttgccaaaagaaggcgtgctgtcctcgccgcaagcggtgagcagtgccaaagccattacgccgaccagcagaagggcggccattttcttgagcattttcatttgtagaacctccaatgtaaaatgatattttaccacacagaaagcatacccctgcaccttctgcattgtgaactcattttacatctacccccccccccccccccctatttttttttaaattccccatttttnnnnnnnnnngagttcagacgtgtgctcttccgatctcccccccccctgtcaatattttttattgaattccccaatttttggagactgttccaaagctgcggcaaattttttagcagattgacaaaaagcacccctcacatggctgtgaagggtgctttggggaagttttcttatgcagaacacggttcggtaattgcctcccgcacctgttctaacgaaagttcggtggtctgggcgatcttatccagatcatgctctccgttcttccagagattgagcgcaatgcgctttccctttgccacctcggcatcttctcgttcccgatcaacgatcacctgcattgtcttgcacatagctgccactccttccgtttcttctttaaagtattttactcttgcccttattttggggttccggatatcccgatagtcatcacagcggaaatcctgcatcagcgcgccgacctcatccgttccccgatatgcgccgttcacatatacgatatgtgcacggtcgtggaacagcttcccggtttcctgaatcgtccgttcaatattgtaaaccggcagaccatctcccaaaacatcatttgccgtaataaatatgatatatgtctcaggcaggtcagaatatttttcaccagaagtcgtcaggcgggaatcaaacagcgcactgttcagccgcgcccgttccggagcggctcccttatcttcctgctgtacttcgatatcgtactgcttgcctgcatcatccgttgcataaatgtccagccgtacagaacggccaaacagattgccgatcgtaagctgtgttgcagaccttgcgacggtcaggtcctttcgtttcaggatgatgcgaagcagctcctgtgtgctctctttatctcctgaaaacacctgtgtcataaaggtgtcatccatcagggtgaatttacggatagcattcatgcgttcttcattcttctcatccaactgtacgaaccgcatttccgccatcctttcgtttcagaaaaagagtacttttctacgtttatattttatcatcattttatctatactgcaagtatcaaaaaagcacccctcacatggctgtgaagggtgctttggggaagttttcttactccggctgagcggtgttctgggcgatatactcggcggcatcatcggggatgtcgtcaaggttctcatcgccgatatccacgttcagcggcggcttcttgaagaggatgtcatacatcaggggcacaacgtacagggtcatcagggtggcgtaagtcaggccgaagatgatgacgatggccatgccgctcatcagctggctggccatatcgccgctgaacaccagctggagcatggccagaacggtggtcagggtggtcatcaggatggggcgcattcgtgttttgccggtggcgatcagggccgcgcggcgctccatgccgccgatgcgcagctggttggcgtaatccacgaacacgatgccgttgttgacgaccgtgcccatcaggacgatgaagcccatcagggagatcatggtcagctgctggccggtgagcagcaggcccagcaggccgccggtaaaggccagcggaatggtgaacagaacgatgaagggggagagcaggctctggaactgggccaccataacaaggtagacgaagggcagcgccaggaacatccactggcccatctgatccaccaccatgccgttgatctcagagccgccgcccatatagaagctgcagccctcaggcatttcatcggatgcggcaaactcgttcagcttcttttccagtgcgcgggtctcggtggtggtattggtgccctccaccgcgtccgccgtcacgctgatatagcgggtctggttcttgctggtgatggagtccggggtggagccggtgacccaggtagccatatcgcccagcgtgcaggtgccggtctcggtggtaccgtcggcggccatgacggaggtcgtaaaggtcatatccatcatgttttccttggtcatggggtccagattgttgctgatctggacgttcatggtggagccatcgatggcaacgggggtctgggccgtggtggtggtggtcagcttggcggcgatctgctggtagacctgcgccacggtcaggccgtaggaacggaccttatcccggtcgatctgcaggttgatggtggcatcgccgctgcccagaccgttggtggcattggtaaagccgtccatctcgttgaccatatccaccaccttctcggagagggcagtcatggtatcaatgtcgttgccggagatctggacggtcaggcccatatccagctggctggtcaactcctgcattccgctgatctcaacggtggcggtgcagttctccacgccgttcacagcttcctccagcgcctcacgggcctgttcgatctgccgggaggagaggctctcgtccagcatcacgttgatctggtaggtgccgtagctgttggcggctttcagcaggtcggtgatggtctggggcagacccagctggccgacatccattccggccacacggctgtcggtggtaacgcccacctcttccacgttgtccacagccagcagggcatcaatgacattctcggccacagaataggattcttccttggtcagatccttctcggtggagagggtgacgatggcctcgttgctggtgatggtgggcagcatctcaacgcccatggacatcacgcgccagccgcagaacaccagcagcaccactgccgcgcccaacggtgcccagcggtgctggaagcaccattccaggctcttgacgtacttttcctgcaccttgtcgaaccacttgagctctttgggcttggagtttttcagcagggtagaggaggccgccggggcaaccgtcagcgccacgatgagggaagcagccagacagtagccaatacacatggacatgggctgcagcaggctcttgatgacaccggaggtgaagatgacgggcaggaacacgcagacagaggtgagggtggaagccatgatggccatgcccacctgcttggtgccctggaccgccgcgcgggcagcgggcacgccgcggctgcgcagacggtagatgttctcgatgacgacgatggagttatccaccagcataccaatgccaagggacaggcccgccagcgtcataatattcatatccagaccggtgaagtacatgagcaccacggcaaacagcaccgacagcgggatactgatgccgaccaccagcgtgggcttgatatccttgaggaagatggccagcacgatgatggcaagggccgcaccgatgagcatactgctcaggatgctgctgacgatgatgctgatgtaattgccctggttggacagcacgaccacatgcaggccatcgtatttctgttccagctccttgaaggcggccttgcagttgccggaaacttcaccggcgctggaggagttgctcttgaagatcttcagcaccacggagcgctcgccgttcaggcgggtaaagctgtcctcggcgttgtcaatgatctgcacatcggccacgtcagacaggcggacatcgccaaagccgtccacatggagcagcagggcaccggagatatcctcgatgctgtcgtactcctcgccgaccttcagcagccaggacttgttgctggaatccttgacataaccggcgggcatggagaagttctgggcatagatcagctgtgccagcgtgtcgatatccagcatcttggccacgtcggagttctccatggccttctgcttggcatcctcatactgctgcttggcatctgccagctgctgctcgtaattgttcagcatctcgcgggcctcggtgaacttgatataggcctgcagctgctgctgggaataggtgcccacgatctgggtgaactgatccatcaggccgggcacgtcgtccatggccttgatggtgctctccagcgtgttataaatgttgctcaggctctgctgcacctgcagatcatcgaccagctccccggccgttgtgccggcggtgtcgccctgcgcgttcaggcgctgctgcagatcctgcaaagcggtggtcagcttatcggtgatatcgcgcagctccgccacgatctcgatcagagaatcgatatcctgcattccggtctcattgaacttgtccacgacccgctgcaggccgtcccgcacatcgatcagggcctgctggatctcaggctcgttgaccacggcaatgagctggttgacgctctccagaaaggcctgtgcctgcttcttgaccagcatgaaggaatcctgcagttcgccggaatactggctgttgatggtatcgctgaccaacttgtcgtaattggccagctgggtctcgtactgctttctgcccgcctcgatctgggcttcggcagtgtccagctgggcttttgcatcggccagctgcacgtcaatgacttccagcagcttttcgttgatggcatcgatcttttcctgatcgagctgcacctgcaccatccgggtgatcaggccattggcggaaatattggaaacgccgccctgacgctcgatataggggaccatggtgtcgttgacgaaatcggccagctcataggaatcgctgccctcgcggctgacggccacggtcataaaggcgttcatgttcagggtatattcaatgatggagggggtcatacaggtgcttggcaggctggaggtggtctgatccaccttgttggacaccttgaccacggcactgttcatatccgtatcatcctcaaactccatcagcagcagactgtagttttctgccgaggtggcggtgacgtttttcacgcccgagatggtgcccagcgcactctccatcacgtcggagacctcgttctccacacgctccgggctggcaccgggatagaccgtgaccaccatcaggtacggtgtgttcacgtttggcagcaggttgatctgcatgttctgcacggacacaaggcccagcatgatgaccat

SEQ ID NO: 325 - DNA, 6410 bp, unidentified
  source 1..6410: mol_type = unassigned DNA
ttaacattctaccgccaccttgatcacgccgttcctcttattttcaaaaagttcataggcttcttcgattctgctaagtggataggtgtgtgtgatcagtggttccgtgttgatcttaccttccgcgatcagtctcagcgtttcttcacaatcacaaccgtctactcctcctgttttaaaagtcagattctttccatacatatccggcagaggtaacgtctgggctttatcgtaaagtgccaccaccgtcacgattgcatttggccttgcgcattcccatgcaagacggaaagtagattctgctcctgcaacttcaagaacaacatccgcgcctccatgctcgctgtttgcctgaacaaaatcaaaacattcttccggcgaaactgtaagaacttccggataatgttccctgataaagtgcatacgcttttcgtctttttcacacatgatgatccgcttcggatttttcagcataacagacagtaaggtacagatacctgtaggaccggctccaatgatcagcaccgtgtcatcctcagtgatctcggaaatacgtgctgcccagtaaccggtggcaagtacatctcctacaaataacgcctgtctgtccgtaactttatccggaatcttattcagcccctgatctgcaaatggtacacggacatattctgcctgacctccatcgatacggcatccaagagcccaaccgccattttcatcggtacagttattcacataacctttcttgcagaaaaaacattctccacaaaaagtttctacatttaccgtcacccggtctcctggcttcacattcttcacagcagttccgacttcttccacaattccaaccatctcatgaccgactgtaatccccggcactgcccgtggaacgcttccatgcttaatgtgcaggtcactggaacaaatgctggcaagtgtcacctttacaatggcatctctttcatgcatcagcacaggctttggcttttccattaattcaaattttccttttgaaacataagtataagtctgcattcttttccccatcactttctataataatttatccagaatttccgctgctgatctattaccgaatacgccattgccaaataacaaccaagataagaaggtgcaccggataaaacgcataacagaaatacttgaaccacttgctatggtacccctgctctccatgatataaccagattggaatcagtgccagcagtgcaaagctctgctgtgcaatctcaaaatgatgtcccagaatcgttaccggataatacagattccccagcataactacattcaaataatacagcccgacaaactgtgccgcaaaagaaatccaggttttcttgcgaaaaaaataaaaaagcaataccgtcagtattcctgcagcattgtaatctaccatggttatggttccaagcagaaaatccatcaaaagcacgaggcaaaccacaaaaaacgatatccatttcttttgtttcttctttgccttttcaatgatctgtatcgataacacccctaataaaaaggtccatagtacattttgatgaaacgggtaaaatacagaacttcccataatcaggttaaatggtatttctgaaattatggcaaatagaaaaagacgcagcatgtattttttcacattcgaagtataatagcatccttctgcgatcataaatgcgaaaatcggaaaagcaagtcttcctacgcgtgtcatccattcctgtgctggaaatagtgtcgcccacaaatgatcacataacataaacagcattgccagaatatgtagtgtaaacgaatcaattcctctttttttctccataggttcttctccatctatccaggcatagatatctgccttttattcttttcttttcattatattatggagcattatccaacgtcaatcaactcttgcgtcctaatctatcactaattcagccagaactcaaatactcaacgcattctactcataaggggtgttcatttcttataatttatattatgcttagattaaacagaagggagtgaattatatggatttaatcaaaatcggaaaatatattgcagaaaaaagaaaagctcttggactgacgcagaagcaattggcagaaaaactgaatatgagtgacaaatcggtttctaaatgggaacgaggcatatgcctgccggacgtatcaatttatatggaattgtgcagcatacttagaatcagcattaatgaatttcttgcaggtgaagatatcggtgctgaaaatgtaattgaaaaatcagacagcaatcttattcagattacaaaagagagtaaaaagaaacaaaaaaatttaaaaacaattcttgctgtagtaactgtttttgcagtaattgtctctgcgatccttggcactttattctttcacaaactgatacagccaaaaaattatattaccgcagttgatcagacaagtactgagatgaaaacagcagaattattatccggaacagacggcgcatatctttttcattattttacaaaagatgaatttaaaacactcaccatttatgtatctgaatatcagtctgggacactgatcagtaaaagtaaagtggctgatttggactatgacggaatcgattccccttccagaggcgtcattgctgttgtgccggattttgaatcttttaaggtaaaattaattgtagcagatgattatgcaaaatattctacggattttcctattttagaaaatatagaaaacagagaatattatggcagaagtgcaagccagataaaaggggagattccgattcagattcattcagcttcgacaatagaaggcaagactgctatcccttcagactctgaacagggattaatggctctaatctatggaaaagacgggctgtcagggattcctatcacggaaatggaaaaaggaatcgttggtgtggaaaatgattatgtatattatctttccttccaatttgggggtaatcaaagtttttgaggggatgtctttttgagggtttagattaacataggaccaatttttagattgacgattccttaagggtctatatcattgacaacaaatattataaggctttctgtatttttacagtttcatagcactgcggatgcggttctcaataaattcttctccaaaatctgtattcaggctgagatcaaagtttccggctgcaccccacatacgtcgggtgtaatagcgatagttatctgcacgcagtttttcatttttcttaaccgtagctttggcttctccctcagagatattctgtctctgtgccactcttctaattctgctcacaagaggtgctgaaaaaatactttcaaacaatttccggaatttctgagaacgtaatctgcacaacggcctactatcacgcaattgccttttttcgcaagattgcgtacaacctggcattctgcctcgaaaattttattcctcggcgcttcatcctgtctgtattcagatacatctgattgaccagatcataaagaaggctgtttgtcatgatctcctcgtttttcttaacgaattccggtgtgtatccgatggtccctgctgtcatctggataatctccgcatcataaaaatcatatctttcaggaatgcaagtttcttaccgatgagtctggcgataaagcctaccagaagggcagcaataacagtaccttctcttataccagacagtctgtccgttgcgattttcccctgatataaaagcaggcaatgaaattaccgcctggtttcaaaacacgccatatttcatgaaatgctttttgcttgtccggaaatgcatgaaaaccattcatactgacaacggtatctaaaagcttaaaactatcgttctctaatcttcctgacattacgattcatgaggtgtcttccaatatatctataaacaaatgctttaaaggctgaaatttcttgatgatgttccttcaacagttcatctggacaatcataaacaccaaaatcctgattgattccctcgctctgaatataagtattgttcctatcaaactcaataatgagatttctgaaatccttgactgctactccataaccgcaaaatgcacctgtacattccgaattttgttcctgcaacttctttatgtaggttttatccaaaatgaaagcttccagttcgtaccactgattttcgaaattaatttctacccagctatggaaaatactttttggagcattacggtaaacaaacccgatcatagcccctttctgcaatcttttatcaatcgtaaaaccatgtactctgcatggaatattgcaggcacgtaaaagtgccataaataaagttccttttgtattacattgtccataaccatctgcaagtacttttgaagctgaaattccgtcatcaatattatatccaaataaaacatcatctcttacatagttgtagattgccttaatcctttcaaattcacccatttccttccatttcatattttgaataagtttttgaattgccggattagaaaaatcaaccattcgtgtttccctaagatacttatctttcattttctatcgcctttcccataggttttctcacaacacaatgcattcgcatacctttacgaatttcaaatttttctacttttaatcctgcttttttgcaacattttatgaccacatctcttgttggcacttggacatctccatgtccgcatatatttgccaacggcatttccaatgtattcattagccataccaatactttattgtcactggtcacatctctcagtatcaatcttccatttgggcgaagacatcttttcacactgtcaaaaaatgcctgtggatccggataatgatggaaactcatagaacaaataattgcatcaaatgaatccttttcaaaaggaaagttctcacagtctcctacaacaaatgttgcatttgaaatatttttcttttttgcctgttcaatcatggcaggagtcagatccagtcctgtataatgtcggtctggatatttttctgctaataaagaaatcatcggagcaggtccacagcctgcatctaataaatctctaaatggctccttctctaattcttcctgaatatccggataatccttcttgcacatttcgtaaataccagcatagctactttcatatcttcctgctgcttttgtaaactctttaattgacaattttttatattcttcatttttcatgcttttttctccaatcactgtgcctttttcgccttgcatccgcatttcttcatttttttcatataagcataaaactgcttatgcaattccctcatttcatctggtgccttcatagcatgttgatacataaatttatctccaaaactacttccaaatgtaactgccagcataatcgtcagaaatgacaatggcaaaaagcgaaaaatattcattttccatggtgacaatttacccttttgttttcgcaaaaagttaaaatttcttttcagcctttccgctgttttcctcataattttccattctttttccactttctccggatcgtctgattcataatacgcatccgcaatcggtaccaccatagcaagatgacaaagctgccatagatgcatatccgttacttcctggtatggtatatgagcatgcctcaatatctctgaaaactgcttagttctttcggatttatttcctgatttttcttatatagcaatccattatttcttaaagcctcaaatctttttcctctggcataaatacttgtatcataaccggcttctgcaaataaagctgcatacaaggagccgatcacacccgcaccataaatcaatattctcataagaatcattcctctcctcttaccccagtgccacatccaagatcatcatcaaactaaatccaagtgcaaagaaaagcgtaccgatattcgagttctgtccctgagacatttccggaattagttcttcaaccacgacatatagcatagctcctgctgcaaagctgagtaaatatggtaatgccgggattaccagctgtgcgacaagaatcgtcattactgctccaatcggttcaacgactcctgaaagtacacctcccagaaatgcctttctcttactttcaccctctgccctaagcggcatggatataatcgctccttctggaaaattctggatagcaattccaagtgataaagcaagtgcacttgttgctgtaatctgtgcattttcagcaagaaatccagcatacattacaccaactgccataccttcagggatgttatgtaatgtaactgccaacaccatcatcgtagtacggccaagtttgcttttcggtccctctgcctgatcacttccaacatgaagatgcggaatcaaatgatcaagtgcgagtaaaaacaatataccaatccagaaccc

SEQ ID NO: 326 - DNA, 5211 bp, unidentified
  source 1..5211: mol_type = unassigned DNA
ttattctctccgcgtaaggcggagggcagacagctttcccgccgccatcagcagcaccggcaggacgtaagcgacgtactgcgccacgccgccgtagacgatcagcaggttgtaggtggcgtgaaaggtgatggccgcgcccagcagaccgcaggtgccagcgatcttcagccacgtccgctgccaggcatacgccagcccttcgccggcgatgccgccgcacagcacatgcatggctcctgttccgaaaccgcggaagaagatgaaggagaagcggtccgctccgttctggatcagatagcagacattttcaaaggtggcgaaggcaagggcaatcgtgatggcggcagccttgattttatccccctccggctcgaataccagaagatagaataccagcggcagcagcttcatgatttcctccaccaccggcgcgatctccgccgtggcggcaagggcgtccgcctgacataccgccgcgaggaaggtgttgatataggccgaaagcaggcacacccccatcccggcaatgcagaacaggaagaagcggagctgccgccttcccaggcacaaagcggccaccagcagcggggatgccatgcacagaaagatgttttcgatgtaggtcatgcgtccaccgcctttctcgcggcgggcagcagcccgaaaatggcaagcgtcagcagcatatcacaccagaaggttgggcttgccggagaagtatccggccagaagcagcccaccgtccagagcaggtactccgaggcaacaaagcacagcacgccgatgtggaagtaccgcatcttccgcgccgcgcccgtctgcccgttggcgcagaccagtccgcgaatggagcagaaggagagccatatcatcatgccgcaccagagcaggttggagagaatgtccccgaaggtgcagtagaacgccagcagcggcacgccgaacgcaggcgcaagccatgctctgcggcagcggaagcagcgctcctctgttcctgccagcgtggcctgcaagatccgcaggaagataaggcttgccacccagccgaactccgacacataaaagacccggggtgtggtgtcgaacagcagcaggtacagcgtccagtagagcgcgccgagggcaaagcagccgtagaagcaaagcagcagaaaatacgcctgcctgcggcttctgcggtaggatagacccgaaagcagtgcgccggcgaacgtgaccagcagctgcagcaggttctcaatcagctccatgaattccctcgctttcgttgttctgatcgtcctcccgcttcatctgatgcagccggaagcacagaacggtcacgcacacgccgagaagaaacgccaaaagcccgatgacgatatatccgagagcgccgccgccatacatgctggccgccgtttcaaagccggagtagtcgccggtctggatgcttgcggcaatgccgggcatggcgagggacgcgccaatgagcagcacaaggcacgccgccacagcggaagccatggtaatcttattgcgccgcagccgtttctcccgctcaattttggcgatgcgccgctttgtctccgcgacccgttcctcatgactccgcatttgtgattccctcccgttccagcagccttcgcaggctctcttttccgcgatacaccatgttggtgatctgctttaccgttttccccgtgacctccgccgcctgcgcgtagctcatatcttcaaaataggtgagatataaaacctcccggtagtccgggttcatttcacccatgcagaaatgcaggacgcggtttcgctccgccgtccggataacctcctccgccagcagccgcccgtccggctcgttggtcagcgcgtcgaggctgaacaagggcttccgcctactcttgcgccgcagcgccgtgtggcgcgcggccttatagagatacgccttgaagccgccgtcccgtatcttcggttttttcgtgaacagataggcgaaaacatccagcatcagctcctccgcctcgtgaacgtcgtgcagatagccgtcaatatacagggtcagggggtcgccgtattttttcatcagggcctccagccccgcgtcgtcgccgcttagatattggcggtaaaaaacctcgtcacaggtcataacgttccctttcctttgcagccgttcaggatgcagggcagcctgtcagacgcttgcacagccgtgccgcccctccataccgataaaaaaatacaacacaatttcagtatatacgaatctcggaagaaaagcaagagggcaagcggagcgataaaaagcagcacacccggagaaataacccggatgtgctgcagaaggccgaaacacagagcagctcagcagcgggcgccgctgatcgtggggcgccggatgagatgaggcagcgccttgcccgcttccttctgtgcaatgagccatgcggccatatcccgcagggtctgctccagcgggcgcggctgatatgcaaagcacttcgatgcagccgcatggctgaagcagccgtttgaggcaagaacggaaatggaatatggggtgaaaaacaatggctttcgatccttcaagctccggcgctcgtagtacggagcggccagccttgcaagacccagaggcaagcagatgggccgataccgccgttttgccgccgccccgatgatctgcagcattctgcgaatcgtgacatagtggccggacaaaatgtagcctttaccgggctctccgctttcggaacaggcgagaatgccatttgccacatcccgcacatccacaaagtcatatccgccgcgaacggcgaaaggcagcttcccggcaagaaaggatcttgccattgaggtgaagctccctccctgtaaatcatccggcccgatgatgccggaggggaatacaatgctggcgttcaacccgcacgccgctgcgtcgtagaccagctcggtggcagcggccttgctcttggcgtaatcaccgtccacaagccccggcgagaattcacagttttctgtaatggggcagccctttggctgctccgggatggcatgaacggagctgacatagaccagcttgcccactttatgcgccatgcattgctgcaggagctgccctgtcccacctacattgacctgatagagcctcggaccgggtctggacgcgacggagacgataccggcgcagtgaatcacacaggtacggctgtcggcatccgcaaagaagtctgccagcgagtttttggcgcacacatcaccgataacggtatggacttctttggggagcaaattgatataggggtcattctgcagcacaagcgcgtacacttgcgctctgcggcgcaccagcctctccgcaacagccctaccgaggaagccggtagcacctgtaacaagatatttatcatacattcaaaagacctcctctcaagataatcatacaggtgttgattatctttcacaagtatagtatactggagaggcagatcagaaacaatcggcatttgccctgcaattgaaagaaaagcaacacgtcgtgccggagtgttgcagaattttgtaaactttttgtgaggagcgcaaaatggagaagctggatgcaagaaaacgctatacgcaaatggtgctcaagcagtcctttttggagctgctgaaggaaaagccggtcagcaggattacggtgaaggaggtctgcgcgctggcgcagcttaaccgtgccaccttctatgcccattacagcgattgcttcgccctgatggagagcattgagaatgaactcatcgatgcatttgagaaatcccttcgctatgtcaattcctttgatgtgacggcgctgatcgaggccatctatgatatggtcgatcagaatcaggaggcctgccgggtgctgatcctgggcaacacaagctcgaccgtcctgatgcggatgatcgccttggccaaggaggacagcattgcttactggcggaaagaactgcccaatgccagcgaaacagagcttgagatgatgtatacccatctgtcaaacggtttgatgcatgtcgttgtggagggctatgacaagtacagcaaagaggaaatgatccattttgtcagccgggtcgtaaaagccagtctttcggtgttccgatcgtcccaaaaacctcttgcttaacatagatattatgtctgcgtggtataataagctttgcaaaaggattgacggtcaaagaaaggatgcagcagatcatgaaatcagttcggcagatcatgttggctatctgtgttatttttatcgcttccgcattcgcgggctgcggtgtggacgctgatttgccggagaagcgtccggcattggaaaaaattgagtacacaaatctcaacgacagcgtatcgcagaagcttttggaagatatgctttccggcgccggggtgtcggaagaccgtattcagggcttcttcaaccgtgtagacagtttcaatgaaagcatgagggaagaatggctgacggctggctttgagcaggcaaaactgctggacacaaaatatgactcatatgagatgcaggatgagtgggtgaagatgaatgggagctttcccggatataactgcaggataaccgcaatggagctgtttggtgatttcgtgtccgcaggaaataaagcacccgtggatacgggcgaagatgtgctgttcatggacgaggaaacactgaagaccagcccggatgcgctgggtggaagcagtctgaccgattttcgcgccctgtattcctccatgagggcggaagacaccgcggatgttctacatcatgttcaggctgtgcaggaggaatggagatccaggggtatttcgttccgggagaatgaaagaatacgcctcattactgtgttcttccacgacaagtctaccgaggaggaatccatcctgtttgtcgggcatgttggggtgcttctgacggcggacgatgggacactttattttgtggaaaaggtggcctttcaggagccgtaccggctgctgcattttgctgatcgtacggaactgagcgattatctcatgggcaagtacgatgtctcatggggacagagcacggcacacccgtttattatggagaacgatgaacttatggatggctggcgtccaaacccggacggtgccgacgcggggcttcattcagaaaacatcctgcataccattggtagatggggctgcctcaaaatgcgaattgcaagaaaatag

SEQ ID NO: 327 - DNA, 13842 bp, unidentified
  source 1..13842: mol_type = unassigned DNA
  misc_difference 1367: note = a, c, g, or t
  misc_difference 1368: note = a, c, g, or t
  misc_difference 1369: note = a, c, g, or t
  misc_difference 1370: note = a, c, g, or t
  misc_difference 1371: note = a, c, g, or t
  misc_difference 1372: note = a, c, g, or t
  misc_difference 1373: note = a, c, g, or t
  misc_difference 1374: note = a, c, g, or t
  misc_difference 1375: note = a, c, g, or t
  misc_difference 1376: note = a, c, g, or t
atgtattcatttgatgaagtattaaactatgatccagaccttgcaaaggctatggatgatgaacttggaagacagagaagccacatcgagcttatcgcttcggagaaccttgtaagtaaggcagttatggctgctatgggaagccctcttactaataagtatgcagaaggatatcctggaaagagatattacggtggttgtgagtatgtcgatgttgttgagacacttgcaattgaaagagcaaagaagctttttggctgtgaatatgcaaatgtacagccacattcaggagcacaggctaacttagctgtattcttcgcacttgttaatcctggagatacagttatgggtatgagccttgactgtggtggacatttatcacacggttcaccagttaatatttctggaaaatactttaacatcgttccttatggtgttacagcagacggatttattgattatgatgaagtattaagaattgccaaggaatgcaagcctaagatgattattgcaggagcttctgcttatgcaagaacaatcgacttcaagaagttcagagaaatctgtgatgaagttggcgcattacttatggtagatatggcacatattgcaggtcttgtagccggtggtgcacacccaagcccaattccatatgcagatgttacaacaacaacaacacataagacactccgtggaccaagaggtggtatgattcttgcttcagcagaggcagcagagaagttcaagcttaacaaggctgtattccctggaatccagggcggacctcttatgcatgttattgctggtaaggcagtgtgcttaaaggaagcgcttgacccaagctttaaggtatatgctgaaaatgttgttaagaatgcatcagcacttgctaacggacttatgaacagaggttttgatatcgtatctggtggtacagataaccaccttatgcttgttaacctcttaagcaagggaaagactggtaaggaagttgagaagcttctggatgcagctaacattacatgtaacaagaatacaattcctaatgacccggcttctccattcgtaacaagtggtatcagacttggtacagcagccgttacaacaagaggcttcaatgaggctgatatggatgttgttgcagaagcaattgctatgcttgttgatgatgtagatgctaaccaggccaaggcaatggagcttgttaagggacttacagataagtacccactttatgaataaagattttttcttgaaaattccttaagaattaaggaaaaaatgcatatttttattattgcaattttaagcacttggtactatagttaatggcgaagtgcaaaggggcacgaaagtgaaaagctttnnnnnnnnnntgcccctttctttttgagaagtggtggcatattgaagtccatatatctgaatgaagattgtatgaaattatgaaaagtaaaatttggaagtgaaaatatcagtcataggtgatataatcaacgatagtttaaatgaaaaggaattagaaattatgagacatttttcgagaacagaattaaaggcagctattaatatgcttaaggagtttactgcgaagggcaattttgcagttcttatgtatatgggggatactgataagcttgaggtatcacagactcttaattcggatatgagctgctttttattatatggaagcatccagccactcgcatttttctttgcagaaaatattcctatgactgcgggtgagttagaagagattattaacaaacagtcagcagtgtatgaagaagagatggacaattacagaaatgcactaaaggaaagcggtgcagataatggactgtttattactaaatatgaaagtatgattcatacatttattgcatatgatcctgaccagagtggtgacagagactgttatgcaccatttattgagggtgcattcaatgttgaaccgggtaagggacagtttgttaatgaagttatgagacttgaagtgtatgatgatgaatatgaggatgactgtgtaatccagaagaagcattttgtatatcttccatcagtaaaatttatgggagcattcaatatgcgaatgatgatgagtatggttgatgcacagtataactaacattttacaattcttaaatttatataatatgtttgaatcccggacttctgtatagtatattagaagtaactttaaagagtggaggggttgtatgaacaaaggacattttaaagacagtcaggttgttaagggaattacgattggtgcagtgctaattgtaatatatcttgcccttaacaatgtgactggaattcttgattctatatcatatcttgcaggacttgtaatgccatttataattggcgcagtcatcgcatttgtattcaatgtacctatgaaagcaattgaaaaaggacttaacaggctgtttgacaagcgttgtaagaagaagcatcccagacttataagagtgcttgcttatatgcttacactgattttgatactggctattattgcaggtgtactttttgtggttgtgcctgaactggtaaacacaatagctgaccttataagacaggtgccgacagcggttaataatcttatcaactggctgcaggtcaagctgtctgcatatcctgagtatgaggaaaagttaagcagcatatcaatcaactgggattctgttctttcaaatgttatgaatttcctttcaataggaactaaaggaattatcaatggaggaattggtgcaataagcggatttttctcaggagtcactaatttctttattggatttgtcttttctgtgtatgtgctgtttcagaaagagaggcttacagcgcaatgcaagaagcttatgtatgtgtgcatgcctgagaacagggcagataaaattattgaagtgttaagacttaccaacactacattctctaatttcctgtcaggacagtgtcttgaagcatgtattcttggaacgatgtttgttattacattgtctatattgagaatgccttatgcacttcttataggaattattattgcggttactgcacttattccgattgttggtgcatttatcggatgtatagtcggtgtgattcttataatgatgacaagcccgttaaaggcacttatattcgtgggagtattccttatattacagcagattgaaggaaatcttatatatcctcatgttgtcggaagttcagttggactgccgggaatgtgggtgcttgttgctgttacaatcggtggcaatctgtttggtataatggggatgcttacatttattccaatcagctcagtgtgttatgcgctgcttcggacatatgtgaataggaaagtggaagagaaggagattgacagagagaagtttcaggggtaggttttgtgcggatgtgggagacaggctgctgtatatatcattttcaaacacgcttgcgatcgtgctacgacgcagtggtttgaaaatgatatatacagcagcctgcctccatttgcacggaagattgttcgggaattgtatcttgtgtcggggacacggaggtacggttgtttacaaatggtaaagtttgatgtatgctagaatagtaaatgtaaagaatctataattgctaatataaaatatgagggatagaaaatggaagcactagttatggggattttactggatatgatttttttgcaagatttctatacataaaaacccaattctataaaaccaaaggcgtcgcaaatggaaatgacagacgatacacttctgagtttatatatggatacagagggcataattatgtctgcagtgtaacaaataatatattttcaaggtatcatgtaaggggggatgtttataccatatttgtaaaaaaacataatccatataatggagttatggggagtgaactgactatatatatggttctgagtattgtggagtttatatttgttggtttatacataatgctattgttattgaatcggtttatgtatgtgtcttaaattagtgcataagagggaaaagcctactaatgttgctgaatgtgatgaaatagtagtttaccgaggaactttggggagtggtaagataaggtagatgatttatattatgttagatgtgattcattaagggggatgcaataatgcatggagaatatataattatttatattatgctggatatgatatttttggctagatatttatacataaaaactcaattctataaaactgaaggtatcgcatatggtaatagcaatcattacttttctgagttccttatccgtgacgataaagggtataattatgttggctgggtaagtatgaatatattttcaccgcttcatacaagaggggaggtttatacgatatatgttagtaaaataaatcccaagaatgcagtgatgggaaatgaaccgactatttatctggttctgagtattgtgttttttgtatttgttattttctacttgatagtattagcattgtattggcttatgtaagtgtcgtaattggaaaataatccagtcgcttgccatcacgcggaattggacgttagagcagtggaaagacaagttgaagtccaaaagaagagaatataattaagaataaataagcaacatccccggcatgattaataaccatgccggggatgctgttttttatattctttaattacttattgttcttcttctcattctcaagcttcttcatagctcttaccttaagtgaaagaccgaagaggttgatgaatccgtcagcatcatgatgatcatacatatcacctgtcttgaatgatgcaattgactcgttgtaaagtgaatatggagatgttgttccagccttgatgatgttacccttgtaaagtctgaacttaacttcacctgttacatattcctgagtcttctcaacgaatgcctgaagtgcttcacgaagaggtgtctcccactttccttcgtaaacaacctgtgcaaacttgtttccaacatccatcttgaatgttgttgtatctctgtcgagaactaattcctcaagctgctgatgagcttcgtaaagaattgttccaccaggagtctcatatacaccacgggacttcataccaacaacacggttctcaacgatatcaatgataccgataccatgcttggcaccaagtctgttaagctctctgataatatcagaaaccttcatagccttgccattaactgactttggaacacctttttcaaatgtcatagtaacatattctggttcatccggagcttcctcaggagtgcatccaagaactaataaatgcttgtagttaggctcattagctggatcttcaagctcaagaccttcatggctgatatgccagatgttacggtcacggctgtagctgcagtctgtgctgaatggaagatgaataccatgctgtctgcagtattcaatctcatcctcacgagactgaagcttccagttagaatctctccaaggagcgataatcttgatatctggagctaaagccttgattgtaagctcgaatctgatctggtcattacccttaccagtagcaccatggcagatagcaacagcaccttccttacgggcaatctcaacaagtctcttagcgataagaggtcttgccattgaagtaccaagtaaatatttattttcataaacagcgtgtgcctgaacacatggaacgatgtagttgtcgcagaactcatcagtgatatcttctatatataacttagcagcaccacatgagagagctctctgctcaagtccgtccaactcctcttcctgaccacagtctgcacatacgcagacaacatcatagttgtatgtttcctttaaccaagggatgatggcagttgtgtcaagtccgccagaataagcaagaataactttttctttcattatatattcctccgtatattattaagtttacatagtaaaacacatatgctatgcacctgcagattataataaactactttatttaaaaatgcaacaacaaattatgcatattatacattaatatacaacaaaaatgtataaatatgaattttctttaaaatatcctttacataagaaaaaaagttgctataatgtaggttatcaatttacattttgcgttattttatgcataaatgttgaatatatgcattttgcttcgcaaaacaaggaggagttatgattaaagtaggcattatcggtgcgacaggttacgcaggtaacgagcttgtcagattattattaggacataaggatgcagagattgtatggctcggttcgagaagttacatagatcagaattattcagatgtatatagaaacatgtttaagcttgtagatgcaaaatgtatggacgacaatatggagcagcttgctaacgaggttgatgttatatttacagcaacaccacagggcttatgtgcatcacttgttaatgacgaaattctttcaaagactaagattattgatctgagtgctgatttcagacttaaggatgttaatgtatatgaacagtggtataagcttgagcataaagcaccacagtatattgatgaagctgtttatggcttatgtgagattaacagagacaaggtaagcaaagacacaagaattattgctaatccgggctgttatacaacaacatcaattcttacactttacccaatggttaaggaaggaataatcaatccggatacaattataattgatgctaagagtggaacttcaggtgcaggacgtggagctaaggttgccaaccttttctgcgaagttaatgagagcatgaaggcttatggtgtcggaactcacagacatacacctgagattgaggaacagttaggttatgcatgtggaagagatgatttaaagcttatcttcacaccacatttggttccaatgaacagaggaattcttgtaacagcatacgccaaccttgccaaagatgttacatatgaagatgttaaggcagcatatgacaagtactatgataaggaatatttcgtaagagtacttcctaaagatgtatgccctgaaacacgctgggttgagggaagcaactttgttgatataggatttaagattgagccaagaactaacagacttataatgatgggtgcgttagataatcttgttaagggtgcagcaggtcaggcagtacagaatatgaaccttctcttcggacttccagagaatgagggattacagcttgcaccaatgtttccataataaatgtagcgtaaattcagaatttacacgacgaaatatgcacaatgacagagtatatgtgatggtacaataggaggatgttatgaatataattaaaggcggtgttacagcagctaaaggattcaaggctgccggatgtgaagcacagattaaatataagaacggaaagaaagatatggcacttgtatacagtgagaagccatgtgttacagcaggaacatttacaactaacaaagtatttgcagctcctgttaaatgggacagaaacattgtatataatgaagactttgcacaggctgtagttgtaaacagcggtgttgccaacgcatgtacaggcgttgaaggagataacgcatgtgcagaagaagcaaaggcagttgcaaaagttcttaatgtaccggagaatgcagtacttatcggttcaacaggtgttatcggaatgcagcttcctgttgacagaatatgtgcaggaattgaaaagcttgctccaatgcttgatgattcattagaagcaggaacacaggcagcagaggcaattatgactacagatacaagaagcaagcaggttgctgtagaagtagaagttgcaggtactaaggtaacaatcggtggtatgtgcaagggcgcaggaatgattcatcctaatatggcaacaatgctctgctacataacaacagactgtgatatcgacaaggcacttcttcagaagatgacaagtgcaattgttgatgattcatttaacatgatatcagttgatggagatacatcaactaatgatacagctcttgttcttgctaatggaatggctggcaataagaagattacagaagagggtgctgattataatgctttctatgaaggcttaagctatgtatttacagagctttccaagatgattgcaggtgacggcgagggctgtacatgtcttttcgaggttcaggtaaagggtgcaacaactaaggcagaagccaagacacttgctaagtcaattgttacatcaagtcttactaaggcagcaatattcggacatgacgctaactggggaagaattctctgtgcaatgggatattctggtgctgactttgaccctgaaaaggttgatatattctttaagagttcagcaggtgagcttcagattgttaaagatggaactgctacagactacagtgaggagaaagcaacagaaatactttcacagaatcctgtaattgctattgctgatgttaagcagggcgatgcaagcgctacagcatggggatgtgaccttacatttgattatgtcaagataaatgctgattacagaagctgatctgacacagcattttaaagcaaatatatctgaataaatatgaaatggagattattatgagcgcaaaagatatgacagaggaacttatgaaggcacaggtgcttgttgaggcacttccttatattcagaagtttaacagaaagataattgtagttaagtacggcggaagtgccatggtagatgaagaacttaagagaaaagttattcaggatgttgttcttcttaaactcgttggttttaagccaatcatcgttcatggcggtggcaaggaaatcagcaaatgggttgaaaagtcaggcatgacacctgaattcaagaatggattaagagttacagacgagccaacaatggagattgccgagatggttcttaacaaggttaataagagtcttgtgtcaatgattgagcagcttggagttaaggcatgtggtatcagtggtaaggatggcggcatgttaaaggttgagaagaagtattctaagggtgaggatataggatatgttggtgaagtgacagatgttgacacaacacttcttgattcattgcttaaggacgatttcctcccagtaatatgccctattggatatgatgatgattttcatgcatacaatattaatgcagatgacgcagcatgtgcaattgcaagagctgtcagtgctgaaaagcttgcattcttaacagatatcgaaggtgtatataaggattttgacgataaggattcacttatatctgagctttctacttcagaggcgagaacacttttagagagcggaacaatcggcggcggtatgcttcctaagcttaataactgtatagatgctattgagcatggtgtatcaagagtacatattcttgatggaagaattccacactgccttcttcttgaaatatttactaacaagggtgttggtacagctattctttcagatgatgcagaaaaattctttgattcagataaataattgcgaaccgtaagcgttgaggttataatattatattggcccatgtgaaaatgtgtgctcataagaataggaaagtgagagtaatcatgaatacacagcagattatagaaacagcagaagagaagctgattcatacatacaaccgttaccagatagtacttgataagggtgacggagtaagactttacgatacagatggtaaagaatatcttgattttggagcaggtatagcagtatttgcacttggttataacaataaggaatataacgatgcattaaaggcacagattgataagcttatacacacatctaattatttctataatgaaccggctgtagaggctgcaacagcacttacaaaggcttcaggaatggacagagtattctttactaacagtggtacagaggctattgaaggtgcagtcaagcttgcaaagaaatattattatgtcaagaacggaaaagctgatgcagagattattgcaatgcagcattcattccatggaagaagtatgggagcacttgcagtaactggtaataagcattatcaggaagcattcggacctatgataccgggaattaagtttgcacagtataacgaccttgacagtgtaaaggaacttgttaatgacaaaacttgtgctataatatttgagacagtacagggtgaaggaggaatttatcctgctactaaagaatttattgaaggtgtaagaaagttatgcgatgagaagggaatccttcttatacttgatgagattcagtgcggaatgggaagaacaggaagtatgtttgcattccagcagtatggcgttaagcctgatatccttacagttgccaaggctcttggctgtggagttcctgtaggtgcatttgcagcgacagaggaagttgcgaaggcattagttccaggagaccatggaacaacatacggtggtaatccacttgcatgtgcagcagcaaccaaggtgttcgaactttttgagaagcagcatgtattagataatgtcaaggaagtatctgcttactttgaagaaaagcttgatgagcttgttgagacaatagatgttgttgtcgagagacgaggaatgggacttatgcagggacttgagttatcagttaatcctaaggatgtaattgcgagagcacttgataacggacttattctgttctcagcaggaactaatgttataagatttgttccaccacttgtaattactaaggcagatgtagatgaatgcatagctaagcttaagaaatccttctagaatcaggagtttactttatgaaattaagaagatttatcagtatgatgctgattgttaccatgctgacagtctttgcaggctgtggtaataaagatgacaggacacaggctgcgaagaagcttaatcttagtggacctattacagttaatgtctggtataatgacagtgcatatgagtcttatcttgaattcgttgccagacaatttaagaaatctaatgaactggtgactgttaagccagtatatattgaggcggattcatatattaattatatatatgacgaatcggtaaggaataacaatgcatgtgatatatattttctgacatctgaagagatggagaaggcttatctttcaggtcttacctctgagaatgatatgtatcctgaagtctataatgagaatgtgtatggtaaggctgcaatgactgcatgttcgtatggtggtaagttatatggttacccggtgtcgttcaacacttcatttcttgtatataataagaaatatgcagaagcagttgatactatagaccagattcgtaatataagtgataattatcagattacagatgagaatcaggatgtttcaatggtgtttgaatgggatcctgattcaatgttccttaattatgcagcagcaggagcctatattaatataggcggagttaatgcagagaacagggctgaggtatctcttaatgaggaaaagattaagaaggttcttactaagtacgctcagttaaaagatgcatttggtattgacagaaatacagtaagtcttaaagactgtgcagatctgttttctactggaaatatgctctatactgtgcttgatgcagacagtcttgcagagattaatgttacagatgtagattatggaatatgcgagtatcctacaatgggagatgatattgattctaaggcaatgtctgttactacgatggcagtagttaatccgtacactaagaatgtagatgcatccaaggctgttgcaagagcaatttcttatgattatgcagattatcttggaaacatggctaagaaaagctgtgcaagggcggatttaaaggttaagagagcagaaagctaccagaagttacaccagatttattctgactctgttgtaaaagctaaatatatcggagtaggagaagtgtatatgagatatgagattatgcttcatcaggtatatgatggtggaaatgttgatacagcttacagtacatttgcaacaacaatagaaaaaacaactaaaaataataatgaaaacagtacgcagagtactaaataacattatgaataaatatcctgttattaactaataattattctatgcagattaatggggaggttagttaatggcaggatttttgattgcaataatatcaggtgcacttatgagtttacagggcgcatttaatacaaatgttacaaaagcaagcagtgtgtgggttacggcaatgtttgtgcagttgacagcactggcgacttgtgcgattatgtgggtaattgacggaagacctgatatcatgaagctgtttaaggttgataacaagattacacttcttggaggtgtgataggtgcatttataacatttacagttataaaaagtataagtggtcttggaattgctaaagcggaggttacgattgtagttgcgcagataattgtttcgtatctgctgggacttttcgggctgtttggaagtgagaagactacattttcatggattaagctcatgtcgcttcttattacggttgcaggagtatgtatgttttattttcttggtaatccgtcaacggattaatatattatgaataattatgataaatgtcagaaaaatctgacaggaaggaacagaatggaagatttattcagcgtatgcggaaagatacgattaagaaaaggtgaaggaagaaccttaaaggcaggcggtgcctgggtatatgataacgaaattgaatggatgtctgacggaataattgacggacatcttgttgaggtgcttgattttgatgattatttcatgggaatcggatttattaacagaaaatccaagattacagtaagaatgcttgcaagacacacagatgttgttgatgaagcatttattgaggagagagtaagggctgcagttgagtacagatttgacacagtagatacctctgcctgccgtcttatatttggggaggcagattttctgccggggcttgttatagataagtactcagatgtgcttgttgtggaatcgcttgctttaggtattgacagatttaagtcacttattgtcgaaaaagtgaaggaaatccttcatgaaaaaggcattgatatccgtggagtatatgaaagaagcgatgccaaagtccgtactcttgaagggatggagagagttaagggctttattggtgatgaatttgacactaatgttgagatagttgagaatggtgtccactacatgatagatgttgtgaatggacagaaaaccgggttctttcttgatcagaagtacaacagacttgcaatgcagaagctgtgcaaggacaagcgggtattagactgttttacccatatgggtacatttgcattaaatgcaggaattgcaggtgctaaggaagttactggacttgatatatcagaatatgctgttgaacaggcgagagccaatgccaagcttaacggacttgagaatacagtacattttaaatgtgcaaatgtattggatgagctgccaaagcttaacgaagcaggtgagaaatatgacgttgtaatacttgacccgccggcatttaccaaatcgagggaagctacaaagaacgcaatcaagggctacagggaaatcaatatgaagggacttaagcttgtcaaagacggcggctatcttgcaagctgttcatgctcacacttcatgacacaggagcttcttaccaagactattaaggaagccgctaaagctgtacataaaagactccgtcaggtcgagttcaggacacagtcacctgaccacccaatactgtgggaggcgcaggagagctattatctgaaattctacatcttccaggttgttgatgaaaaatga

SEQ ID NO: 328 - DNA, 7309 bp, unidentified
  source 1..7309: mol_type = unassigned DNA
ttatctgttttgaattgcaatttttctgtaggtatcgaacttaacccactttgcaaagaaatccgcatcgttgatgcttttaagatttgaatactcggaaagaaactgctgaattttttcgttgttgtcggcaagaacctcgaagcctctgccgtttacaacaggaacaccgccgtagctgtactccgatgtcggaacgatatcggtaatcttgcggtcacgaacctttacggcaacgctgtcacgaagaactataatatcaaagctgtcgggatacttatagctttcgccctcaacagggattgtgtcaccctttgtataggtttccttaacaggctgatatttgagaacattaaggcttgaagtgtcgtagaaaaactcttcaaagatatcacctcttccctcaagtgagccgagtacgaatgatgccttttttgcatcatcggctttttcttcaaccgaatcaacaacaccgcaggctgatgtcatatttgacacacggtcaatcaaaataagctcgccgagtgttttatgctttgagaaaaggtcaaccgcaatcggctctgcaagcagaattgtgcagactgcgattccgttctttgtgagtgaatcggcaggaatatgctcgcctgtgttcacatcaacagcgtacttgatttcggaaacgatacccgaaatagtctttgtgccgagctttacaagataatccttgccggctgtaagctgttcgtcatccatccagagaattgacgctgtaagctcctgataggacgcaagatttgtgtcctttgttattacacagccacgggatacatcaacttccttgtcaagtgtgattgtaacgggttgtcccttgaaagcggttttaacatccttatctgtcataaggatctgctttacatgagccttttcattgctcggaagtgttacgatttcatcgcctacgctgatactgcccgactcaatctgtccctgaaagcctctgaatgtgtggtcgggacggcaaactcgctgaacaggaagatagaatccttcttcctcctccgaggaatcaacatcaacagtttcgagatactgaagcagaggaacaccgttgtaccacggaatgttttcggactttacggtaacattgtcgccctctgttgcggaaagcggaatgatgtagatatcgtcaagtaaaagctcgtttttaagttcttcaatctgctttacgatttcgtcaaagcgtgacttgctgtactttaccaaatccatcttattaacggcaaagacaaaatgtcttatacccataagcttacagattcttgcgtgccgtcttgtctgaacaagaacgccctgtgatgcgtcaatgaggataactgcgaggtctgcaaaagatgcgcctacagccatgtttcttgtatattcctcgtgaccgggtgtgtcggcaacgataaaactgcggttgtcggttgtgaagtagcgataagcaacatcaattgtgatgccctgctcacgctcagccataagaccgtcaagcaaaagcgaatagtcaatgtcaccgctgcgactgccgaccttactgtcaagctcaagagccttttcctgatcggcataaataagctttgcgtcataaagtatgtgacctatgagtgttgatttaccgtcatcaacactgccgcaggtaataaatttaagtaaacctttcatcagaagtaaccctccctttttctgcgttccatactgccctgtgcctcgttgtcaattactctggaggtacgctccgaagaaacggagctgagggtttcgtcaataatttcatcaagagttgttgcaattgactctatgccgcctgtaagaggataacagccgagtgttctgaaacgaaccgatttcaattcgggtacttcgccctctttaagcggaaaacgatcgtcatcaaccataataatgttgccgtcacggtaaacaacaggtctttttgccgcaaagtaaagcggaacgatgtcaattttttccctttgaatgtactgccatatgtccttttctgtccagttggaaatcgggaacacacgaatgctttcgcccttattgatttttgtgttgtaaagcttccacatctctgggcgctggttcttaggatcccatgcctgcgctttatttctgaaagagaaaattctttccttggctcttgacttttcctcatctcgtctgccgccgccaaatgccgcagtaaaaccgtatttgttgagtgcctgtttgagagcctgtgttttcataatatctgtgtaagccgcaccgtgatcaaacgggttgatgccttttttaacaccttcttcattggtgtaaacgagcatttcaattccgagcttttttgctgtgtcatcacggaattttatcatatccttgaacttccatgttgtgtcaatgtggaggaacgggaacggcggtttttcgggataaaacgccttcattgcaaggtggagcataaccgagctgtccttgcctattgagtagagcataacaggcttttcgcactctgccgcaacttctctgattatgtatatagcttctgcttcaagctcatctaaatgtgaaagctgactcataccttatctccttttcacggaaatacttacaaagtgtttccttagtatttgtttgattctttttgatttatatcaatcttaatgacctcgccatgcggtttttcaattaaccacgagaggatatctccgttcttttcggtgtgaaccttactgcccataccgccgatatcggaaccgaggaaaaagttgattgcatatgcgggacattcttttatgcaggaggtgcagccccagcaatccttgggatatttgatgtacgctttgccgttttcgtcagtcttgataagacttccggggcagacattgcgacactttttgcaacctatgcacttggacttgtcaattactatgctcatacttttcacctcccgttacaaggtcacgaataataatttttatctcgccgttttcaagacgggaattaacatacttgttaaggttcctgtcgtccttttcgggatagtcaaggttttcggcaaagctgtgccagcgtgtttcctttctcgctctgaggtgagcaattacgcttttgcagaccgtaagcctttctttaagctcgcagatatacataagctcctgaaaatcttctgcatagaggtcatctgtgagcgtttcaagctgtctgattttgcagtcggcaatgtcaagctgtttttcgttgaaacggtagtttgtttttataccgcctgcgtagctgtccataactgtctgcattgcctcttcaagctgttccgtggtgtagagtgaatggcggtctgtgagatatttctcagtttccctgaggtgataatttgtatcttcatcgctgattttctcaaagctttctttgctgtcaatatacttaactgacgaaagccctgcaatttcaccctctgcaagagcgcccgtaacatacttctgcggacaacctcctgcaacatcaccgcctgcaaaaagtccttcaattgtggttgcacggtctgtgtcaacccagtaaccgcttgccgtgtgaccgcctacgatgtacggctctgttccctcaatttcaacattctgccgtgaaggatttcttccgctttcaatccacttgattgtctgcgaaggcgccatattgagataggcttttaaaagtgattcgtcctgctcggctgtgattccctctgttctgaggtagcagggacctctgccctcctgattttcatttaccgtaccgtaaactctttcggaagttgtaagtccgtactttgtttcataaacctcgccgagtgaattaatctgctttgcacctacaccctgtgcaagtgttcccgtgggagcgattgtgtccttgcatctgagtgcgataaaacgcatttcaaaggttgtcatctctgcaccggctctgattcccattgcgtagcctgcacctgtattaaagggcggataccacatcttgtgacgggaaaatccggggttgttcggcttgtaaagtcctgccgcaccgcctgtggcaattatgacagcctttgcttcgattgtgtagaaaattccgctttcaatgccgaatccgaatgcaccgttgattttgttgtcctttaccgagtaatcaaaaatattaacacggttgagaaccgttacattctttgccttttcgactgcgtccgcaagaatcggctttatgttttcaccgttgattttaaggtttcggttgcctcgtgtaacatactttccgttctcgtcctttaaaattacaagaccgagtttttcaagtctgtcggttacttcgttgagcttttcggacatggtaaggagcaaatcctctctgacaatcccgtcggcgtcctttttagcgtagtcaacatagtcctgcggttttctgccctcaacaatgtatgcgttaagagcgtttacacctgcggcaagacaaccgcttcttttgatgtgtgctttttcacagataagaacctttttgtccgaattttcggaaatggtcagagccgcataacagcctgccgttccgccgcctataatgaggacatcggtacttattttttctgttttcataggatttcactcccttgccgttattgtttctcgtcaagatatttttctgccgaaatcacacagtttgcaccgtccgacacggctgtaacaacctgacgaagtgcttttgttctgatgtcaccgcctgcaaaaataccgtctgcggaggtttttccgctttcatcggcaataatgtaaccgtctttgtcggttttgacaagatttgcaagaggttttgtatcgggaacacttccgactgcaacgaaaacaccgttgcaatcaagctgtttttcttctccgttttgtaaaagtgtgaccgaagtcacctttgtatctccgttaatttcagataccgttgcatttgtaagagcttcaatattttccgtggcaaacaccctgttctgcaaggctctgcctgctctgaaggaatctcttctgtgaacgagataaacctttttgcagaatcttgaaagcagaagtgcgtcacccaaagcagtgtcaccgccgcctgttaccacggtaattttatccttatagaaagccgcatcacacaccgcacaataagaaactccgttacccgaaaattccttttcgccttttacaccaagctttctgcgctgtgttcctgccgcatagattacggtttttgtttcaagactttcaccgccgtcaatgtttacggagaagttaccgttaactctttcaacctcggtaacctctccctcaacaaattcagcaccgagtttttcggcgtgagttctgaacttttctccgaggtcaaagcccgtttcaccgtaaagtccggggtaattatctactctctcgctctcggcaatctgtcccgtacccataaattctttttcaaccacaatcgctttaaggttttcacgctgtgcataaattgcggctgaaagtcctgcggggccgctgccgataatcacgatgtcgtacataatctccctcctttactctataacaagtttttccttttctgctgtatctcccgtaattttgaatgaattgagaacggggttttctctgttcataagcgaaagaatcatatagcttgccttgctgtcaaaggcaagtcttttgtcctcttcagacggtcttgacggcgattcgggatgtgaatgccagttgccgagaggaacaaatccgttctttctcatatccttgattgcctcaagctgttcctttggatcaagcgaaaaatgttcgtttgagtggtcgatatttgtaaggagataaacccttttaatcttcttgtcaccgtcctcaaccgttcctgcaataaggccgcaagcctcatcgggaagctcctttacagcgtgagcaagtattttttcaaagtcactttttgtaagttttatcataaatgaacaccgtcacattctgcctgttcgtagtcaataagctctgtgattgtcggatggtcaccgcagactgcgcaattgtgtgtgtcactcggaagttttaccttgcgaaattccattttgagtgcgtcatatgtaagaagatagcccgtgagcaactcaccctgaccgatgatgtacttgattgcttccattgcctgtaggctgccgattacaccgcccattgcaccgataacacctgcctgcttacaggttggaactgcgtcctttggcggagggttcttgaatacacaacggtaacaaggaccttcacccggcacataggtcataagctgacctttaaatctgataattccggcgtgtgagaaaggctttttagccattacacaggcatcgttgataaggaactttgccggaaagttatccgtaccgtcaatgatgaagtcatactcctttacaaggtcaagtatgttttcgcttgtaacaaatgtgtggtatgtctttacggtaacatcggggttgatagcctccattgtttcctttgccgactcaaccttaggcttgccgatatcctgtgttgagtggataatctgtctttgaagatttgagagatccacctcgtctgcatctgcaattccgattgtacctacacctgcggcggcaagatacattgcggcaggagcgccgagtccgcctgcaccgataatgagaacctttgcattaaggagctttttctgtccctttgcgccgacctctttaagaataatgtgtcttgaatatctttcaagctgttcgtttgaaaatgccattactgaccgcctcccataaagtaaaggaactctacaacatcgccgtcctttaaggttgttttttcaaatgtaccgctcttaacaaattcgtcattgattgtaacggttacatactcgggtgtttcaacattctcgtcaataatgagctgtgctaccgtaagattgtctgcaacttcctttttgtttcctgcaactgtgattgtcataacgattactccttaataagtttttctgtcacttcgattatttctgattttttgaccgcacctctgagtctttctttctcttcaccgtttttgaaaaaaacgagtgtgggtgccgcctgtacttcatattccgatgcaagctcggaatcaaaattaacatttatctttgcaattttcagcttgccctcatactctttttcaagctcaaagagtacgggtgaaagtcttttgcaagggatacagctgtcggaataaaaatccgcaagcacgagtgtatcggctgaaagaacttcgctctgaaaattgtctttgcttactctctgcggcat

SEQ ID NO: 329 - DNA, 18556 bp, unidentified
  source 1..18556: mol_type = unassigned DNA
  misc_difference 1220: note = a, c, g, or t
  misc_difference 1221: note = a, c, g, or t
  misc_difference 1222: note = a, c, g, or t
  misc_difference 1223: note = a, c, g, or t
  misc_difference 1224: note = a, c, g, or t
  misc_difference 1225: note = a, c, g, or t
  misc_difference 1226: note = a, c, g, or t
  misc_difference 1227: note = a, c, g, or t
  misc_difference 1228: note = a, c, g, or t
  misc_difference 1229: note = a, c, g, or t
ttattcggcatcgggaaggcttgcaagcttttcaaggtgagcatacttatcagcagcaaccttttcagccttttcaaagagtttttctgctctttcggggaatgaacgagtgagtgagttataacgaacttcgcccatgatgaagtcacgatatgatgcagaaggagctttaccgtcaagcatgaacggattctttccttcgtctgcaagacgaggatcgtaacggaagatgttccagtaacctgcctcaacagcctttttctcctcaagctgagcaatgcccatgccgcccttgataccgtggttgatacacggagcgtagcagattacgagtgacggaccgttgtagctttcagcctcaaccatagccttgagaacctgattgttgtcagcacccatagcgcactgtgcaacataaacatagccgtagctcattgcaatagcggcgaggtctttcttcttaacagccttacctgcggcggcaaactgtgcaaccgaacctacaggagtagcctttgaagcctgaccgcctgtgttagaataaacctcagtatcgaatacgaggatattaacattttcgcctgatgcgattacatggtcaagaccgccgaaaccgatatcgtaagcccaaccgtcaccgccgaagatccacattgacttcttagcaagttcgtccttgtcaacgagtgttttcttaacaagttcgccaacctttgcatcctctgtgttcttttcgagttcagcgataagagcgtctgttgcaggacggcttgaagttgaatctgttactgtgtcgagatagttctggcaagctgtcttgaggtcagcgctgtctgtatccttctgaataccctcaacatactcgataagtctgttgcggatagccttctgaccgagagccataccaagaccaaactctgcgttatcttcaaagagtgagttctgccaagcaggaccgtaacccttcttattctttgtataaggtgttgcaggagcagatgcaccccaaattgatgaacagcctgttgcgttagcgataaacattctgtcaccgaaaagctgtgtaacaagctttgcatacggtgtttcaccgcagcctgcgcaagcgcctgagaattcaagcaacggctgtttgaactgactgcccttaactgtagtgaacttgaacttctcgtgaacttcaggcttatcttcaagtgtgagagcgtagtcaaatactnnnnnnnnnngctgtgagtcgattgactgcattgtgagagccttagcgcccttcttacccggacaaacctgagcacaagcgccgcaacccgtacagtcgagtgttgaaactgtcattacaaagttgaggtccttaagtcccatcattgggaggctctttgtaccctcgggagcttttgcaagctcatcggctgtcatggcaacaggacggattacagcgtgaggacatacgattgcacatctgttacactgaatacagttttcaggattccattcgggaacatcaactgcgatacctctcttttcataagcggcagaaccgttcggagcagtaccgtcaacatgatccataaatgttgaaacagggagcttgttgcccttatatgcatttacaggcttgaggatttcgtttacatactcaacgagagcaccgttaccctctgccttgtcggcaactgaattatcaacagcattagcccaatcagcaggaatttcaacctttttgaggtcttccataccacggtcaatagcggcgtagttcatatctacgatagcctgacctttcttcatgtatgacttcttagcggcagccttcataagctccttagccttgtcggcaggaatgatatctgcaatcttgaagaatgctgactgaagaactgtgttgatacgaccgcccagaccgatttccttaccgatcttgataccgtcaattgtgtagaagttgatgtgtctttcagcgagaatcttcttcatcttacccgggagacgctcggaaagctcttctgtatcccatgggcagttaagaaggaatgaaccgccttctttaaggtcatcaacaatatcgtacttgtcaacataagacgggttgtggcaggcaacgaagtctgcctttgaaatgtagtatgttgacttaataggagttttaccgaaacgaaggtgagaaactgtaagaccgcccgacttctttgagtcatatgcaaaatagccctgagcatacatatcggtgttatcgccgataatcttgattgagttcttgttagcaccgacagtaccgtcagcaccaagaccccagaacttacagctgtgtgtacccttcggagttgtatcgggattttcaacaatcggaagtgagaggtttgtaacatcatcaacaatgccgattgtaaatcttctcttgggtgtttcgctttcagcgtttctgtaaacagcgatgatgtcgcctggtgttgtatcctttgagccaagaccgtatctgcctgtgtaaacctttacacctgcaaagtccgaaccgttgatagcggcgagaacatcaagataaaggggttcgccgattgaaccgggttcctttgttctgtcaagaacagagattgtcttaacagtcttaggaagctctctgagcatatagtcggcaacgaaaggtctgtaaaggtgaactttaagaagaccgaccttttcgcctgcggcattgaggtaatcgacaacttcttccgtacagtcgcagacagaacccatagcaacgataacatgctctgcatcctctgcaccgtagtagttgaacggcttgtagtcagtgccgattttagcattaaccttgtccatgtacttaacaacaacttcgggaactgcgtcataatacttgttacaagcttctcttgcctggaagaagatatcgtcgttctgagcagtacctcttgttacaggatgctcagggttaagagcacgacgacggaaagcctcaactgcatcccagttaagcatatcggcgaggtctgcgtaatcccactcctcaatcttctgaatttcgtgagaagttctgaaaccgtcaaagaaatgaagaaaaggaactctgccttcaatagctgcaaggtgagcaacagcggcaaggtccatacattcctgaggattgtttgaacaaagcattgcataacctgtctgacggcaagcgtagatatctgagtggtcaccaaaaatagaaagtgcgtggcttgtgagcgcacgggctgatacatgaataacgcccggaaggagctcgcctgccatcttgtacatattcggaatcataaggagcaggccctgtgatgctgtgtaagttgttgtcaaagcacctgctgcgagtgagccgtgaacagcacctgatgcgccgccctccgactgcatttccgttacctgaacctgtctgccgaaaaggttcttggcaccctgtgccgagaacttgtcggtaaggtcagccattacggaagaaggtgtgataggatagatagccgcaacatcggtaaacgcataagaaacatgagctactgcgctgttaccatccatagttttcatttttcttgccaatggaatcgtcctcctttttaatcaaagcggcaaaggaaatgatgccgcataaattttcgatacccgttaattacgcaccgtaaatcaacaagcggtacggatactttgtatcatcttaaattttatcacttaaacaccaatttgtaaagtgttttacacaagaaattcaaagcaggatatatatttttgtttcgttttttacaaaaaagttttttatatttacttgttcctgtcaaaatactttgttgttgattttttaaaaatcaataacaaaggttttggttatttgtacgaacggttgcaatgttacgctcgggcataatatgttttttacattacaaacttgcttcccgaccataattttcaattttccattttcaattttacatttaattaaacctttcgctcgggcatagtttgttttttgacattacaaactatctacacgaattgggaacggcggctcgccgtaattttcaatttataaatgctttatcgcttcgcttaaatccgtacacaaaaaatctatcatcggtttaatttcgtctgtcggctctgacaaatcgggaaccataaccgtggtcatacctgcggcatgtgcagattttatgccgttaatgctgtcctcaaacgcaacgcagtccaccggctcaagcccgagcttctttgcggctatcaaaaaaacctcgggatcgggtttgccgtttttaacatcatcaccgcacacgaatgcgtcaaatttatcatagagattgattttcttcataatcttcaaagccgtttgtgacgaggttgaagttgcaagcgaaattttacaaccgactgattttaaataatcaaaaatttcgtacaagcctttttttacaggcacaccgttcttttcgatacgcttaaaatagcggattctcgactccgccttgtaagcaggatagtcaaaatcatcgccgtaaaccgacttgtaatattcgtaggaatcctcactgcgaagtccgattgtctttttgaaaatgtcgagattaaactctttgccatcctcatcaagcatttcctgccagattgaataaacaagcctttcgctgtcaatcataagcccgtccatatcaaaaactgcgcccttaaacataaaaccgccccttttttcgcttttaagtctgtatataatagcatattttacaaaaaaagacaaatcggttgtaattgcgacaaagttatgatacaatcgtttaaatggtctgtgaaaaatataaatttgagggtaaggaaattttatggcaacatcaatttatgcaaaacctatcaaagcaaaaacgattctgaagttcactttgccaaccgttcttatgatggtttttatgtcactttacacggttgttgacggaatcgttgttgcgaactgtgtcggaagtgacgcattgtccgcaatcaatattgtatatccgttcacgctcgtatttatggctgtgggcttaatgttttcaacaggctcaaatgctataatcgcaaagaaaatgggagaaggcaaacaggaggaagcaaaccgacttatgtccggtgttgcaatcacggcaacggtcatttctgttatcattgctgtgctgttcacaatttttgccgaacctatgtacatgatgttcggctcaaacgaaaaaattctcccctactgcattgactacggcagcgttatgattccgtatggctttgtaatgtgctggcagatgctcaaccaatcgtaccttgtaacagcagacaagccacatatcatgcttgttttctcgatactgtcgggttgcacaaacattgtgcttgacattctttttatggctgtgtgggattttggaataatcggtgcaggactcggcacaatcatcggaatggctgtgggtgcaattccgcttttgctctttttcaacaaaaagcagactctgcactttggcaagcctgaattcaaggtaagtgaaatcctctttgctatggcaaacggctcgtcagaggctgtgacaaatctttcaacagccgtgacaacagcgctgttcaacattcagatgatgcactttgcaggcgcaaaaggcgttgcggctataagtgctattttgtacattcactttattttcactgcggtttcgtttggattcacttcgggagtttcacccgtcatcagctttaactacggcgcacaaaatcacgaaaaactgcaaaagctgttcaaattatgcataaaaatcacgctgataatttcggttgcaatgattacggcatctgaattttttgcagaaccgcttgtcggaattttctcggcaggcaacgaaaaaattcagcagattgcactcagcggattcagaatttttgcaataaattatctgttgtgcggaatgaatattttcgcatcgggacttttcaccgcactcaacaacggcaagatttcagccgtaatttcagttgcaagaacgcttgttttcgagtgtgccgcaatgctgattttgccgatgtttataggcataaacggtgtatggtcggcattgcccgttgcagaattgtgtgccgttgcaatttccgtaacatttataattgccaatgcaaaaaaataccatctggtcggtgtaccaccgcaccccgttcgtgcagacagtttataatattgaaagcatatcatgccagagtgtagcattgtaaccatttgtacaaataaacgcaaaaaatccgagcatcaaaacaatgctcggataattttttacaaccaacaattaaagttcaattaaaatcgaaatcagattgcacgaactctgattacgccgtcaactgctgcgatttttgcaaggtcatctgcaccggcgcctgcaacatcaataattgtgtaagcatagtcgccacggctctttgaaagcatattttcaacattgccgctgatctgtgtgagaaccttcttgagaagctcgggaacattcttgtgagcaacgcagaaacgggtatcgtcagcatttgttcttgcaagtgaaattgcaggatagtttacggagttgatgatgttaccgttctcgagatactccttaacctgatcacaagccataacagcacaattttcttcactttcgggagttgatgcaccgaggtgtgggaggcagataatattctcttcaccgaggatatcgtctgttccgaagtctgtaacatacttagcaaccttgccgctcttaacagcctcaagaactgctgttgaattaacaagaccgtcacggctgaagttgagaatacgaacaccgtctttcatcttggcaatcatattggcatcaaccatatctcttgtgtcatcagtaagcggaacatggattgtgagatagtcgcaatttaccataacatcttctgcgctcttcatgagcttaactgtaggagcaagcttgagagcgttgcctacagacataaacgggtcaaagccgattacattcataccgagagcaacagcggcatttgcaacaagaataccgattgctccaagaccgataacaccgagggtcttgcccttgatttcgggaccgacgaactgactcttgcccttttcaaccatcttaccgacagctgcaccgttgcccttgagagtctttgcccattcataaccctcaataaccttacggtttgaaataagaagtcctgcgataacaagctccttaacagcgtttgcgttagcacccggtgtattgaaaacaacaataccctgctcactgcacttatccttcggaatgttgtttgtgcctgcgcctgctcttgcaattgcaagaaggttgtcggcaaattccatatcgtgcattgcggcacttcttacaagaactgcgtcagggttctgaacatcgtcaccgtatttatagttatcaccgagacggcttgtgccgatagcggcgattttgtttaatgtaagaatgttatacatcaaaatcaatcctttttaattttttattttaagaatttacaataacaggcgaacagcgttcgcccgttatatcataatattcaataattacttgttttcagcctcgaacttcttcataaactcaacgagtttttcaacgccctcataaggcatagcgttgtaaattgaagctctcataccgccgactgtgcgatgacccttgatattaacaagaccgttttcagtagcctctttaacgaatttagcgtcaaggtcagcgtcacctgtaacgaacggaacattcataagcgaacgatcctcgggaacaacagtacccttgaaaagctctgaagaatcgaggaaaccgtagagaaggtcagccttctttttgttgatttcatacatcttatcaagaccgccaacctcgttcttaatccactcaagaacaagctttgcaatgtagattgtgtagcaaggcggtgtgttgaacattgaaccgttgtcagcgtgagttttccagttaagcattgtaggagtgatatccatagcgttgccgataagatcctcacgaacgataacaaccgtaagacctgccggagccatgttcttctgcgcgcctgcatagagaacgccgaactttgaaacatcaatcggtcttgaaagaatacaggaagaaatatctgcaacgagcggaacatcacctgtgtcgggaagctcgtgataaacagtaccgtaaattgtgttgttcatacagatgtagaaatagtcagcgtcctttgtgaatgttgaaggatcaagctttggaatgtatgtgaaggtcttgtcagccgatgaagcaacaacattagcctgaccgtaacgggcagcctctgcatgagcctttttagcccactgacctgtaataacataatcagccttaccgctctttgtcataaggttcatagggatagccgcaaactgtgttgacgcaccgccctgaaggaaaagaaccttgtagttgtcaggaatgttcataacctctctcaaaagagcctcggcaccctcgatgattgtaccgtaaatttttgagcggtgtgacatttccataacgctctgaccactgccttcgtagtcgagcatttctgccgcagcttttttaagcacagactcaggcagcattgaaggacctgccgaaaaattatatactcttgccatttctgatatctccctttttaaagaaaatttaaaaatatagttgtaaaaataaatacattttaattatacgcttttagcacgctaaagtcaataaattcatagcactaaagcataaaaaacgaaaaatttcgtgattctgttgtgcaaatgaatcagccaagcttaattttgccgatacaaccaacgatttcatctctcatacgctcagcctctttacgagcggcaacggcaaagtcatcttctgtaagcccctgctttttccatgcacacataatgccgcggcttgagttgatgattgcaccaagaccgttttcgtcaaatgcgtttttaacatcatcggcaccgccgccctgagcaccgtaaccgggaacaaggaagaatgtgtgcggaagttttgctctcatttcaccgagctgttcgggatatgttgcacccacaactgcgcctactgccgaatagccatgcttacccataaggtcttcgccccagccttcgcacatcttgcccatatgctcataaacgctctcatttgtttcaagcttcatatcctgaagttcgcccgagcttgggtttgaagtttttacaagaacaaaaatgcccttgtcgtccgaatcgcaaatttttgcaagcggcttgataccgtctgttccgaggtagccgtttaccgtgagtgcgtctgcaccgaatgcgtcaatactttcgcctgcaacatctgtatgaccgaggtgtgccgtagcatatgcctccatagttgtgccgatatcgttacgcttgccgtctgtgataacgaacataccctttgactttgcataagcgattgtgtcgcaaagagccttaacaccctgccagccatacatttcataatatgcagcctgtggctttacggcaggaacaatatcataaagtgcgtcaataagcgccttgttgaattcaaaaagtgcagcagccgcaccctcaagcgtcttgccatacttttcaaagcattttgttttgattgattcgggaacatagtcaagcttaggatcaagacctgcaaccgtaggattctgcatttttacaatattttcgataagtctgtcaaatgccatagtgattctcctcattttttgttattctttctatggtcgggcaaacaattcatatcccgactgcaatatcttttttacaatgctgttgttcgcccctacgaattattattttttagctgttgataatatcataaagttcatttgagaacttgtaataatcctgtctgtcctcttttacgaactgaattgcaggacggggatgtgtgttgtactgacctgtgagaaggtacggaatatcgtaaccccacttaacgccctcagccttaaacttgtgggtgtactcctcaatgattttgagaataggagcaacctgatacttcgggttcttgaggaaaccgagaagaagttcaagcgcacagttgcctgcgcctctgcccatgccgtcaacggttgcgtcaaggtagctgacaccctgagtcatagcctcaattgtgttggcaaaagcaagctgctggttgttgtgagcgtgaataccgactgacttgccgtacttgtcggcaattgagcagtaaaggtctgcaagtcgtcttgactcctcgggatagagtgcgccgtagctgtcaacaatgtagaaagcgtttacgggagttttgccgagagtttcaagagccgctgtaatatcctcggttcttgcctttgaaacagccataatattgattgttgtttcgtagcccttctttgcagcgtcctcaatcatttcaacagccgcaggaattgcgttgatgtatgttgcaactctgatgaggtcaatcgggctgtccttctttgcgataatatccttcttaaaatctgttctgccgacatcagccataacagcgattttaagagaagtcttgttgtcgcctacaatttttctgatatctgcatcgttacagaatttccacttaccgaaatcttcttcgttaaagatttcctttgatgccttgtagccgaattccatataatcaacaccggctttaacatttgcattgtaaagagccttgataaatttgtcgtcaaatctgaaatcgttacaaagaccgccgtcacggattgttgcgtctactactctgatgtcctgtcttaccgacaggaggtcgcctttctgtgccataattttactcctttatgttaaagtttatattaaattaaatttatttggtgagcgaacacggcgagccgccgtccccaattcgtgcagacagtttgacaaataaaaaacatttatgcccgagcgtagtacagctaccgtttgcacaattttaatcgtatcaacatctacaattaaaacaaactcaatcttcaaaaactaccttaccgccgaggattgtctttttgactttaccagtgagggttctgcccttgaacggggtgtttttgcttttgccgtgaagtttaccagcatcaactgtccattcttcatcgggatttataagaacaacatcggcatttgcaccgactgaaagtgtgcctgcgttgattttcaaaatccttgcaggattaacactcatcttctcaacaagctgtgaaagcgtcattctgcctgtcttaaccaggtatgtgttgcagaccgcaaacgaggtttccatgccgattgaaccgttgggggcttttataaaatcagccttttcctcgggtgtgtgcggtgcgtggtcggttgctatggcatcaagcgtaccgtcacaaagcccgttgataatctcgttaacatcagcctgagtcctgagaggcggattcattctgtaatcagcgtcacctcttaaaagctccctgtccgtgagcgaaacataatgcggagcggtttcggcggtcaccttaacacctctccttttggcatcacggataagtgcaacgcttgttttggtgctgacatggcagatatgaataggctcattaagagcggcggcaagtgcaatttctcttgcagttccgcagtcctcggcaccggcagggattcccttgacaccgagcttttccgaaacctcgccctcattaattttaccgccgtcggcaagaaacaagtcctcgcaatgtgcgacaattgtcatgccgagctttggagcttttttcattgcgtcactcaaatactttgtgttttcaacaggtctgccgtcatcggtaagtgctattgcacctgcacttttcacagcgtcaatgtctgtgggttcttcgcttttaagccccttggtaacgcttgccgcaacataaacacggctgtcggcgtctttagccttgtcaagaatatactttacaatttcggggctgtcggttgtgggattggtgttaggcattgcaagcaggcttgtaacaccgcctgcggcagccgccttgcatcccgtgataatatcctctttgtgagtctgaccgggatcacgaagatgcacatgcatatcaacaaaccccggaacggcacaaagaccgtctgcatcaataatctccccgtctgatgtaatgccgctgctgatttcggcaatcacgccgttctttatgagaatatctgttttttcgttaagcttgtcggcaggggaaacaaccactgcgtttttaattagcatttccatgtttttcctccgttaagaaaagaaattatcttctcttgtttctgtttgcagggcggtgattctgctgggggcgtcggtcggttctgctgtgaacctgaacaagtccgtcactttcgcctctttcggcacgcattcttgcacgctctgccttttgtctttctctctctcttctctcttcctctgcctttttgcgtttggcaatcgcacgcttatgctttatcattattgaaacattcttgcagaaatatccgcagtgaatgccaaaattcttaactccgcctgcaaagctcctgagagcgttaccgatgtttttgcctacattggcaagaacctcttccgttgaccgtttatcattcggttcaccctcggtttctttattattctctttttcaagagcgttctgctttacggtttctgcttttctttcaacctcgccgataacatcaacgtcctcggcatctctgaggtctgagcttttgataacccccattgactttttgggagcttcgtcaaaaaagtcataaccgctgtcaaacttgtttttcttagcctttgcccttacaagctcctcgtcatcaacctcttccccggtttcctcttcgggatcgtcgctgccgaaaatgatgtttgcgtactcgtcaacctttttttcaagcggatgcttttgttcggaaacctcctcggtttcttcaacatcggcatcgtcctcacggtcgatatcgtcaggctcgcttgtttcaaaaagatcgtgttcgggttcggggataacgagtgtaggacccgacgaagagcttatgtcctcgtatttttcaggtgtttctgcgttatctttttcgttttcgtcaattttttcgggttcagtctctgaggtatctgctgcggtaggctccttttttttttcgtcctccgtgctgttttcctcgtaaccgtagttgtttttatatgcctcacgctcaagctcactcttgtaagccttcgcggagttgattatctcgtcaatttctttttccttggcatcatccgtgtcataaccaaagtttgaatactcacttgtaatttcttccggttcttccatgttttcgattatcggctcgggagcatatcttctgcccggcgaagccggttcttcttcaacctcttccgcatatctctgctttttctttgagtgtttatcgggcttttcgggagaatcgtcaaaattgtcaatgtcgtagtctgtacccttttcaccgagtttatacttgactgcaagctcctcaagaatagcgttattcttcttagcctttttatgctttctgattctcacggcaaaaattatgatgagaacaatcaaaataaggataacaacaccgccgccgatgattatgtacggaataaatccctttgaaaacggcaagtcgctgaattttaccgaagatacaactttggaaaaagtatcgtagtcaacggttgtaacatcaccctctgttctctgcattgtgatattaatgttcataccgtcataaaccgtgttggcaacaaaggttttcacatcgcccttactgctctgagcagttgcgtcaaacacaagccacacaactttttctttttggtcgggagtacagctccgatactcgtcggaattaagaaaattgttgcgtatatttgcaagctcgcttgaagaaagctgagcatagttgccaacattctcgctgctctcattttttgtcattgtcacggtcagaataaccgatgacatattatccataccctgaagatagatatttccgttctgaaaggttttcattgttgtgtcatagtcaagaccgaaaacagaaaaatatttatctgtgcttttactgtcccttgtaacagcgctcataccgtcaggcattgaaagcgtcatatcgtcaatctgcggaatctcgtaatcttttgttgcgcctgaacaggcaaaaataccgcaaaataccgttacggcacaaattgcaagcgttacagctcttttaaaaacagttttcatcatgtccgtatattcccccgaaactaaattagattcatcaatactgctttttagaatgtatatctaattaattatacataatctgtcaaaaaaatacaaggtttttaccgtttaaatttgaaaacaagagtaccctattcgtgaatgcagtatgatattaaagaacatattacgcctgagcgtgcataaaattgaaaatggaaaatggaaaatggaaaatggaaaattatggtcgagaagacaattcgcaagaatgcaaaacattctcgcccgactgtttttgtatattttcggtatatacggaagttgttgcaaaactgtatgtacggatattatccgcctgcagataaccacgcaaagatttgtacaaattaaaattatataaataaacattcactttcatataaaacaaaaattgcatcaatgccgtatcgggcatcaatgcaatttctttatctgactatcttctcgaattgactgcggtggcacaccgccaaccgaaattttcaattttcaattttcaattttcaattaaaaacaagaccgccgtttattctacagtaaccgacttagcaaggttctttggcttatcgggatcaatacctctgttgattgatgtgtaataagcaagaatctggagtggaacaaccgctgtaatcggcataagaagctcgtctgtatgcggaatttcgataacataatccgcaacaccgtccttgagttctcttacacaggcgtctgtacaaacaagaataacctttgcacctcttgacttaacctcaacaacattgctgattgtcttggggataatacctgtctgagttgcaacggcgataaccggaacatcctcgtcaataagcgaaattgtgccgtgcttcaactcgcctgcggcgtagctttctgagtgaatgtacgaaacctctttgagcttgagtgaaccctccattgaaagggcatagtcaagacctctgcctatgtaaagcaagctgtcggttgcaacaagctttgtggcaacgaacttgcagatatcctcgcagttgtcgattacatactgaactgcctcaggcatttttgtgagagccgaaacaagtcgcttgcactcggctgtgctgattgtttcctttgcaagagcaagctcaaaggcaaagagatacataacggaaagctgtgtgatgtatgcctttgttgacggaacggaaatttcgggacctgcgagtgtgtagatgagcatatccgcctcacgggcaattgaactgccctttgcgtttacgattgcaagggttttggcacccttctgctttgcaagacgcattgcggcaaggctgtcggctgtttcgcccgactgtgaaatgatgattacaaggtcgccctcgcctacaatcggatttctgtaacggaactcggacgcaatgtcaacatttacgggaactcttgcgatatcctcaataacatacttgccgaccatacctgcgtgcatggcagtaccgcaggcaacgattgtgatatttttgaaattcttgattgtttccgttgtgatgccgcattcctcaaggaacggaagtccctctttgattctcggcataatcgttgttctgatagcctcgggctgttcgttgatttccttaatcataaagtgcggataaccgcccttttcggcagcctccatatcccagtcggctgtctgaagttccttttcaatcggatcaaggtgttcgtcaacgaacgaaacaccgtcaggtgaaagtgttacgatttcatcatggtcaagaagataataatcccttgtgtactgaagaattgcaggaacatcggacgcaataaagcactcaccctctgcaacgcctacgataagaggactttcacggcgaaccgcaaaaactctgtcggggaaatccttgaacataattccgagtgcaaacgagccctcaagctcagccattacactgtcaattgtttcaagaggatttccgttgtatttatagtcgaggagctgagcaacaacctctgtatctgtgtcgcttaaaaaagttcttccctttgagatgaggaagtctttaagctccatatagttttcaataataccgttgtgaacgattgtaacccttgtaccgctgtgtggatgtgagtttacatccgaaggctcgccgtgggttgcccaacgggtgtgacctatgccgacatgacctttcggagtgccgacctctgcaagcttatcctttaagtcctgaagcttgcccttggtctttacggtcttgatttctccgttatcaaaaaccgcaatacctgccgagtcatagcctctgtattcaagctttgtgagagcattaacaagcacctcactgcaatccttaggccctacataacctacaataccgcacataaaatttctccttttcggttaatcattgaccttgtggcaaaaagtaggtacaagttctgccaaaagttcaactgtcttttcactgtcattgttttctgcggtctttttgagaacctcaagctttgacagcatatctgtttcgtctattttaatttgatttcctatgaaaattttcttgttctgtgttgacttaagaccttcttcgtccataagaagctcctcaaaaagcttttcacccggacgaagtcccgtaaagataatcggaacatctttgtacggaaccttaccgtacattctgataaggttctcggcaagggttgtaatcttgacaggagcacccatatcaagaacaaaaatctcaccgccctttgccattgcacctgcctcaagaacaagcgaaacagcctcgggaatagtcatgaaatatctgataatatcgggatgtgttacggtaacgggcgcaccgttttcaatctgacggcgaaacagcggaataaccgagccgtttgagccgagaacattaccgaatcttgttgttacaaattcggtatcggtgctgtgctgcgccttgtactgaataatcatctcgcacgcacgctttgttgcgcccataacatttgtcggattaacagccttgtcggttgaaatcataacaaacttctttgccttgtacttttctgcaagggttgcaacattgaatgtgccaaagatgttgttctttacagcctcctcgggaacggtttccataagcggaacatgcttgtgagcggcagcgtggaatacgagttcggggcgatatgtcttgaagataagctccattttgtcgtaatcacgaaccgatgaaataagcgttacaaggttaagctttgtgccgtattcaagcacaagctcctgctgaatgtcatatgcgttgttttcgtagatatcaacaatgatgatttgttttggatcattctttgcaatctgtcttacaagctcactgccgattgaaccgccgccgcctgtaacaagacaaacctttccgttgataaggtcatgaatctcctttcggtcaaactcaatgggttttctgccgagaagatcctcaatcttgatttcctttgcctgtgaaataagctgtgtatgcccgtcatcaaacaaaagctcaccgagataagggataatcttgattttgcactctgttgcggaacagtagtcaagaatcttcctcttctcatcttcctcacatgacggaactgcaacaataatattgtctatacggtattcatcacatattttaacaatttcgggacaggttccgacaacggggattccttcgattttctgattcagctttttcaaatcatcatcgacaaagcataccggaatgatgctttttgaaggattattaacatcaccctgctctttcgcattgtgaatttcacgaacaatcattctgccggcattgcctgcgcccacaataagggtgcgctctccgccctctgcccttcctgcctcggtaaggtcaagaaaagtccttctgaaaacaaaacggaatgcaagaattccgacaagggctattgcgaaatgtactatacaaaaaatctttctctgcggaatctgcaaaaacaacgagattacaaagccgagcgtaaacccagaaaagacggcagttccgcacaccatatagtcctttgcgttaaagtatcgccacaattttgaatatgttccgcttatataaagcgtaaacagacacatgacaagatcaataacaatatagctcaacaagcctttgcttgaagcagcacctatgtagccgacaagcaagagaatataatttgcaagaataccgctgacaacgataataaacacatctgcgagagccagaaacatcttacgcaaattaatcttcttcat

SEQ ID NO: 330 - DNA, 16289 bp, unidentified
  source 1..16289: mol_type = unassigned DNA
atggatataattctactaacagaaaacaagaaacaatacatagacctattgctacttgctgacgagcaggaatctatgatcgaccgttacttagagcgtggagacatgtttgtgcttaatgacaatggtgtaaaggctatttgtgtcgtcgcagatgaaacgaacggaatttgcgaactcaagaatattgcagtgacttccgaatcacaacgacagggatacgataagaggctgataaattatttagttaagcactatgctggaaagtacacccagatgatagttggcacgggtgatgtgccaagttctgttagcttctataaaagttgtggatttgaatattcacatcgaatagaaaacttcttcactgacaactacgatcatcagatgtttgaagatggggtgttgctgaaagatatggtatattttaaacggaatattccagagagcatcattataaaaacctattacagtcgtgttcctgcctgcggtgtattttgtggtggttgtcccacttatacgcgagacaagaaaccctgtttaggcgctgagcaaaacaaagaaaggtgtgagagatgtaaaacatttcatctttgttgtaccgaaaaaggaatcactcattgttatcaatgtaaagcctttccatgtgcaaaatttaaaagtttcgcaaaacgatggctgaaatatggacaagactttgttgccaatcaaaaactattaaaacaagccggtgaaatggaatttttaaaacagtataatcaacgaacagtataaagattaaaagaacaaaatgaaaaataggaacatactcctcataggattcttgttttgcactttacggctatttgcgcaaactgaatatacagtaaatttatatgatgcacaaagagagcgcattgttccaattgctatatatgaaccaaaacacgtaaacaaacatactccggtcattatattcaatcatggatatggacaaaatgctcctgattcgtatatatcatactcatgcttaacaaagccattagctatgaaaggttattacgtgataagtattcagcatgaattgccaaatgacctgccgttagcgatgagtggcaactttatgaaaacacgaatgcccaactgggaaagaggtgttgagaatatattgtttaccatcaaagagtttaagaaattcaagcccaaactgagttggaataacattactattatgggacattccaacggtggagatatggcaatgttatttgcagccaaacatccaacgatggctcaaaagattatatctttagatcacagaagaatggtaatgccacgatgcagttctcctaaagtttatacgttgagaggttcagactacggagcagacgaaaatgtaattccgacagtagaagaacaacaaaagtatcatatctcagttattcaattagatgatattaaacatggggatatggataacaaaggaaaaagagaacaacacgatacaatactttactatctatataaatttctaaaatgaaaacagattataaagtcggcgagttgatatacgacgcaaatatttacgatagattgaatacctttctctcagatttgcaattctataaaaagtggcttcctaccaacaaagaggctcgaatacttgaactctgctgtggtacgggtaggctcactattccaattgcacaggagggatataatatttgtggcgtagattacactccgtcaatgcttgagcaagcaaagtggaaagctaccgaagcaggattagagattaatttcattgaagcggatattagaacactggacttgcaagagaaattcgactttatctttattccgtttaactcaatccaccatttatatcgaaacgaagatctgtttaaggcgttagcatgtgttaggaaccatctcaaagaaggagggctatttctgttggattgctttaatcccaacattcagtatattgtcgagaacgaaaaaggccaagccatgattgccgaatacacaacggacgatggccgagaagttttaataaaacaaaccatgcgttacgagtgtgcaacccaaatcaaccgaattgagtggtactattttataaacgaagagtttcattcaacccaaaatttggatatgcgattgtttttccctcaagaattggattcatatctggagcaagctgggtttggtattgttcacaagtttggaggttttgaagaagaaccgtttgatgataaatcggaaaaacagatatacgttttgtcattaaactatttgagagataatgacaagtgatgcaatagcagaggaatacaattcagattttgaataagtaaaatagagtaaactttttaactgaattcactttgcggttctttcattactgggtagtgtaaaataaactgtgtcacgcattatttatctctagaaaactcatcggtcggggaacggcccgcgccaaggggcgggaccacccgtcccgacgagcgtaaaattacaataatttaaaccggtttccaaactttatagccagttgttgcgagatggtagcccaattggccagtggcatggtccatttcttacgtatattgcggtatgcaagataaacaagtttctcaagggctgtatccgatgggaacacgcccttgttttttgttaccttgcggatctgacggtgatacccctcaacggtatttgtggtatagataagcttacggatgaccggagtatactggaagtattcggacagcttatcccagttgtcctgccaggatctgataacgacaggatactgttcaccccatttttcatccagcttgaggagctcattttctgcggattccttattgactgcctgatagacacatttcaaatcccttaagaactccttctgattcttggatcctacatacttgatggagttacgtatctgatgtactacacaaagctgtacggctgtattaggataaacgctttgaatggcttcaggaaaccccttcagaccgtctatacaggcaatgagaatatcctcaactccacggttctgaaggtctgtcaacacgctgagccagaagtttgctccctcattccttgatatatacattccaagtaactccttgtgtccctccctgtcaatgctcagtacattatagattgcacgggttaccgcgcagccacgttcatccgttactttgtaatgaatggcatccatccagactataggataaacagaatcaagcatccgtgatttccatgcttttatctccggaagtacacggtctgtgatggaactgattgtgtcggccgaaacacgattcccaagattttcttccatccagtcactgatttcccttgtgctgtttcccattgcatacaagccaattatacggtcagcaacaccttctgccagaatagtctcacgcttcttgataaactggggatcaaaactcgaattacggtcacggggagtggaaacggttacttcgcccaagggagtctgaacctgcttttgcatctttccgttacgacggttacccatctggcgttcttcttctgtcaaatgtgtatccatctctccttccagggctgcattcaatatactttccaatagtggggcaaaggcgccgtccttacccaacaaaggcttgccggctttcagctgttcaatggccttgttcttgatactctcgaaatcaaattcttctttcataaaaaaactgtgttagcaaagttaatactttattccttgctgacacagtttaatttacatcctccattactgtacaaaagcactacaaataatcaaatatgaagtatgcttgtacaaaagttctgcactttctttgaaccatgtaccccatttttcatatctttgtcgctgcaaaccatttgtaaccccaatgcggtaacacccaccaaatcaatcttctaaaattgattggagactcccgcaaacaggctgaaaaaatgcggtacaacacgtatatcgaaagacctgaaaatcaacacattgaatttcccgatactttcaatgtaattgtaaaaacaaggtttgtaccatttaaaagagcaaaacgctaacactcaatagtgtaaatatgctgcgtcggcaagtaaagctaatcatatatacccagttatccccaaaacgaaaacgatgagagattttcctttatagatagcttaggatgttcagttctcctatctcccatttcaaaacaaaggctgtccattatctaatatgtgacagcctttctatgaaagttttcttcagataaatatcatacttttttcataaactccttcggtgtttttccaaaatactccttatacctgcctctgaagtttttcagatttcgcatacccaccatttcagcaaccatagtcacagaaaattttccgctttccaaaagttcccgtgccttctccatcctgattctcgaaatcaaatatttgggtgcttctcccgtcaacaacttccacttattataaaaggttgtccggctcatgcacatcctggaggcaatatcatctactgtcaaatcctctttatccatattctccataatgtaaagcttcacttcattcaaaaatgccagattggcatcctgctgagcccgctccataggtttcgttaaaaaatcttctccaaaaactttctgaagaaatgtcttccgaagaaaacggctattatttatcaatatggatatttccactttaaggtcctccagattaaagggcttacatacaaagagatcagcctgagaagaacaacgcttttcccgccgtttcacatcaatgtgcgcccccatcaatatcaccggaataaaggaggtgtccctcgacgtcttcagtttagaagaaagttcctcaccgctcatacctttcaacatgatatcacaaatcaccaaatccggatactcttcacatattacctccaatgcttcctgaccgtcatcaaagctcctcactacaaaacattccgataaacgtttctcaagataatccttgaatcccttgtcattatccgcaagtatcactaaaggtctatccatattttttttcttcgagaaaccatggaaagctatttccgactcattcacctgaaaagtgtccggaatatttaaggatgtatacccccccgaaaccgcacacgaacatcttatgggaaatcgaagcagagcctccttttccaaagtcagtattttcccgtcacatatattcatcaacttgtcaaaaaacacaccgcccatgccatactgcttgccatgcagaggtcgcagaataggaagccgcgacgagtaccatctgcaacatttcagaaatcgcttgttgcctgtatccttaatcctgattgcccagtaatctcccttcaacgaaacctgcatcgagagatgcgtttccggcagagaacactcgatggcactcaatacaaaccggtcgataaccggagatatctttcccggatcaaaccaagcgcttgcatagtcaaaatccggaaccaaatccagcttcatctgtaacccggccacatgagactgtaaaaaagacactttcttcctcataaatgcgccgatttcatgttctgcaactaccaggctaccagaattgccaaatagtcgtttcaactccatcaacgctatcaagtgctgctccagcccgcctatatgatgaagtgcaacagccagttccttctttatgtcttccggacagtctccttcgtaaactgcccctaacggtgtcttaatcaaagaaatgggattacgtatgttttgaaaggtatcaatgaaatactgatttccctctttcagtaaatctctttcttcactgatacagagtaaatggaacaaaagccaacataatatacagattccactagccactattggcagaacagaccagggaaccttatgatatacgccgatggatagcaggaaaacgcataatgacactactattattattatcgataaatgtttcatactattataagtttaagtaataatgattcatactaatatatacccgagttttcagtcaatagcaggataatcccaagtatgtcatcaggaggcggtctaatgggggaacggtaggttccttgagtcatcgaattcaccttaccaaccctcgtttgctagcagagcctgcatttcgtccacctgtatttcatacccagcaactctctaaaccattcatttcccatgcccaacgtatctttaaatatcaatacaacattccgcttatccaagatagctccaatcaattattctcaaacaaaataatagtataacaaacggaaaggctaaaaagatgataccacttcacacatattcttatcatactcacatatcttgcgcatgaaacagaaagacattatctttgcagcatgaaacaagaactgaaagaaaacggaggattaccggcacatatactctggacacttgctatcgtagctggcgtgtccgtagccaacttgtattacaatcaacccctgcttaatatcatgcggcatgaattggaagtttctgaattcaaaacgaacctcattgccatgattacacaaatcggatatgcgctgggattattgttcatcgtcccattaggagacctctatcgacgcaagaatatcatcctaacgaatttcttcctactcatattttcccttctagccattgccatggcaccgaacatctacatcatctgggcagcatcactcattaccggcatctgctccatgataccccaaatatttgtaccgattgcctcgcaattctcacgccccgaaaacaagggacggaatgtaggtgtcgtcatctcaggattactgactggaatacttgcatcacgtgttgtcagcggatttgtgggtgaagtgcttggctggcgtgaaatgtacttcatcgccgctggaatgatgttactatgcgctatcgttgtattaaaggtactaccggacatacaaccgactttccaaggcaaatattccgggctgatgaagtctcttttctcattagtaagagaatacccctctctacgaatctactcgatacgtgcaggactggcctttggctcattccttgccatgtggtcctgccttgcattcaaaatgggagaagccccgttccatgcatccagcgatgtcatcggcatactagggctctgcggcattgccggagccttaaccgcatcttttgtaggaaaatatgtaaaaaaggtaggcatacgcaatttcaactttatcggttgcggaatgattctgcttgcatgggcctcgctctttttctgcggaaacaactatgcaggtatcattaccggtgtcattcttatagacataggcatgcaatgtatccaactcagcaaccagaccagtattttcgacatctacccgtctgcctccaatcgggtaaatacgattttcatgaccacttacttcatcggcggctctttgggtaccttccttgcaggaagcagttggcagacttggggatggagtggcgtggtcggcaccggcgttattttaacaataatatcgttgtccatcaccctttacagcaagaaataacaaggatactatcatttttccaagcaaacgcaaagatttgataatttttatttgtcatgcaaaggataaggaagatattgaacagaattgttatacctttgtcgcatcaaactataaacgacagattgataatagattcgtcaaccaagcatagtcaaaaacaaccctatgaattcagcaaagaaaataccctctccactcgtttctctatttcccatcgcttttctcgtaggaatgctgttcgccaccatccatactttcggaagtgacgccttgagtggaggaagccagatttccctgcttgccaccactggtatgtgtgtctttatcggcatgactttctaccgcatcccttggaaagattatgaacttgccatcaccaacaacatttcaggtgttgccacagctatcattattctattgattatcggtgctttgagcggcacatggatgataagtggggtggtacctacccttatatattatggtatgcagattatccatccgaattttttccttgcttctacctgcattatttgtgcattggtatcagtaatgacgggaagttcatggaccactatcgccaccatcggtatcgcccttttgggcataggtaaggcacaaggttttgaagagggatggatagccggtgccatcatttcgggagcctatttcggagacaaaatttcaccgttatcggataccacggtccttgcctcatccgtaacggaaacaccgttattcagccatatccgctatatgatgatcaccaccgtcccctctctcctcatcacccttgtcatctttacagtaatgggactcacacacgaaacgaacaatacacaacagatcgcggaatttacggcagcattggacgccaaattcaacattactccctggttactggctgttcccgtgattacgggaatactgattgcccggagagtgccttccgtcatcacactctttctctccactctgctggcagggatattcgccttcatcttccaaccgggactactgaatgagatagcggaaggtgggaatatgttcaaagggataatgatgacattctatggcagtaccagtctacaaactgacagtgacatgttgacagaactgattgccacacgaggtatggcaggaatgatgaataccatctggctcatcatctgcgccatgtgtttcggtggagccatgacggcaagcggcatgctaggaagcatcacttccctattcgtccgcttcatgaagaatacagccagcatggtagcatccaccgtatgttccggattgttcctgaaccttgccacggcagaccagtacatcagcattatcctcaccggaaacatgttcagcaacgtttacgcaaagaaaggctacgaaagccggctacttagccgtaccacggaagatgccgttaccgtcacctccccgcttatcccatggaacacctgcggcatgacgcaagccaccattttgagtgtacccacactgacctaccttccctattgcttcttcaaccttatcagtccggtaatgagtatctttattgctgctatcggatataaaataattaaaaaaccggtgaacaatcctggataggcattgttcttgcaataaacttataacgaacaatttatttaaacctaaacaaaaaaagattcgattatgaaaaagtttattgcattagcagcagtagtattggtaagcatggcaacaacgaccatgtatgcacaagagagtagagctgaaaagcgcgcagaccgtaaagcccaaagagacgcagaacgtgcacgcctgaaagctgaagaacaagcacaggatgccatttcgtacgatgacgcaatggcggccttgaaagctcaccagttcgtaatggaggcagaccaagtgatgttccgcaacggacagaccgcatttgtaaactccaacaccaacttcgtattggtcaaccaaggacgtggcaccgtgcaggtagccttcaacaccgtatacccaggtcctaacggcattggcggtgtaacagtagacggaaccgtatcggacatccaaatgactaccgacaaacggggcaacgtgaattgtaacttcagcatccagggtatcggcatttccgcccagatattccttacgctgaccgatggcgggaacaacgcaaccgtaaccatcagcccgaacttcaactccaacaccatgactttgagcgggaacctggttccgctggaacaatccaacatattcaagggacgttcctggtaaaacccttatataaatatatatattcccactccgccacaaatcacactaaaaagtgtacatttgtagcggagttttttatataccaatgtcatgagagaatttatcattgcagacaatcaagatatcaccaaagcaggcatgatgttcctattgggcagacagaaagacacctccctgctgctggaagccgacaacaaggcagaactgatacagcaactacgcctgcatcccaccgccgttgtcattctggactataccctttttgatttttcgggagctgaagagctaatggtacttcacgaacgcttcaaggaagccgattggctactcttttccgacgaattgagcctaccgttcctgcgccaggtattgttcagcagcatggcattcggcgtagcgctgaaggataattccaaagaagagatactgaccgcactacaatgcgcctcacgcaaggagcgattcatctgtaatcacgtcagtaacctgctgctcgcaggcaacggttcctcctcccccactcatcctaccatcaaagatgatttactgactactgccgaacggagcatcctaaaagagatagccctggggaaaacaaccaaagaaatagctgccgaacgaaacctcagcttccatacggtaaacagccaccggaagaatatcttccggaaactgggtgtaaacaatgcgcacgaagccaccaaatatgccatgaaggcaggcatcgtagacttggtggaatattatatataaatctccccgctcccgacacacagccgggcatcagcatcatacaccactccgaactggcccggagcaatgccttgcagcttttcttccgaaacaatgcggtaaccctccgcctccttttgcaacctgcctttgacaaactccggcgtatggcgtatcttgaaagtcacctccacctcttcctgcgctcccttccagggattatccgtaatgaaatgaaaatcgtacatacggaattcatagccgtattgcaatgccgtatcacatccgcgggacacgtaaatcacattctcctccacatccttgcggacaacaaaccacggtcctccacccaaccccaatcctttacgctggccgatggtatgaaaccaatagccccgatgcttgcccaactttctacccgtttccaactccacaatatccccttccctttcgccaaggaaacggcgcacaaaatcattataatcaatctttcccagaaagcagatgccctgactgtcacgacgtctggcgctgggcaatccggcacgcagggctatgtcacgaacctcattcttcatcagtctgcccaatggaaacatcagtttggaaacttgcagataatctatctgtgccagaaagtcggtctggtctttcacggaatcggcagcggtaccgagccatgtctttccatccctcaacaccgtagtggcgtagtgcccggttgccgtgatatcgaaatccttccccacacgttgctcaaagcacccgaactttatcagcttgttgcacatcacatccggattgggagtcaagccacgtcttattttatcaatggcataagccgccacctggtcccaatactcccggtgcaggtccactacttccaacgataatccataacgccgggcaatggcagaagccatctccatatcctcttccgcagagcagtccatataatcggcatcgtccctccctattttgatataaaatagagaaggacggtaaccttgttcgcaaaggagatgtaccaccacggagctgtctacacctcccgacaataatacagcaatattcattctatcgtatactgttattcttttaaattctgtcaaatgcctgggacaagtcgtccagcaaatcatcgatatgttctgtcccgatggagaggcggaccgtgcccggtttgatgccttgttcttccaattcccgtgcactcaattgggaatgggtagtggtggcaggatggataaccagggatttcacatcagccacattggcaagcaacgagaatatctgtaaactgtcaataaacgtctgcgcttccttcacaccgccccgcacctcaaacgtaaagatagaaccgcctccattcggaaagtatttcccgtaaagcgcgtggtcaggatgctcgggcagggacgggtggttcacggcaaccactttgggatgcttcttcaagaattcaaccactttcaaggcattctccacatgacgttccacgcgaagcgacaacgtctccaatccttgcaacagaatgaaagcattgaaaggactgattgtggcaccggtatcacgcaacaatacggcacggatacggatggcataggcagcaggaccggcagcgtcgacgaaacgtactccatgataactcgggtccggttccgtcagttggggaaacttccccgaggccacccagtcgaacttgccgctatctacaataacaccacccaaggacgtaccatgccctccgatgaacttcgttgccgaatggactacaatatctgccccatgctctatgggacgaatcaagtaaggagtaccgaaggtgttatctataatcagaggaatccggtgacggtgtgctatttcagcaacggcatcaatgtcaatgatgttgcaattcggatttcccagcgtttcaatgaatactgccttggtattctcctgaatcgctttctcgaaattgtccagattgcccgggtccacaaaagtagtggtaaccccgtaggcaggcaatgtgtgggccagcagattatacgttccgccgtagatggtcttagctgccacgatatggtcgcctgcacgggtgatattctcaaaggcataagtgatggctgccgcacccgaggctacggccaatccggcaacaccgccttccagagccgccacacgtttctcgaacacatcctgggtggaattcgtcaaccgcccgtaaatattccccgggtcctgcaagccaaagcgggctgccgcatgggccgaattacgaaatacatacgaagttgtctgatagataggtacggcgcgggcatcagttgccgggtcgggttgttcttgtccaacgtgaagttgtagagtctcaaagtgcaatttctttgtttccattgtcgtttgtattttaggtgaataaaccgtttctcattcggatgttgcaaagatagagcgataagccggggcagacaatgacacagattagggaattttataccacaattgtggtagataagcaagcaattttctatctttagataagatagactgcatttcggcaaaactttttcatgcaagcatgaaagttctgcactcaatttgcactatctttgcccccatgaaagcaagaaatatactgatactcatattgggaaccctgattcttcccatttatctgacttcctgcggggtggaccgctggaaagagtatgccggacagacccagacagaccgctggattgacgataccatgcgtgtgtggtactattgggtagacgctatcccccataccaacgacctgaactattttcaagcccctttcactttctttgcctcgctcaaatccgaagaagacaaattctccaccatcgacagtctggtcagcgtcaccactacccgcagcatcccctatacggattacagctacggattccagttcactaccaaccagatagaagtagaaggagaagagaatgccattgttgcacagattctttacgttgccgacggaagcccggcctcggaaatcgggctgaaacggggtgactggattatgaagatggacgggaactttattactgaacagaattataagaaactgtatggaagtagtgccatggaacttacagtaggttattacgacgtggagaaaaatgccatcgttgcttacgacaaacccagacagatagcatcggcgcgtcccgtcaacgacaacccggtgcactataagaatgtatatacatcaggcagcaagaaaataggttatctggtctacaaccacttcagttccggccccacggacaacagtaatgaatatgacaacgacctgcgcagcgcattccaatatttcgcatcacagcaagtcaacgaattcatccttgacttgcgctacaacaacggtggattactgagttgcgcagaattgctgtgtaccatgcttgcaccttcctccgccttgggacaagagttggggtacctggaattcaacaaccgcttcaatccgcagatagtaccgttcaccctgaactccggactcatcggaaacggagcaaacctaaacctgaatactctctacgtacttaccagcagccagactgcctccgcctccgaaatggtgattaactgcctcgccccgtatatggatgttgtcatcatcggcggtactaccgtaggcaagaatgtaggttccaggaatttctccagccccgaactgatgataacgatgaatcccatcgtctgcaagatatacaattcggaagggaaatctgattatgaatccggattccaaccggcctactcgggatatgtagtgaatgagatgagcgacatgtcacgtttcctgccctttggagataccaacgaagccttattgagcactgcactcggcgccatcgacggaagcatacaaccgcccgcacaagaagatacccgttctttaagagtgaccactctcgcaaactccattgaacgtcgggcaagccatgccgtacgcatcaaataaaaagaccaataggatgaaactaaacagaagagttacaatcatcacccgattttcgggaatcatgttcagcctgctgttgctcggcggactggcagcttgcagcgatgataacaatggcaatgatacgccagaaccggagccgtcaacctaccccaccactcctttctccaaaatcgaactcaaagaagtgatagagagcgatgcgcaaccggttactgccacccacacctacctttacaacagtgcaggcaggctgaccagctacaccggcaaacagagctttacagcaggagacgaactcttcgagatagagaataccactactgtcgaatacaaggaccatcaagccgtgataaccgacgaagcaggtacagtatcaacctacacgctgaatgacaaaggttatgccaccacttgtaccagtcaggatatggcaggaaatacccgtacttacaccttctcctacctcatcaacaccgaagacaaatactatctggaaaacatcacagaaaagctggacgacggaaaagaatactcattcattacaatagactacagcaacttccgggcattgcgcatacagcaaaaggttgacacttttgagcacaacagtacggctaccacaccatcaggcaatgaaattgcaaatatctccgaaataccaagcctattcattacggacatgtatccgctttccatgcatgcggttgccatatacgggaagatattgggagaacctgcaaactatctgattacccaactcatcccggacagcaacggagaaagtgaagagaccaccacctatacttatacgttagataaccggggtatcgtcacttcctgccatgcagtcgtcaggcatataaggaacggctacgagcaggactacacacgcaccgtgaactataccatcgaataataaactacttacttcttaaagaacttgtcgaagaaaaggacgtgatagtctatggagttgttccaatacgttccggtatgtccaccgggacgggtgatgaagtcatggtctatcttccttgccagcagccggttgtgcaagtccttgttcacttcaagaaagaaatcggcctcaccgcagtcgatgattagcgccaagtctccatttacaatcttatccagctggttgaccaccgtatgcgcatcccaagatgccttgttggcagcaaactctcccaactgcttgttcatttcccaattctgggggaacggccgtatatccactcctccactcatactgcccgccgcaccgaacacatccttatgacggatagcactccacaaagcaccgtggccgcccatactcaatccactgatggcacgcgcctttctatcgggaatggtagcatagttcccgtctgtatacttcaccaattccgaggtgacaaaagtctcataacggtaggcaggattctccggactgtcccaataccaactgttcttgccgtccggacatacaaatatgatccctttctcatctgccatctgcggcaattccggcttcagttgcacccagctccgcgcattgccgccataaccgtgcaacagataaaccaccggacaagcctgcttgccgatagccttatcaggcaatacatacacaacttttacatccttattcatggctgcacttctcaccaacaccgtgtctacacgtgccgcctgcaacattacggcagacagacaccacaaaagccccaaggcaataattctttttttcat

SEQ ID NO: 331 - DNA, 14062 bp, unidentified
  source 1..14062: mol_type = unassigned DNA
atgaaagaagactggaaacccggaacaatgatttatccgctgcctgccgtattggtgagctgcggaagcactccggaggaatataacattctgactatcgcatggacggggacgatttgtacgaacccgcccatgtgctacatctccgtacgccccgaacgccactcctacgacatcatcaagcggaatatggaattcgtcatcaatctcaccacgaaagacatggcccgtgccacggactggtgtggcgtacgctccggaaaggactacaacaaattcgaggaaatgcatctgacaccggggaaaagcaccgtagtcagcgcgcctcttatcgaggaatcaccgctttgcatagaatgccgggtaaaggagattatggctctcggttcgcacgacatgtttatagcggatgtggtaaatgtacgtgccgatacccgtaatctgaaccctgaaaccggcaaactggaactggcggaaacgaatcccttggtctatgtgcacggtggatattatgagctgggagaaaagataggcaaattcggatggtcagtagagaaaaagaagtaataatgcgataaaggttttaagagatggagttgcgacgaatcttgatgggcttatatctgttggccttccccgccatgatgtggggacagactccggttgtgcccggtactgccgacgaagagcattccggacaccgcaaggaaactccggtcaatttcggtttcaaaggcggtttcacctcttccttgttccttgtatcccagttcagcgtcaacggagtgcccattgacgaagtgcagaacaattacaaaataggatatttcggttcccttttcatgcggataaacttcgaccgccacttcctgcaaccggaaatatcctacaacatcaaccggtgcaacatcaccttcgagaaacctctgcccgaagacgccgcatcaggagcccggccggaggaagcctccattacatcgtccatccacagtatagacatccccgtcatctacggatacaacttcatcaaggaggggccgtacagccttgccgtctttggaggacccaaagtgcgctatatatgggacaggaaaagtgacatcgacttcgagaatttcgaccaggtgaatatccgtgaaaggctgcgtccgctcaatctcagtttcaccgtcggcgtatccgtcaccatctcacgcgtctttttcgacttccgttacgacatggggctgcacaacatctccaagagcgtgacatacgatattccggccgacaacaacgctgcagacgaaaacacgaaaaacgaaatacgttttcaccgcagggacaatgtgctgagtttttctttcggagtgttcttttgacagtaaatttcttccttttctttcaatttattcatttatttcccgtaaatttgtgcgcttaataagagaacacagatttatcaaacttatctaataagcagaatgaaaagagatgatttaattttcgaacttatcgaaaaagaacaccaacgtcagctcaaaggcattgaactgattgcatcagagaactttgtaagtgaccaggttatgcaggcaatgggctcctgcctcaccaacaagtatgctgaaggataccccggcaagcgttactatggtggttgtgaggtagtagaccagagtgagcagattgccatcgaccgcttgaaacagattttcggcgcagaatgggccaacgtacagccgcactccggtgcacaagccaatgcagccgtattcctcgccgtgctcaatccgggcgacaaattcatgggactgaaccttgcacacggcggtcacctctcccatggctcactggtcaacacttccggtattatctatactccctgcgaatacaatctgaaccaggaaaccggacgtgtggactatgaccagatggaagaagttgccctgcgcgagaaacccaaaatgattatcggcggcggttctgcttattcccgcgaatgggactacaagcgcatgcgcgaaatcgcggacaagataggtgccatcctaatgattgacatggctcatcctgccggactgattgcagccggtgaactggataaccccgtgaaatatgcccacatcgtgacctccactacccacaagactctgcgtggtcctcgcggtggcgttatcatgatgggtaaggacttccccaacccctggggcaagaaaactccgaagggagaaatcaagatgatgtcccagttgctggattcagccgtattccccggtatccaaggtggtccgctggaacatgtcatcgcagcaaaagccgttgccttcggcgaaatcctgcaaccggaatggaaagaatatgccaagcaggtgaagaaaaacgccgctgtcctggcacaagccttgatagaccgtggcttcaccatcgtttccggcggtacggacaaccactccatgctggtagacctgcgcagcaaatatcccgatttgaccggtaaggttgccgagaaggcgttggtatctgccgacatcaccgtaaacaagaacatggttccgtttgacagccgctcggctttccagacttccggtatccgtctgggtactcctgccatcacaacccgtggtgccaaggaagacctgatgctcgaaattgccgagatgattgaaaccgttctgtccaacgtagacaacgaacaagtcatcgcagaggtacgtgcacgcgtcaatgcgaagatgaaagaatacccgctgtttgcttattaataagcaaacagaattaaaaattaaaaattaaaaattaaaggctgcgcaatgttcgctttgaactgcgcagcctttaatttttaattctaaacgcgctccgcgcgtttagctcagcccttctatatttccgtccacaatatcaatgtgttcggcttgtggtttctttggtaatcccggcatacggagaatttcaccggcgatggctacaatcatttccgcaccgttgttgactacaatatccttgatatggaattcaaagttattgaccgcaccatatatcttcggatcggcagagaaggagtactgcgtcttggcgatacagacagggtaatggctgatacccatctgctctatcagtttaataaccttgcgggaatggagactgtaagtcactacacttgctccgtagaggttgcaggctaccttttctattttacgttccacgcaatcgctctcttcgtaggtgaaggtcagcggttcggatggtttgttctcgatagtatctactaccagattggcaaggtcaacggctccctctcctcctttggcaaaggcgttgttcacggcaaaacctacctcaagcttttcttcgcaatggcggcggatagcttccacctcctcgtccgtatcactggcaaaacggttgaatgccacgatgacctgctggccgaatgaacgcaaattgcgtacatgtttgtccagattgccgaagccctctttcagtccttccatattgggttccttgatgcggtccagactgacaccgccatgcatcttcagtccttgtgcggtagcaacgattatcgtcagcttgggctgtaggccgctcttgcggcacttgatgttgtagaacttctccgcacccaggtcagctccgaaaccggcttccgtcactacataatcgccgaatgtcatggccatttttgtggcaagaatggagttgcaaccatgggcaatatttgcgaacggtcctccatgaacaaaagcagcagagccttcggtagtctgtaccaagttggggttgatagcatctttcaacagtacggtaatggcaccggctactcctaactccttcactgtgaaaggagtaccatcgaaacggaatcccagaataatattttcaatacggcgacggaggtcgtcgaggtctgttgccagacagagaatagccataatttcggaagccggggtaatatcgaagcccgactcctcagtaatgccgttggtgctcggtcccaatccggtgacaatgctccgcaaggaacggtcattcacatcaagtacgcgccgccagatgatttctttcagtccgaagccgtctgcctgatgctggtacaagtaattgtcgagcaaagcggaaatcatgttgtgtgcggaggtaatggcgtgaaagtcgcccgtaaagtgcaggtttatcttctccatgggaagcacctgggcatatcctccaccggcagcaccgcctttcatgccgaagcaaggacccagcgagggttcgcgtaaagccacaatcgctttcttgccaatcttgttcagccccaatgccagcccgatggacacggttgttttaccgatacccgctttcgtagccgtgatagccgtcaccagtatcagattgctcttcttcactttctcttcatcaatcagatgcgtaggaatcttggctatgtaacggccatagttctctacttcgtcacgcgggatatccacactttcagccacctgctttatcttcttcagctctatgctgcgggctatttcaatgtccgatttcatacagagtcttttctttaaataacaactttaatgttttgaaagttgcaaaagtacgaaagatgtggcaaagtacaaaagaataccgtattttcacctgaccacctgcatcttctatctatttgaaccgcgacgtatccactgcctcccgttgcttctccttatatccaccgaatttataggtgaacgatacgccgaattcgcggaagcatgagtaatgattcgtcacattctgcgtcttgaaacggatgcggggagaaatctgtcccgtctcaaaaatatcgttgcaatagaggttgagaatggctttgttcttggcgaagccgtagcgcagggcaatattcacattgcccgacgtaggcaggtcgtagatgccctgaatggctttactatgcacaaatccggtcaccgtcagcttcaagtcgggtttggtggagagagtaaaagtattgttcatctgggcaatgccatagcattgctttctatcgaaaggaatatcccagaaatcaccatccttttcgcgatgccacaagccgatgagggtaagacgagaattcaaccaattcttcaccttaaacggtatagaggcttgtatacctgcttgttgctgataatcaaaattgagtgtcttgtagatttcaaccagacgttcggaagattggtagagcgtctgtacggagtagtccttggtatggttgaaccaagcgctgaagatgtatttgctcttcaaaatataggtcattttaagctcatactcttgcgccggtttcagcaacggattaccatgcagctcagagtatccgccaccgatgtaagagacggcatcctgcaccgcccagtagtcgggatagtccttgtcgctgctcagagagagctgaaggatatgtcccggtgacggcatatagttcaagttgacgatgggataccagtcccactggttccagacgggagtcttgtaatgctccacagccagggaagcgtccaaagcgagtttgtcgccgaaactcttgctgaaacctgcatagatattccaggtctgttcgcggcggcgggacttcatattgcttaaggcatctgaggaggtcagttgttcgccggtttcggggtcgtaataatattggtagctgttgtcgatgctggtagtatagatggctccgtaattcaaatcccaaccttttcccagactgtgctcctgggccagaaagaatttccatcggttgatgcgttggcaatcttcggtgtagaagtcaagttcctcatcctgcatgcggctatgcagcaactggtcggacggggaacggtagtaggtcagttcggcaccggctttgaggccgaaaggggtacgatagtccagacggccgttgtgcagccagtcggtgctattgccatgagttgtggacacctgcgtgcccgtcacgcccgtccagttgtgggaggtggaatagccaccgttatagacgaaactcagctgatggtccttggcgatgttatagtccgcccctaccctgaaattatgggtatggctgcggccacggcccacctcatatgttgtcatggggtgaaccgagccgtctgccagggtgtgcacagcctctttgtcggtagtagagtagccccggccatggctgtgcgagtaaagaaaatctgctgagaatttatttttgctgaagagcaggctggcgcgttcctcaaagccttcgttatgcttctggcgatacttggcatagagttcgccttgccaggagtctgggccgcctgccgattgtttcaaggtgatattgatcagtgcgccacgcacctggtagcgtgcaggggcgttgtacatcacttccgccttctctatgcggctggcagggatgctgcgcagcaaggaatagagctgctcggtgctgagggtggttactttgccgtccaggataacggtgactccctggcctgccaactgcagcccgccattcatctcgatgacgccgggaagctctttcacggcatcgtaggcattatctacggggaggttccggataaggcggggcaggtcgtacaccagcttgccttgcgctgccttaacgatggggcgttcaccggtaatcatcacttccggcaaggtctgataaagactgtccagacgggcatcggtcgtgataaggctgtcggcgctgaggatgcggttgtcgtccgcaccggaggtggttgcagtgccgttgttctcttgtgccgaaagactgatgctcaaagcacagcatacaatagggagtaaatagaatcgtttcatgtccttctttttatttatgtttatattcttcttctgcaaatcttcgtctgcaaagtacggcagaatcagcagaaacttgtgttatcagcggcttaccaagtgttatccagtgttatcgggagtgttatttagtcttatcggatgatagggttcacaatattaatcttacctttgtatgtataaaagtaaccggaaacaaacatgaaactgccattcaaatatattgccatacttgtcatcgtctccctggccggcatcttcgcctaccaagcctactggctgacggggctctaccataccatgcacagtgaaatggaaagggacatcaccgaagccatgcgcatgagcgactataacgaaatgatgatacgcgtggataaaatgaagcaggacgacataaaccacggtgaagtcagcgtatcagccggatacagcgatgacggaaaatcatttgtccgtagcagtaccaccatctcccgtgaagattctttggacaacgctaccctgcacgaaaccttcatgcccaaaggagacagtgtttacgtgacccacccgaacgattcaacccgcgtggaagtcagtgtcaaggactcggacagctctccccaatccgcattgagtgccaaagggggactggatgtgattttgcgcgaccaaaacagtatgctggaactcgccacctacttccagcgcggactgcattcgggactggacatcatttccgaccccgacgtagtgctttatgacagcctgctgacttcattcctgcatgaccgtaacatcaatcttccccataggctgctacatcttcacaaaggcagtaaatgggactctaccattctctatatagatacattggtaaacatcggtacccccggctatgtgcctacctcaaaagccgtggaatataattattctttcgacatcaatacaagtcaaagctaccgtctcatcatggaaccggccggcacgttggtcttgcgacagatgtcgggcattctcaccacatcattcgttattctgatcgtactcgctttctccttctggttcctgatacgcaccatcctgaaacagaagacactggaagagatgaagagcgatttcaccaacaacatcacccacgaactgaaaacccccatcgccgtagcatatgccgccaacgacgctctgctcaacttcaaccaagcggaggaaaaggcccaacgcgacaaatacctgcgtatctgccaggaacagcttcagcgcctcagtggactggttgaacagatactttccatgagtatggaacgccgcaggactttccgcctgcacccggaggagtttgcaatacgtgatattctggaaacgctcatcgaacaacacaagctgaaagcggaaagctccgtccacatatcggtggacatcgaaccggaagatttgagcgtacttgccgaccgtacgcatttcagcaacatcatcagcaacctgatagacaacgccatcaaatattcgcacggagaagccgaagtgaccatccattgccgcaagatggccgtcgaagggcagaatgaacagaccgaaatctccgtcagcgaccacggtatcggtattgctcccgagaagcagaagcacatcttcgacaaattctaccgcgtacccacgggtaatctgcacgatgtgaaaggctatgggctgggattgttctatgtgaagaccatgatagagaagcatggtggcagcgtatcggtaaagagtgagttgggaaaaggaagtacctttacgataaggatatgataacattatttgttagggtactttacattacttgttaaggagctttacattacttgtaacaaaagcgacaattatggaaaagataaccgtacttctggttgaggacgaacagaccctcgccatgattatcaaggacacattggaagggcagaacttcatcatccacaccgcagcagacggtgaagagggattgcgcaagttcttcgacctccgtcccgacgtgctggtggcagacgtgatgatgccccgcatggacggctttgaaatggtgcgccgcatccggcagaccgacaaacagaccccggtactattccttaccgcccgttctgccatcaacgatgtggtggaagggtttgagctgggtgccaacgactacctgaaaaagcctttcggaatgcaggaactcattatccgcataaaggccctggtaggcaaagctttctcctttacagaggaaaagcccaaagaaactaccgtttttgaaatcggtgactaccgtttcaattccgtcactcaacgacttgcttttgcaggcagcaccccgacttcacctaacgcggatacggaagtggaactctcccaccgcgagtccgagatactgaaacgtctttgcgagaaccgtaaccaggtggtcaacacccagaatgtattgctcgacctctggggagacgacagcttcttcaactcccgcagcctgcatgtgttcatcaccaaactgcggcataaactggccggagacgagcgcatccgtatcgtcaatgtgcggggaataggatataaactaatagtaaactaaactaaaactaaactactatttatgagaaagttattattcattacttttatctgttcctcactctgcgcctatgcacagagcgagattccggaagacacaataaagaaccggcctcccgtaaagaaagagcagattcccttttctccaaaagagaacaagcgtacgggccttgatgaaagccagccccaacaaagcctgcagggcgaacagcaggaagagataaatctccatctccctccctccgactatgtggagcccctgccctggacggacatgaaaaagatacacttccagaagaacatctttgaatgggacttccagcgcttcgccgatttcctgctctcgccggaagtcgtactgacgatgtacggcagccataacacctatcctgcaatgggctccatcatgcaggctggcgcaggagtcacttattacagtcccgacggacattgggaattgagcggaggggtatatgccgcccactattccatttctaccccctcctccattgccggcgcccgatatgccaaaagggatgcccctcggggtacccaatgggacgtaggttacaatgcctccgtatcctaccgcatcaatccctacatgcgcctgcatgccttcggccagtattcgggctacgggagaagcaactcctttcatggatatatgaacccgatgtatccgcaaagcggttatggcatggtactggaactgaaagtgacggactggctcgacctcaacggaggcctggaacggagctacgaccccaccaaaatgaaatgggtgacttcgcccgtcttcgcccctaccattcgtataaagaaatagaaataatacaaagatatttccggaaatagagggaaacgagtatctttgttcagtctgcccctatgcggtggacagcaactgaaattgtgaacaaagaactatgaaacgaatcttcttctgcatcatcattttacttgcaggcatgtcatccgtcagcgcacagagcgagatgcctgccgatacggtacgtactgcagtacatggcgaagcgtctcccgaaggcatgtctccgtctgaaaaggagcttctgccggacgtgaagaattacgacggcttcctgctggatatggggctgatgaatctgtctgcccccactcttcccaaattcaccttggagataccggatgccagcaaggactatagccgcatcttccagttgaacccgaacgtgacttattcacaaggcctttcgaacatattctcactcagcaactcccggtatttcagttcaaaccccttcggactgacgggcttctggggctctactgacaacctgcaaatgggaagtttcactttgaagaacggcatgcgcatccatacgtacggcgaatatgacaaggacggctggaaagtgcccaacccttccgcactgccttgggaaaagaacaatttcaaaggggcgttcgagctgaaatcagccaacggagcctttggcatacgcatcgaggtgcagcaaggcaggcatgtgccctattgatgcccacaccatttaacaaccaaagtcaatggcaagaaagaaaatactggtgataggtgccaacggttttaccggcaggcgcatcctggatgatttgtcccgcaacttgtcttatcagacaacgggctgttccctgcacgacgacatctgtccccattcgggcaactatcgctttatccgcacggatatatgcaaccgccaggcgatggaaaagcttttccaggaagtacagccggatgttgtaatcaatacctccgccctctccgtccccgattattgcgaaacgcaccatgcagaagcggatgccgtcaacatcactgccgtagagcatctggcagaatgctgtgaggcgggaggtagccgttttatccatctttccaccgacttcgttttcggtggtgatacggaccgaccctatacggaggaggatattcccgctcccgttaattattacggctacaccaaactggaaggtgagaaacgtatcgctgccgtttgcaaggattatgccatcgtgcgtgtagtggtggtgtacggtgcctccctgcccggacagcatggcaatgtgctccaactggtggcaaacagattaaggaacaatgaggaagtgttcgtcgtgtccgaccaatggcgtacgcccaccttcgtgggagacgtgtcgcaaggagtggagaagctgataaatcacccgcaaaacggcatctaccacctctgtggcagcgagtgcctgaccattgcagacatcgcttattgggtagcggacgtattgggactgaatcgctcgctcatccgtcccgtcactacgaaggagatgaatgaaaagacgccacgtccccgtttcagcgggctgagtatagaaaaggtacgccgggaactgggatatcgaccgcatacgctggaggaaggaataaagctgatgttcggatagtaaataatgcaagttcggatggcagcagattcgactacagcaactccggctctgccagtcctttctctttgcgatacacacgtaccatctccagaatcacatctccatatttctccacccctttctttccgaaatacggaatgcgtacaagcatggccttatccgaaggaagcagattgctgatacccagaattgccttctgctgaatgacggtatatacgggcaatcctaatgcggaagcttctgcattgcgccatgccaccaagcggttgtaaagttccggatgcaacacatccgtgggtacttcaacagccgcagcatcgcgtttccgctcacgcggacgtttctctttatcagcctgcttactgcttccctgcccttctttggcagcagcacttctccctttgcctttacccttctgcgaagccgaatcgtcaatggaaagcagtgctttctgcttcaagtatcctgccacatggaaaccattctccagcacataatccagcaaatcagtcttcatgtcaaacacttcctccagctcctccatggcatcccggagcttcttcttcaactctttattatcagaagttaccgtactcgccatcaccgcatccagcggttgcaactgctcttgaaaataagtggcggcagagtgtatgcgcccctgcaaagtcgggtcggctgcatagtcctgcgcagtatcaatcaggcgggtatactggatactgaacttctgggctactttcgtcactttgtcgtgaaaacgttccatttcctccttacaggctgcgagttgcttgggaaagagcttgtacaagtgttcgtctatcagccgcacataccgccgcaaagcctgctccatgggctggaaatcgaacaagcccgacagcagttccaggaaataggtctgctgcaaggaacggaagcgtttctcgtccggctcgtttctccgtgcctccatcgtgaaggtatctactgcatggtcactgataacggcctttgcagaaagcggggcactgagcaccactccctccaatgtcttgcagcggctcagagccacataggtctgcccatgcgcaaaggaggcactggcatcaatcacggcacgttcaaacgtcagtccctggcttttgtgaatggtaatcgcccacgccagcttcaacggatactgccggaatgttccttcaatatcttctgtaatctccttggtttcctcatcaagcacgtatttggcattcgtccactcttcctcttgaagtaagaaggtagcgtcgcttcccttactgcgcacttcaattccatctgccgacacggctgtcacctctccaatcatgccattgtagtaacggtgctcaccggaggtgtcgttcttcacaaacattacctgggcaccgcgtttcagttccagtacttcatccgtgggataggaatattcgggaaactttccgtcaatcttggcacgaaaggcatacgagcgtcccggaagttgttccagctcatggtcattaatccgttgggcctgataattgtgggtcaccaggcggatgtatccttcttctttatctggtacgaaattgggaatataccggcggttcaaggcttccagcacttgcccgtcacaacggttttcgcgaatgcggttcagtaattcaagaaaagtcccatcgttctgccgatagactttctttagttctatggtgcaatattccgtctgcttcaaggcctggctggagaagaaataaggcgtgtcatagtatttacgcagcatctgccactcatcgtctttcactacgggagcaagctgctgaaggtcgccaatcatcagcagttgcacgccgccaaagggtttgttccggtcgcggaaccgcctcaagacggcatccaccgaatcgagcaagtcggcacggaccatactgatttcatcgatgaccaataaatctatactgcgtataatgttgattttctctttcccgtaacggaaacggtaagatgctttgccatccgcgctgaatgagctttcgggcacataaggagcgaaaggtacttggaaaaaggagtggatggtgacaccgcctgcattgatagcggcaattcccgtcggtgcaagtacaatcatccgtttcggactctctgccctcagttttcgcaggaaagttgtcttaccggtacctgccttgccggtcaaaaaaagatgagtgcctgtgttttcaatgaattgccatgcaagcgctatttcgggattattctccat

SEQ ID NO: 332 - DNA, 14046 bp, unidentified
  source 1..14046: mol_type = unassigned DNA
atgatttatccgctgcccgccgtattggtgagctgcggaagcactccggaggaatataacattctgactatcgcatggacggggacgatttgtacgaacccgcccatgtgctacatctccgtacgccccgaacgccactcctacgacatcatcaagcggaatatggaattcgtcatcaatctcaccacgaaagacatggcccgtgccacggactggtgtggcgtacgctccggaaaggactacaacaaattcgaggaaatgcatctgacaccggggaaaagcaccgtagtcagcgcgcctcttatcgaggaatcaccgctttgcatagaatgccgggtaaaggagattatggctctcggttcgcacgacatgtttatagcggatgtggtaaatgtacgtgccgatacccgtaatctgaaccctgaaaccggcaaactggaactggcggaaacgaatcccttggtctatgtgcacggtggatattatgagctgggagaaaagataggcaaattcggatggtcagtagagaaaaagaagtaataatgcgataaaggttttaagagatggagttgcgacgaatcttgatgggcttatatctgttggccttccccgccatgatgtggggacagactccggttgtgcccggtactgccgacgaagagcattccggacaccacaaggaaactccggtcaatttcggtttcaaaggcggtttcacctcttccttgttccttgtatcccagttcagcgtcaacggagtgcccattgacgaagtgcagaacaattacaaaataggatatttcggttcccttttcatgcggataaacttcgaccgccacttcctgcaaccggaaatatcctacaacatcaaccggtgcaacatcaccttcgagaaacctctgcccgaagacgccgcatcaggagcccggccggaggaagcctccattacatcgtccatccacagtatagacatccccgtcatctacggatacaacttcatcaaggaggggccgtacagccttgccgtctttggaggacccaaagtgcgctatatatgggacaggaaaagtgacatcgacttcgagaatttcgaccaggtgaatatccgtgaaaggctgcgtccgctcaatctcagtttcaccgtcggcgtatccgtcaccatctcacgcgtctttttcgacttccgttacgacatggggctgcacaacatctccaagagcgtgacatacgatattccggccgacaacaacgctgctgacgaaaacacgaaaaacgaaatccgttttcaccgcagggacaatgtgctgagtttttctttcggagtgttcttttgacagtaaatttcttccttttctttcaatttattcatttatttcccgtaaatttgtgcgcttaataagagaacacagatttatcaaacttatctaataagcagaatgaaaagagatgatttaattttcgaacttatcgaaaaagaacaccaacgtcagctcaaaggcattgaactgattgcatcagagaactttgtaagtgaccaggttatgcaggcaatgggctcctgcctcaccaacaagtatgctgaaggataccccggcaagcgttactatggtggttgtgaggtagtggaccagagtgagcagattgccatcgaccgcttgaaacagatcttcggcgcagaatgggccaacgtacagccgcactccggtgcacaagccaatgcagccgtattcctcgccgtgctcaatccgggcgacaaattcatgggactgaaccttgcacacggcggtcacctctcccatggttcactggtcaacacttccggtattatctatactccctgcgaatacaatctgaaccaggaaaccggacgtgtggactatgaccagatggaagaagttgccctgcgcgagaaacccaaaatgattatcggcggcggttctgcttattcccgcgaatgggactacaagcgcatgcgcgaaatcgcggacaagataggtgccatcctaatgattgacatggctcatcctgccggactgattgcagccggtgaactggataaccccgtgaaatatgcccacatcgtgacctccactacccacaagactctgcgtggtcctcgcggtggcgttatcatgatgggtaaggacttccccaacccctggggcaagaaaactccgaagggagaaatcaagatgatgtcccagttgctggattcagccgtattccccggtatccaaggtggtccgctggaacatgtcatcgcagcaaaagccgttgccttcggcgaaatcctgcaaccggaatggaaagaatatgccaagcaggtgaagaaaaacgccgctgtcctggcacaagccttgatagaccgtggcttcaccatcgtttccggcggtacggacaaccactccatgctggtagacctgcgcagcaaatatcccgatttgaccggtaaggttgccgagaaggcgttggtatctgccgacatcaccgtaaacaagaacatggttccgtttgacagccgctcggctttccagacttccggtatccgtctgggtactcctgccatcacaacccgtggtgccaaggaagacctgatgctcgaaattgccgagatgattgaaaccgttctgtccaacgtagacaacgaacaagtcatcgcagaggtacgtgcacgcgtcaatgcgaagatgaaagaatacccgctgtttgcttattaataagcaaacagaattaaaaattaagaattaaaaattaaaggctgcgcagttcaaagcgaacattgcgcagcctttaatttttaattcttaatttttaattctaaacgcgctccgcgcgtttagctcagcccttctatatttccgtccacaatatcaatgtgttcggcttgtggtttcttgggtaatcccggcatacggagaatttcaccggcgatggctacaatcatttccgcaccgttattgaccacaatatccttgatgtggaactcaaagttgttgactgcaccgtatatcttcgggtcggcagagaaggagtactgcgtcttggcaatacagacggggtaatggctgatacccatctgctctatcagtttgataactttgcgggagtggagactgtaagtcactacgcttgccccgtagaggttgcaggctaccttttctattttacgttccacgcaatcgctctcttcgtaggtgaaggtcagcggttcggatggtttgttctcgatagtatctactaccagattggcaaggtcaacggctccctctcctcctttggcaaaggcgttgttcacggcaaaacctacctcaagcttttcttcgcaatggcggcggatagcttccacctcctcgtccgtatcactggcaaaacggttgaatgccacgatgacctgctggccgaatgaacgcaaattgcgtacatgcttgtccagattgccgaagccctctttcagtccttccatattgggttccttgatgcggtccagactgacaccgccatgcatcttcagtccttgtgcggtagcaacgattatcgtcagcttgggctgtaggccgctcttgcggcacttgatgttgtagaacttctccgcacccaggtcagccccgaaaccggcttccgtcactacataatcgccaaatgtcatggccatttttgtggcaagaatggagttgcaaccatgggcaatatttgcgaacggtcctccatgaacaaaagcagcagagccttcggtagtctgtaccaagttggggttgatagcatctttcaacagtacggtaatggcaccggctactcctaactccttcactgtgaaaggagtaccatcgaaacggaatcccagaataatattttcaatacggcgacggaggtcgtcgaggtctgttgccagacagagaatagccataatttcggaagccggggtaatatcgaagcccgactcctcggtaatgccgttggtgctcggtcccaatccggtgacaatgctccgcaaggaacggtcattcacatcaagtacgcgccgccagatgatttctttcagtccgaagccatccgcctgatgctggtacaagtaattgtcgagcaaagcggaaatcatgttgtgtgcggaggtaatggcgtgaaagtcgcccgtaaagtgcaggtttatcttctccatgggcagcacctgggcatatcctccaccggcagcaccgcctttcatgccgaagcaaggacctaacgagggttcgcgtaaagccacaatcgctttcttgccaatcttgttcagccccaatgccagcccgatggacacggttgttttaccgatacccgctttcgtagccgtgatagccgtcaccagtatcagattgctcttcttcactttctcttcatcaatcagatgcgtaggaatcttggctatgtaacggccatagttctctacttcgtcacgcgggatatccacactttcagccacctgctttatcttcttcagctctatgctgcgggctatttcaatgtccgatttcatacagagtcttttctttaaataacaactttaatgttttgaaagttgcaaaagtacgaaagatgtggcaaagtacaaaagaataccgtattttcacctgaccacctgcatcttctatctatttgaaccgcgacgtatccaccgcctcccgttgcttctccttatatccaccgaatttataagtaaacgatacgccgaattcgcggaagcatgagtaatgattcgtcacattctgcgtcttgaaacggatgcggggagaaatctgtcccgtctcaaaaatatcgttgcaatagaggttgagaatggctttgttcttggcgaagccgtagcgcagggcaatattcacattgcccgacgtaggcaggtcgtagatgccctgaatggctttactatgcacaaatccggtcaccgtcagcttcaagtcgggtttggtggagagagtaaaagtattgttcatctgggcaatgccatagcattgctttctgtcgaaaggaatatcccagaaatcaccatccttttcgcgatgccacaagccgatgagggtaaggcgagaattcaaccaatccttcaccttaaacgggatagaggcttgtattcctgcttgttgctgataatcaaaattgagtgtcttgtagatttcaaccagacgttcggaggattggtagagtgtctgtacggagtagtccttggtatggttgaaccaagcgctgaagatgtatttgcttttcaaaatataggtcattttcagctcatactcttgtgccggtttcagcaacggattaccatgcagctcagagtatccgccgccgatgtaagagacggcatcctgcaccgcccagtagtcgggatagtccttgtcgctgctcagagagagctgaaggatatgtcccggtgccggcatatagttcaagttgacgatgggataccagtcccactggttccagacgggagtcttgtaatgctccacagccaaagaagcgtccaaagcaagtttgtcgccgaaacttttgctgaaacctgcatagatattccaggtctgctcgcggcggcgggacttcatattgctcaaggcatccgatgaggtcagttgtccgccggtttcggggtcataataatattggtagctgttgtcgatgctggtagtatagatggctccgtaattcaagtcccaaccttttcccagactgtgctcctgggccagaaagaatttccatcggttgatgcgttggcaatcttcggtgtagaagtcaagttcctcgtcctgcatgcggctatgcagcaactggtcggacggggaacggtagtaggtcagttcggcaccggctttgaggccaaaaggggtacgatagtccagacggccgttgtgcagccagtcggtgctattgccatgagttgtggacacctgcgtgcccgtcacgcccttccagttgtgggaggtggaatagccaccgttatagacgaaactcagctgatggttcttggcgatattatagtccgcccctacccggaagctatgggtatggctacggccacggcccacctcatctgttgtcatggggtgaaccgagccgtctgccagagtgtgcacagcctctttgtcggtagtagagtagccctggccatggctgtgcgagtaaagaaaatctgctgagaatttatttttgctgaagagcaggctggcgcgttcctcaaagccttcgttatgcttctggcgatacttggcatagagttcgccttgccaggagccggggccgcctgccgattgtttcagggtgatattgataagtgcgccacgcacctggtagcgtgcaggggcgttgtacatcacttccgccttctctatgcggctggcagggatgctgcgcagcaaggaatagagctgctctgtgctgagggtggttactttgccgtccaggataacggtgactccctgacctgccaactgcagccctccattcatctcgatgacgccgggaagctctttcacggcatcgtaggcattatctacggggaggttccggataaggcggggcaggtcgtacaccagcttgccttgcgctgcctttacgatggggcgttcaccggtaatcatcacttccggcaaggtctgataaaggctgtccagacgggcatcggtcgtaataaggctgtcggcgctgaggatgcggttgtcgtccgcaccggaggtggttgcagtgccgttgttctcttgtgccgaaagactgatgctcaaagcacagcatacaataggaagtaaatagaatcgtttcatgttcttctttttatttatgtttatattcttcttctgcaaatcttcgtctgcaaagtacggcagaatcagcagaaacttgtgttatcagcggcttaccaagtgttatccagtgttatcgggagtgttatttagtcttatcggatgatagggttcacaatattaatcttacctttgtatgtataaaagtaaccggaaacaaacatgaaactgccattcaaatatattgccatacttgtcatcgtctccctggccggcatcttcgcctaccaagcctactggctgacggggctctaccataccatgcacagtgaaatggaaagggacatcaccgaagccatgcgcatgagcgactataacgaaatgatgatacgcgtggataaaatgaagcagggcgacataaaccacggtgaagtcagcgtatcagccggatacagcgatgacggaaaatcatttgtccgtagcagtaccaccatctcccgtgaagattctttggacaacaccaccctgcacgaaaccttcatgcccaaaggagacagtgtttacgtgacccacccgaacgattcaacccgcgtggaagtcagtgtcagggactcagacagctctccccaatccgcattgagtgccaaagggggactggatgtgattttgcgcgaccaaaacagtatgctggaactcgccacctacttccagcgcggactgcattcgggactggacatcatttccgaccccgacgtactgctttatgacagcctgctgacttcattcctgcatgaccgtaacatcaatcttccccataggctgctacatcttcacaaaggcagcaaatgggactctaccattctctatatagatacattggtaaacatcggtacccccggctatgtgcctacctcaaaagccgtggaatataattattctttcgacatcaatacaaatcaaagctaccgtctcatcatggaaccggccggcacgttggtcttgcgacagatgtcgggcattctcaccacatcattcgttattctgatcgtactcgctttctccttctggttcctgatacgcaccatcctgaaacagaagacactggaagagatgaagagcgatttcaccaacaacatcacccacgaactgaaaacccccatcgccgtagcatatgccgccaacgacgctctgctcaacttcaaccaagcggaggaaaaggcccagcgcgacaaatacctgcgtatctgccaggaacagcttcagcgcctcagtggactggttgaacagatactttccatgagtatggaacgccgcaggactttccgcctgcacccggaggagtttgcaatacgtgatattctggaaacgctcatcgaacaacacaagctgaaagcggaaagctccgtccacatatcggtggacatcgaaccggaagatttgagcgtacttgccgaccgtacgcatttcagcaacatcatcagcaacctgatagacaacgccatcaaatattcgcacggagaagccgaagtgaccatccattgccgcaagatggccgtcgaagggcagaatgaacagaccgaaatctctgtcagcgaccacggtatcggtattgctcccgagaagcagaagcacatcttcgacaaattctaccgcgtacccacgggtaatctgcacgatgtgaaaggctatgggctgggattgttctatgtgaagaccatgatagagaagcatggtggcagcgtatcggtaaagagtgagttgggaaaaggaagtacctttacgataaggatatgataacattatttgttagggtactttacattacttgttaaggagctttacattacttgtaacaaaagcgacaattatggaaaagataaccgtacttctggttgaggacgaacagaccctcgccatgattatcaaggacacattggaagggcagaacttcatcatccacaccgcagcagacggtgaagagggattgcgcaagttcttcgacctccgtcccgacgtgctggtggcagacgtgatgatgccccgcatggacggctttgagatggtgcgccgcatccggcagaccgacaaacagaccccggtactgttccttaccgcccgttccgccatcaacgatgtggtggaagggtttgagctgggtgccaacgactacctgaaaaagcctttcggaatgcaggaactcattatccgcataaaggccctggtaggcaaagctttctcctttacagaggaaaagcccaaggaaaccaccgtttttgaaatcggtgactaccgtttcaattccgtcactcaacgacttgcttttgcaggcagcaccccgacttcacctaacgcggatacggaagtggaactctcccaccgcgagtccgagatactgaaacgcctttgcgagaaccgcaaccaggtggtcaacacccagaacgtattgctcgacctctggggagacgacagcttcttcaactcccgcagcctgcatgtgttcatcaccaaactgcggcataaactggccggagacgagcgcatccgtatcgtcaatgtgcggggaataggatataaactaatagtgaactaaactaaaactaaactactatttatgagaaagttattattcattacttttatctgttcctcactctgcgcctatgcacagagcgagattccggaagacacaataaagaaccggcctcccgtaaagaaagagcagattcccttttctccaaaagagaacaagcgtacgggccttgatgaaagccagccccaacaaagtctgcagggcgaacagcaggaagagataaatctccatctccctccctccgactatgtggagcccctgccctggacggacatgaagaagatacactttcagaaaaacatctttgaatgggacttccagcgtttcgccgatttcctgctctcgccggaagtcgtactgacgatgtacggcagccataacacctatcctgcaatgggctccatcatgcaggctggcgcaggagttacttattacagtcccgacggacattgggaattgagcggaggggtatatgccgcccattattccatctcccaaccttcatccattaccggtgcccagtatgccaaaagggatgccccccgaggtactcaatgggacataggctacaatgcctccgtatcctaccgcatcaatccctacatgcgcctgcatgccttcggccagtattcgggctacgggagaagcaactcctttcatggatatatgaacccgatgtatccgcaaagcggttatggcatggtactggaactgaaagtgacggactggctcgacctcaacggagggatggaacgaagatacgaccccaccaaaatgaaatgggtaaattcgcccattttcgcccctaccattcgtataaagaaatagaaataatacaaagatatttccggaaatagagggaaacgagtatctttgttcagtctgcccctatgcggcagacagcaactgaaattgtgaacaaagaactatgaaacgaatcttcttctgcatcatcattttacttgcaggcatgtcatccgtcagcgcacagagcgagatgcctgccgatacggtacgtactgcagtacgtggcgaagcgtctcccgaaggcatgtctccgtctgaaaaggagcttctgccgggcgtgaagaattacgacggcttcctgctggatatggggctgatgaatctgtccacccccactcttcccaaattcactttggagataccggatgccagcaaagactatagccgcatcttccagttgaacccgaacgtgacttattcacaaggcctttcgaacatattctcactcagcaactcccggtatttcagttcaaaccccttcggactgacgggcttctggggctctaccgacaacctgcaaatgggaagtttcactttgaagaacggcatgcgcatccatacgtacggcgaatatgacaaggacggctggaaagtgcccaacccttccgcactgccttgggaaaagaacaatttcaaaggggcgttcgagctgaaatcagccaacggagcctttggcatacgcatcgaggtacagcagggcagacacgtgccctattgatgcccatcacttaacaacagaatcaatgacaagaaagaaaatactggtgataggcgccaacggttttaccggcagacgcatcctggatgatttgtcccgcaacttgtcttaccagacaacgggctgttccctgcacgacgacatttgtccccattcgggcaactatcgctttatccgcacggatatatgcaaccgccaggcggtggaaaagcttttccaggaagtacagccggatgttgtaatcaatacctccgccctctccgtccccgattattgcgaaacgcaccatgcagaagcggatgccgtcaacattactgccgtggagcatctggcagaatgctgtgaggcgggaggcagccgttttatccatctttccaccgacttcgttttcggtggtgatacggaccgaccctatacggaggaggatattcccgctcccgttaattattacggctacaccaaactggaaggtgagaaacgtatcgctgccgtttgcagggattatgccatcgtgcgtgtagtggtggtgtacggtgccgccctgcccagacagcatggcaatgtgctccaactggtggcaaacagattaaggagcaatgaggaagtgttcgtcgtatccgaccaatggcgtacgcccaccttcgtgggagacgtgtcgcaaggagtggagaagctgataagtcatccgcaaaacggtatctatcatctctgtggcagcgagtgcctgaccattgcagacatcgcttatcgggtagcggacgtattggggctgaatcgctcgctcatccgtcccgtcactacgaaggagatgaatgaaaagacgccacgtccccgtttcagcgggctgagtatagaaaaggcaagccgggaactggggtatcagccgcgcacgctggaagaaggaataaagcagatgttcggatggtaaataatgcaggtgcggatggcagcagattcgactacagcaactccggctctgccagtcctttctgtttgcgatacacacgtaccatctccagaatcacatctccatatttctccacccctttttttccgaaatacggaatgcgtacaagcatggccttatccgaaggaagcagattgctgatgcctagaattgccttctgctgaatgacggtgtatacgggcagccctaatgcggaagcttctgcattgcgccatgctaccaagcggttgtaaagttccggatgcagcacatccgtgggtacttcaacagccgcagcatcgcgtttccgctcacgcggacgtttctctttatcagcctgcttactgcttccctgcccttctttggcagaagcacttctccctttgcctttacccttctgcgaagccgaatcatcaatggaaagcagtgctttctgcttcaagtatcctgccatatggaaaccattctccagcacataatccagcaaatcagtcttcatgtcaaacacttcctccagttcctccatggcatcccggagcttcttcttcaactctttattatcagaagttaccgtactcgccatcaccgcatccagcggttgcaactgctcttgaaaataagtggcggcagagtgtatgcgcccctgcaaagtcgggtcggctgcatagtcctgcgcagtatcaatcaggcgggtatactggatactgaacttctgggctactttcgtcactttgtcgtgaaaacgttccatttcctccttacagactgcgagttgcttgggaaagagcttgtacaagtgttcgtctatcagccgcacataccgccgcaaagcctgctccatgggctggaaatcgaacaagcccgacagcagttccaggaaataggtctgctgcaaggaacggaagcgtttctcgtccggctcgtttctccgtgcctccatcgtgaaggtatctactgcatggtcactgataacggcctttgcagaaagcggggcactgagcaccactccctccaatgtcttgcagcggctcagagccacataggtctgcccatgcgcaaaggaggcactggcatcaatcacggcacgttcaaacgtcagtccctggcttttgtgaatggtaatcgcccacgccagcttcagcggatattgccggaatgttccttcaatatcttctgtaatctccttggtttcctcatcaagcacgtatttggcattcgtccactcttcctcttgaagtaagaaggtagcgtcgcttcccttactgcgcacttcaattccatctgccgacacggctgtcacctctccaatcatgccattgtagtaacggtgctcaccggagatgtcgttcttcacaaacattacctgggcaccgcgtttcagttccagtacttcatccgtgggataggaatattcgggaaactttccgtcaatcttggcacgaaaggcatacgagcgtcccggaagttgttccagctcatggtcattaatccgttgggcctgataattgtgggtcaccaggcggatgtatccttcttctttatctggtacgaaattgggaatataccggcggttcaaggcttccagcacttgcccgtcacaacggttttcgcgaatgcggttcagtaattcaagaaaagtcccatcgttctgccgatagactttctttagttctatggtgcaatattccgtctgcttcaaggcctggctggagaagaaataaggcgtgtcatagtatttgcacagcatctgccactcatcgtctttcactacgggagacagctgctgtaagtcgccaatcatcagcagttgcacgccgccaaagggtttgttccggtcgcggaaccgcctcaagacggcatccaccgaatcgagcaagtcggcacggaccatactgatttcatcgatgaccaataaatctatgctgcgtataatgttgattttctctttcccgtaacgaaaacggtaggttgccttgccatctgcgctgaatgagctttcgggcacataaggagcgaaaggtacttggaaaaaggagtggatggtgacaccgcctgcattgatagcggcaattcccgtcggtgcaagtacaatcatccgtttcggactctccgccctcagttttcgcaggaaagttgtcttaccggtacctgccttgccggtcaaaaaaagatgagtgcctgtgttttcaatgaattgccatgcaagcgctatttcgggattattctccat

SEQ ID NO: 333 - DNA, 7434 bp, unidentified
  source 1..7434: mol_type = unassigned DNA
atgtctctttccgaagaagcaatcactcttcagcgtgctgcgcacgaactgatgtatttgggtatggacggcagtcccgtctatagcgatgacttgtcacggcggaacggtgaggtctaccgtcttaccatggctttataccggtcgggtgtaaaaggcactaccatcgaagagcaggcaaatgtctgtcttgcccttcttatgggttacagcgcctcttttgtggaccatggcgaaaagcagcagcatgtccaggaagtgctggactgttgttgggatgtgctcgacgcccttcccgcttccttactgaagctccgtctgcttaccgcctgctacggtgaagtgttcgacgagtctttggccgacgaaggccgttccatcatcgcctcctgggattccttatcacttactcccgaacagcaggaagcggttgatgaatttcagaatgtgacagacaatccctatccatgggaatatatcgatgaataaaacttttcatataatgcttaacaataaatccgtattgattaccggaggaacgggttccttcggaaagaagtttgtggaaaccattctccgtgattatccgcaagtaaagaaaattattatttactcccgcgatgagctgaagcaatttgagctgaaacagaaatatcccggtcataagtatccgcaactacgtttctttatcggtgatgtccgtgacctcgaacgcctgacgcgggcttgcgaaggagtggacgtgattatccatgcagccgccatcaagcaggtggataccgctgaatacaatcccgaagagtgcatcaaaaccaatgtacacggtgcgcagaatgtgataaaggctgctcttgccaccggtgtacagcatgtggtggccctttctactgacaaggcttgtgcccccattaatctttatggcgccaccaagctcacttccgacaagctgtttactgccgccaacaatatcagcggttccaaggacatcaggttctccgtagtccgttatggcaatgtgatgggttcccgcggttccgtaatccctttctttatcaacaagcgtgacaacggggcgaaggaacttcccataaccgatatgcgcatgacccgtttcaacatttcactggaagccggtgtcgctttggtcatgtatgccatcggacatcacctgggtggtgaaatctttattcctaagattccttcctatcatatccaggacgtggctaccgccattgcacccaatctgccgcaggtggaagtgggcatccgtccgggagagaaactgcacgaggagatgattactgtaaccgatgctcttgatacaatcgatttgggcagatattatgtcattcttccttccgtatctttcaagcacagtcgcgaagagttcatcagacatcacaatgcagtacccgttcccgacggtttccactacagcagtgacaacaatacggagtgggagacagtagagactatgcgcgagaatatcaagaaatacgttgaccctaatttcgaggtgaaatgataagcaagcctattccatacggtcgtcagcatatcacagatgaggacatccgggcagtcatcgataccctgaaaagcgattacctgacacaaggtcccaaaatcagggaatttgaaacgaaatttgccgaatatgtaggtgcacaatatgccgtagcggtgaacaatgctacttcggggcttcatcttgcagctaccgcactgaatgtaaagccgggtgacaaggtgattgtcactcccatgacctttgctgccagtgccaactgcattcgctattgtggcggcgaggtggtattctgtgatattgacaaggatacttacctcatggatatccgtaaactcgaagccatgcttaaagcttctcctcgcggtacttacaaaggtattgttccggttgattttgcaggctatcctttggatctggaagagttcagaaagcttgccgacgagtacggtttgtggattatcgaggatgcctgccatgctcccggcggctatttcatggacagtaaaggcaagaaacaacattgtggtaacggttgttttgccgactgtgccgtattctctttccatcccgtgaaacatatcgctacgggtgagggaggcatggtgaccaccaacagcaaggagctctatgacaagctttgtctttaccgtacgcatggcattacgaaagaccctgccttattgcacgagcatcatggtggctggtattacgagatgcaggagttagggtataattaccgtctgactgattttcaggctgccttgggtatttctcagctggagcgtgcgaaagcaggtcttgaacgtcgtcatgaaatcgtaagacgctataatgaagcgttttccggaatagatggtatcaagactccgttcaatactgccgatgtctatcatgcttatcacctttatatcattcaagtagctgaccgcttgggtctttataattatctgcacgagaacaatgtctatgcgcaggttcattatgctccgcttcatctgatgccttactatcagcagtggggcaataggaaaggcgatttacctatagtagaagagtattacgaacattgtctgagtcttccgatgtatcccacgctgacggacgaggaacaggagtatgtgattgaaaaggttatagaatttgtagcgaaatgaaaaatatagcaatcattcctgcacgtggcggcagtaaacgtattccgcgtaagaatatcaagccctttatgggtaaacctatcattgcatattccatagaggcagctttacaaagcggtctttttgaggaggtgatggtttctaccgatgatgaggagattgccggaatagcttgtaagtatggtgccaaagttccttttatgcggagtgccgagatgtcaaatgaatatgccggtactgatgatgtaattcttgaagtactgaggaagtataaagagcaaggcagggagtttgaaacggtttgttgcatttactcaacggctccttttgtcactcccgaaagactccgggaagcatacggaaaaatgaattcggagatagattccgttttcacttgtgtggcttattcctatcctatacagcgcagccttcacatcgtggatggaaaaattagtatggtttatcccgaatacaaaaatgcacgttcccaagatttagaaccgatttatcacgatgccggtcagttctatttctctcgcactgctccctttgtggagagccggactttttggggtgagaatacagccgggttggtactttccgaacttgaagtgcaggaccttgatacacagactgactgggcattggcagagatgaagtatgagttgcttcataaatgatgtaatgcagaaaatctatctccgtgccgatgcaagtgctgccatcggctacggtcactttattcgtactctggctttggccgatatgctgaaggacgattttgattgtaccttctttacttgccatcctaccccttatcaggtgagtgagatggagaaggtatgtcctttcatccccttacaggaagaatcacattatgatgagttcctttcccttttgcaaggtgacgaaattgtggtacttgacaactatttctttactactgattaccagcgtgccatcaagcaaaaaggttgctgtctggtgtgtgtggatgatatgcacgacaagcactatgtggctgatcttatagtcaatcagggattgggttacacgcgtgatgactattcgtgtgaaccatatactcaatttgcctttgggcttcaattttcattgttgaggaggcctttcttcaatgttgcgctgcagaataaacggaacaattattcaggaggtttatatgtattggtggcttttggtggttctgatttcttgaatttgacgtatcagaccattcatgcaattaaagccaaagacaatgtgaagaagataacggcaattgtcggtgattcgtatgcagccgagaatatggttgatgaccccaaagtaacctatcagaagaatttgtctgccggttccattgcagacttgtttagtactgtagatgtcgccatattgcctgcctctacgatgatgaatgaggcattggcctgtggaactcctgttataggagggtattatgttgataatcaggagcacgactattatatgtttttgcgtgaagggctgattcagggggcgggtgattataccgatgccgctgcctttactcttgttgctgagaatttggataagatggccattcgtaaaagacatgccatcactccggatattcccaaacggtttgtcaatttgtttaaaagtctgttgatatgcaagtaacttcacaaagagcttcggccatattgtataattatctgtctggcaaccattttgataaaccgttcttattgccggcaaatgtgtgtcctgtagtgcccctgtcgtttatgaaagcaggtgtcggttttgagtttatagacatagatgaaagccatgccatgtcaaccgagaaatgtttgacagctatagaggcgggaaaatattccggtcttgtatttgtgcatgcctacgggaaaaagtatgacaacaaagaattttaccgggcagtgaaaagtctcgatccaaatctttgtatcattgatgattgttgcttgtgcattcccgaattggcagattccttgcctgaaaatgtggatctctgcctttacagtaccggatatgccaaattcatagaactttcctatggtggctatgcaagttttagggggggggtacgaagttgttgattatcagtatgatagcattagtgaacaaaagcattcggtatatataaggaaatgtctcctggagaatgtcagatatatgcttccggctgactatccttggctggacgcctcaaatttacaaatgaccgatgaggaatattttgacatcattgaaagaaagctcccaaaagtgattgcggaaaaagagaaaataaacaagatatacaggaatctgcttcctgaatcgattcagatgggagatgatttccagaactggaggttcatgattgtcatcgagaaccggcagaaggttcttgacgcaatattcaaggccggtctgtttgccgggactaatttcccttcggtttcatacatgttcaaaggtgtttcttctcctgttgcggaagtggaggcgaagcatatcgtcaatttgtttaatgatttccggttcagtgaagcacaggcaagaaagatctgtgatgtgataaattcggttatatgaataaaagattattgatactgggcgcaggtgaaatgcaggttcctgtcatccgaaaggcgaacgatatgggattgcataccatagtcgcagatatggatgcgaatgctccgggaatggggtacgcctcggaaccggttcttgtcagcacgatggataaggaaggtgttttggaatgtgccaaacgtcactctgttgacggcatacttactacaagtgacgcgcctgtaaatgtggtttcctatgtcggggaacagctggggcttccgtccatgtccactgaggtcgcaaaaatctgtacaaacaaatacttgcagagggaaatgtttgcggccaacgggattgatgtaccatttttcatgctttgtgataaagatacggacttgggcacattgcaagattatccatatattgtcaaaccggtagattcctctgcaagccgcggagtaaaaaaggttacaaatcataaagaacttgtacttgctttttccgaagctctcggttattcccgtaccggaaaggccattgtcgagggctttataacaggccgtgaattcagtgttgaaacatatacgcaaaacaataaaactaccgttgtcactattacggagaaactttgtatcggtgaggcagaaggcttctttgttgaagatacgcacattgaaccggcgcgtataacgaaacaggagtgggagctggtttcggagaccgtatcaaaagcactttgcctgattggacttaataattgcccctcgcatacagaaataaagctgaatgaatcgggcgcttatatcatagaaattgcttgtcggcttggaggagattatataacctctgatttggttccattgtcaaccgggatagatatgctgagaaatctggtgaactgttctcttggtttgcccgttgatgtccttcgcaaacatgaaaaatgctcagcggtacagttccttaatccgctcaactatcagcgttgtgtggattttctaagctcttcccggtcatcggctgtttttcggtctgaaataagaccttattctgaaaaaaaaataaaaaactctttagaccgtttagggtatatcatacttcagactgatagtatggaagagcttgaaagtattctaaggacgattaaatagtaaagacatgagagataagtgtatgattgtggctgagatgtctgccaaccataacggtaagaaagaaacagccattgaaaccgtcagggctgcaaaacgtgccggagccgatgccgtcaagttgcagacctatcgggctgataccattacgcttcgctgtgacaagcctgattttataattaatgaaggctctatatgggacgggcaatatttttatgatttgtatgaacaggcttatactccttgggagtggcatgaagagttgttccatgtggccaaggaagaaggactgatctgtttttcttctccttttgataagacagccgtcgatatgcttgaggctttggactgtcccgtttataagatagcttctttcgaaattacggatattccattgatagaatacgcggcttcgaagcataagccgatggtacttgctacaggcatagccaccgaagaagatattcaattggctgttgaagcttgccgcagaatgggaaataatgatattacggttcttaagtgtacctcttcttatccggctccagttgaggaagccaatctttgtatgattcgtgatttggcagaacgtttccaggtaaaaagtggactttccgaccataccctggggagtgtctctcccattgtggcggttactcaaggtgcgagtatgatagaaaagcactttattttgaatcgttccatcggtggtccggattgttctttttctatggaagagaaagattttgcccaaatggtaaaagatgtgcgcatggctgagttatctttggggaaaacgacttacgaattgacggagaaaatgagaggtagccgttccgcatcacgttctctctatgtggccgaggatatgaaggccggagaagtgattacggagcggaacgttcgctccgtccgtccgggcttcggcctgcaccccaaatatctgaaagatatattgggaaagaacgtgaaccgggatttggagaaagggacgaggtttgcattggagtacgtgaatggttag

SEQ ID NO: 334 - DNA, 7627 bp, unidentified
  source 1..7627: mol_type = unassigned DNA
atggaactgatttacacaaatgatttatgcaccggatgcaacaaatgcgtgcggggctgtcctgtacttacggcaaatattgcaacgcaggaaggttatgtaacggtagacccggacaaatgtattgcatgtggggaatgctttgatgtctgcccacatgaagcgagagactattatgatgatacggaccgcttctttgaagaccttgcatcgggaaagaaaatttccgtgatactggcaccggcatttctggcaaattatcccaaagaataccagcgtgtgctgggatatttaaagagtaagggagtcaaccatatctgcagtgtatcgttcggtgcggatatcacaacctggggatatctgaaatacattacggaacacaaatttttcgggggcatttcccagccgtgtccggcagtagtcacctatgtggaaaaatatataccggagctgattccgcgtctgatgccggtacacagtccgatgatgtgtactgctatttatatgaaaaaatacatgcaggtcacagatgaaatcgcttttatcagcccgtgtattgccaaaaaattagagattaccgatccaaattgcggcggatatgtttcttataatgtaacttttgaaaagatgatgaagtatatcggaaacgattatgaaggatgtgaaccatataccgatgaactggaatatggactggggtctttgtatccgatgcctggtggattgagggagaatgtagaacattttcttggaaaagagcaggtagtgcgtcaggtagaaggcgagcatgaggcatatgaatatctgcgttcctatgcaaaacgcattcagcagaataaagaacttccgtttatggtagatatcttaaattgcgcgaagggctgtctctacggaactgccacagatcctaaacggggaacggatgatgtcatgctgacaatcgcaaaactgcggaacagcaaaaccagtgcaaaacaggagaaggcacactttggcaggaagagcaaaagcaggagtccgtgggcagatacactgacaccggaggaacgtctgaaaaacttcatggacgcttttggaaagctggacatcaacgattttatgcgcagctacaccaatcgcgcagtacatattgaggaaccgtccgaacaggagaagaaccgcctgtttacagaaatgaaaaaagatacctacgaggaacagcacagggactgcgaatcctgtggatattcaagctgcaccaacatggtacgtgccatccacaatggagtcaacgtaaaagaaaactgtgtgcactatgtgcggggcatggcagaggaagaggcaaaaaagattgcagaacttcgcgatcaggagcggacggaacaggaaatccgccagcagaagattacagatatcacagaccggtttattaccctgagtgataacattgcagaattgaatacggcaaatgaggagtctgcaaatgaagcgactaatcttgcgcagtatattcaggatatttcccgcctgtgcgatgaactgaatgaatccatccgcattatgtcggatttcatcagtgtatataaaaagagcaatgaagatatttctgccattgcaggacagacaaatctgctttcgctcaatgcctccattgaggcggcgcgtgccggcgagaacggaagaggctttgcagtggtagcggaggaaatccgtacactgtctgattccacgaaggatcttctgacacagaacgaccagaaagccgaggcaattctcccaaagattacacagagtatggattccatcaaagatctggtagaaagcatgaataccatgacacagaaagtgtcaacgattgccgcaaacacggaagaaatttcttcccagacgacctatgtacagaatatgacagaagaaatgcgggatgaggtgaaagaactgtagatgaaaaaggatgcgtattacacatccggacaatttgcaaaaaaagcacatgtgacacttcgcgcgatccggtattatgataaacagaatattttaaagccaagtgcacggactgccgcaggagcgcggctgtatacggatgcagatctggcaaaactccagcagatccttttattaaaatatctgggattttcgctggaagatatccgggagatgacacttgctgcggcagaccagcagtatcttctcgaatccatgcggatacagaagaagctgctgcggcagaaaatggacgaaatgcaggcgatggatgaggcaattgaccgcaccatagaagccatccagacggaacaggcgattgactggaacagtatgctggatctgatccatctgacggcagtggaacgaagcctgaaaaaccagtaccagaatgcggcaaatatttccgctcggattcgcctgcacagggagtattccgtcaatccgcaggggtggtttccgtggattatgcagcagtgtaatctgcagccggggatgcggattctggagctcggctgtggaaatggagcactctggaccgaaaacagggaacaactgcctgcggatctttgggtcgttctctcggataaatcagaaggaatgctaaaggatgcccggcgtgcactgagagaggacagccgcttttcctataaaaaatttgactgcgaaaaaattccttacgaggaggaaatgtttgatcttgtgatcgcggatcatgtgctgttttactgtgaagatatcccgcaggtgcttgcagaatgtcggagagtcttaaaaaatgagggacggtttctatgcagtacctacggaaagcagcatatgcgggaaattaccgatctggtgcagcagtttcataaagaaatcgttttatcagcggaggtgctgtatgagcggttcgggcttgaaaacggagaaaacctgttagcaccgtattttccggaaattcagatgcgaagatacgaggatgcgattgaaatagcggaagcagaaccgctgatttcctatattctttcctgtcacggaaatcagaaccagctgcttttgaaccagtacaaagagttccgggaatttgtttctgcccgcgtggcagatggatttcatatcacaaaagatgccggaatcttcctgtgcagaaaatagtttgaaaatctataaaaaagacttgaaggtgacctagcgtcaccttttataatgcaatcaaatagaaaaattggaaactcacacaggaggaaaagtacatgactattattgtaacgggtggtgccggtttcatcggcagcaactttatcttctatatgttaaaagaacatccacaggatcgcatcgtatgtctggattccctgacctatgcgggcaatctgtccacgcttacaccggtgatggatcagccgaattttcgtttcgtaaaactcgatatctgcgaccgtccgggagtatataccctttttgaggaagaaaaaccggatgtgatcgtcaattttgcagcggagtcccatgtggaccgctccattgagaatccggaagtctttttgcagaccaatattatcggtacgtctgtgctgatggacgcatgcagaaagtatggtatttcacggtatcatcaggtatccacggatgaggtgtacggagatctgccgctggatcgcccggatctgttctttcatgaagatacgccgatccacacctccagtccttacagcacttcgaaggcatctgcggatctgcttgttatggcatatcatagaacgtacggcctgccggtgacgatcagccgttgttccaacaactacggcccgtatcagtttccagaaaaactcattccgcttatgatcgcaaatgcgctggcagacaagccacttccggtatacggagagggactcaatgtgcgcgactggctgtatgtcgaggatcactgtaaggcgattgatctgatcctgcgcaacggaaccgtcggagaagtctacaacatcggcggacacaacgagatgaaaaatatcgatatcgtgaaactcatctgtgaatatcttggcaagccggagagtctgatcgagcatgtgcaggacagaaaaggacacgatatgcgctatgccatcgatccgaccaagatccacaacgagctgggctggctgccggagacgatgtttaaagatggtatccgcctgaccatccagtggtatctggatcataaggaatggtgggagaacatcgtaaacggggaataccagaattattacaaagaaatgtacggaaagaaaggcttataaatatgaaagtattcgtgacaggcgttgccggacagctgggacatgatgtggtaaacgaactgacaaagcgcggacatcaggcagtcggttcggatattgcaccggcactggagactaccgtaaaatatgtgccgcttgacattaccgatgccacagcggtagaacagactatccaaaacgtgcacccggatgccatcgtgcattgcgccgcatggaccgctgtggatgcagcagaggacgaagaaaatcaggcaaaagtcagagccatcaacgtagatggaacgaaacatattgcggacgcagcgaaaaaagcagatgccaaaatggtctatatcagcaccgactatgtgtttgacggacagggcgagactccgtgggagccggactgcaaagcatacgcaccgcttaacgtatacggacagacgaaacttggcggggaactggcagtagcacagacactcgggaagtatttcatcgtgcgtatcgcatgggtgtttggattaaacggaaaaaattttattaagaccatgttaaaagtggcaaaaaatcacccgcaggtgcgcgtggtaaatgaccagatcggcacaccaacctatacttacgatctggcaagactgcttgttgacatgatggaaaccgaaaaatatggttattaccacgtaacaaacgagggtggttacatatcctggtacgatttcacaaaagaaatttaccggcaggcagggatttctaccgaagtgcagcccgtgacaaccgcggaatacggtctgtcaaaggcagcgcgtccgtttaacagcagactggaaaaaaagaaactgaaagaaaatggatttacaccgcttccaacctggcaggacgcactggggcggtatctgcaggaattaaagagacagggggaactttaagatgaagggaattatattggcaggcggcgcaggaacacggctgtatccgctgacgatggtaaccagtaaacaattgcttccggtatatgacaaaccgatgatttattatccgctgtctacactgatgctggcaggcatccgtgatattttagttatttccacgcgggaagataccccgagatttgaagcacttctgggggatggaaatcagttcgggcttcatctgtcctacaaagtgcaaccgtccccggacggtctcgcacaggcatttttacttggagaggaatttatcggagaggatgcctgtgccatggtacttggtgacaacattttctacggaaacggattcggaaaaattctgcgcaatgccgcaaaggatgcacaagagggacaggcaaccgtctttggctattatgtcaacgatccggagcgtttcggggtcgtggatttcgatgcgaacggaaaagccgtatccattgaggaaaaaccggcacagcctaagagcaactatgccgtgaccggactgtatttctatccggcaggcgtgagcgcgatggcaaaacaggtaaagccgtctgcccgcggcgaactggagattacgacgttaaacgacatgtatctgcagcagaaaaacctaaatgtacagctgctcggccgtggctttgcatggctggataccggaacgatggacagcctgctggatgcagcggcttttgtacagatgattgagcaccggcagggtgtgaccatttccgcaccggaagaaattgcatatatcaatcagtggatcacaaaagaaaaactgatggactctgccgcacgctacggaaagagcccgtatggagagcatttaaaagcagtcgcagaaggcagagtgaaatattaaaatcagcgtaactattctgagggggttctgaatagttataaatcagcatgaaagaggaaaaaacagtgggacagataacagtggaaaaaaatgtcggcggtatcgaagggctgtgtgtgattacaccggccgtacacggggatgcccgcggatatttcatggagacatacaatgaacgggaaatgaaagaagccggatttgacatccagtttgtacaggataaccagtccatgtccgtcaaaggcgtacttcgcggactacatttccagatcaactatccgcagtgcaaactcgtccgtgccgtgcgcggaagcgtatttgatgtggcagtggatcttcgcgaaggttccgtaacctatggaaaatggtacggagtggaactttccgaggaaaacaaaaagcagtttctgattccggaaggctttgcgcatggcttccttgtcctgtccgacgaggcagagttctgttacaaagtcaatgacttctggcatccgaacgacgagggcggcctggcatggaatgacccggcaatcggtatccggtggccggatgtgcagggggagtatcagggaaccccatcggcggaaggatattgtatggcagatgggacaccgctgacactttcggagaaagaccaggagtggccggggctggagaaaaaatagaatatggtgataagaaaaagtgatgatgtatgagaaaaaaagaatatatcatcactttttcttattaaaacagaattggattgactaccgatgatgacggagatagtatgaaaatatacttttgagataaaattgtaaaaaacaaacaaacttattaattctacatattattaatggggaataggaatgacaatgtttagaagagaaaagaaaaataattgggctttgatcaatcgtgtaaaatatgacggcccttgtgatggttcgccctggctgatctataaatatccggaagaggactttgtatatggttcacagttagttgtgaatcagggacaggaagccttattttttaagggcggaaaggcattggatttattcggaccgggaacgcatacgcttaatacagggaatttgccacttttgaacaaacttgtaaatctgccgttcggtggagatactccgtttacggcagaaatttattatgtgaataaaacttcgaaattaaatatgaactgggggacacagaacccgtttccggtagaagatccgaaatacgggattttgttatccatccggtcgcacggtacatatggattgcgtatcgatgatacaagaaggtttgttgcggaagtggtaggtgtagttccgttgggggcaaccgtaacttatgaatttgtcgcagcatattttagtggacttcttgtatcgaaaattaaaaatgtcatttctgcatatatgatccgcagaaaaatttcgtttttggaggttaccggatatttggacgaaatatccgaagattgcaaaaacgcggtgaaagatgagtttgaacgatttggtgcggaagtcataaatttttatgtggaaaccatcataccgccaaagagtgactatgaaaaactcagagaatacaaagaaaaatgccttatgggaaaattggaatga

SEQ ID NO: 335 - DNA, 8135 bp, unidentified
  source 1..8135: mol_type = unassigned DNA
  misc_difference 3835: note = a, c, g, or t
  misc_difference 3836: note = a, c, g, or t
  misc_difference 3837: note = a, c, g, or t
  misc_difference 3838: note = a, c, g, or t
  misc_difference 3839: note = a, c, g, or t
  misc_difference 3840: note = a, c, g, or t
  misc_difference 3841: note = a, c, g, or t
  misc_difference 3842: note = a, c, g, or t
  misc_difference 3843: note = a, c, g, or t
  misc_difference 3844: note = a, c, g, or t
  misc_difference 3845: note = a, c, g, or t
  misc_difference 3846: note = a, c, g, or t
  misc_difference 3847: note = a, c, g, or t
  misc_difference 3848: note = a, c, g, or t
  misc_difference 3849: note = a, c, g, or t
  misc_difference 3850: note = a, c, g, or t
  misc_difference 3851: note = a, c, g, or t
  misc_difference 3852: note = a, c, g, or t
  misc_difference 3853: note = a, c, g, or t
  misc_difference 3854: note = a, c, g, or t
  misc_difference 3855: note = a, c, g, or t
  misc_difference 3856: note = a, c, g, or t
  misc_difference 3857: note = a, c, g, or t
  misc_difference 3858: note = a, c, g, or t
  misc_difference 3859: note = a, c, g, or t
  misc_difference 3860: note = a, c, g, or t
  misc_difference 3861: note = a, c, g, or t
  misc_difference 3862: note = a, c, g, or t
  misc_difference 3863: note = a, c, g, or t
  misc_difference 3864: note = a, c, g, or t
  misc_difference 3865: note = a, c, g, or t
  misc_difference 3866: note = a, c, g, or t
  misc_difference 3867: note = a, c, g, or t
  misc_difference 3868: note = a, c, g, or t
  misc_difference 3869: note = a, c, g, or t
  misc_difference 3870: note = a, c, g, or t
  misc_difference 3871: note = a, c, g, or t
  misc_difference 3872: note = a, c, g, or t
  misc_difference 3873: note = a, c, g, or t
  misc_difference 3874: note = a, c, g, or t
  misc_difference 3875: note = a, c, g, or t
  misc_difference 3876: note = a, c, g, or t
  misc_difference 3877: note = a, c, g, or t
  misc_difference 3878: note = a, c, g, or t
  misc_difference 3879: note = a, c, g, or t
  misc_difference 3880: note = a, c, g, or t
  misc_difference 3881: note = a, c, g, or t
  misc_difference 3882: note = a, c, g, or t
  misc_difference 3883: note = a, c, g, or t
  misc_difference 3884: note = a, c, g, or t
  misc_difference 3885: note = a, c, g, or t
  misc_difference 3886: note = a, c, g, or t
  misc_difference 3887: note = a, c, g, or t
  misc_difference 3888: note = a, c, g, or t
  misc_difference 3889: note = a, c, g, or t
  misc_difference 3890: note = a, c, g, or t
  misc_difference 3891: note = a, c, g, or t
  misc_difference 3892: note = a, c, g, or t
  misc_difference 3893: note = a, c, g, or t
  misc_difference 3894: note = a, c, g, or t
  misc_difference 3895: note = a, c, g, or t
  misc_difference 3896: note = a, c, g, or t
  misc_difference 3897: note = a, c, g, or t
  misc_difference 3898: note = a, c, g, or t
  misc_difference 3899: note = a, c, g, or t
  misc_difference 3900: note = a, c, g, or t
  misc_difference 3901: note = a, c, g, or t
  misc_difference 3902: note = a, c, g, or t
  misc_difference 3903: note = a, c, g, or t
  misc_difference 3904: note = a, c, g, or t
  misc_difference 3905: note = a, c, g, or t
  misc_difference 3906: note = a, c, g, or t
  misc_difference 3907: note = a, c, g, or t
  misc_difference 3908: note = a, c, g, or t
  misc_difference 3909: note = a, c, g, or t
  misc_difference 3910: note = a, c, g, or t
  misc_difference 3911: note = a, c, g, or t
  misc_difference 3912: note = a, c, g, or t
  misc_difference 3913: note = a, c, g, or t
  misc_difference 3914: note = a, c, g, or t
  misc_difference 3915: note = a, c, g, or t
  misc_difference 3916: note = a, c, g, or t
  misc_difference 3917: note = a, c, g, or t
  misc_difference 3918: note = a, c, g, or t
  misc_difference 3919: note = a, c, g, or t
  misc_difference 3920: note = a, c, g, or t
  misc_difference 3921: note = a, c, g, or t
  misc_difference 3922: note = a, c, g, or t
  misc_difference 3923: note = a, c, g, or t
  misc_difference 3924: note = a, c, g, or t
  misc_difference 3925: note = a, c, g, or t
  misc_difference 3926: note = a, c, g, or t
  misc_difference 3927: note = a, c, g, or t
  misc_difference 3928: note = a, c, g, or t
  misc_difference 3929: note = a, c, g, or t
  misc_difference 3930: note = a, c, g, or t
  misc_difference 3931: note = a, c, g, or t
  misc_difference 3932: note = a, c, g, or t
  misc_difference 3933: note = a, c, g, or t
  misc_difference 3934: note = a, c, g, or t
atgatcagagtaggaatcatcggagcaaccggttatgccggaggagaactggtaaggatcctgttaaaccacaaggatgccaaaatcgtatggtacggttcccgaagctatatagataagaagtattatcaggtataccagaacatgttccagctagtggaggatatctgcaaggatgacaatctggaagaactggcgaagcaggtagatgtgatctttaccgcaacccctcagggatttctggcgggccttttgacagaggagattctctctcaggtgaagatcgtggatctgtctgctgattaccggatcaaggatgtggccacctatgaaaaatggtacggcatcgaacacaaatctcctcagttcattgaggaagcagtatacggactctgcgagatcaatcgtgacaagatcacggagaagaccagattggtagccaaccccggctgctacaccacctgttcgatcctgacggcctatcccatggtcaaggaaggcatgattgatgtgaacaccctgatcgtggatgccaagtccggtacctccggtgcaggaagaggcgccaaggtgcccaacctgttctgcgaagtgaacgagaacatgaaagcctacggcgtggcaagccacagacatacccccgagatcgaggagcagttaggctatgcgggcaactgccaggtgaccattaattttaccccgcacctcgtacccatgaacagaggaattctggcaaccgagtatgcaacactgaagagaaaaccggacggtacacttcctacctatgaggaagtaaaagctgtctatgataaatattatgcaaacgagaaattcgtccgtgtgttggataagggcagctgccccgagaccaagtgggtggaaggcagcaactatgtggacatcaattttgtcattgatgagcgtaccggccgtatcattatgatgggtgcactggataacctcgtaaagggtgccgcaggacaggcggtacagaacatgaacctgctgttcgggcttcctgagagcgaaggcctggagctggttccctgcttcccttaaagcagatacggaaaggattagaaaggataaaatacatacatgaacaaacagtttacgatcaaacccatgaccatagaagattatgacggtctgcatgccctctggatgactattcacggtttcggtatccggagcatcgatgattccagagaaggtgtggaacgttttatcaaccggaatcccggcaccagtgtggtagccatcggggaggatggagccgtagtgggcggcatcctctgcggccatgacggacgacgaggctgtctgtaccatgtatgtgtcagagaagattaccgaagacttggcattggcaaagccatggtcgtccactgcatgaatgctctaaaagcggaacatatcaacaaggtcagcctgatcgcttttacccagaatgacatcggaaacgctttctggaaatgcattggatggacaaagcgggaagacttgaactactacgactttactttgaatgaagagaacattacggcgtttaataaatagatgccaggattgtggaagtgcgtagcacgaagcaatccgtaggcatcaaagtcgggggcttttgacccagacatcataaataaaacggaagcgaaaggagattattccaacatgaaacagatccagggcggtgtgaccgcagcaaaaggctttgaggcagcaggtgtggaggctgccattaaatatcagaatcgtaaggatatggcactgatcgtaagtaaggcaccttgtaccgtagctggtacatttacctccaatgtggtaaaggcggctcctgtactgtgggataagcagatcgtggaacattctgcatttgcacaggcagtggtagtcaattcgggaatcgccaatgcctgcaccggcaaacaggggctggactgctgtgaagcagaagcaaaatgtgccggagaactgttgggcgtgcccaccgatgccgtactggttgcatccaccggtgtcatcggtatgcagattcccgtagacaagatcaccgctggcatcgagaaactggtggcagccaaggcagatactctggaggctggctccgatgcagcccatgccattatgaccaccgataccatttccaaagagatcgccatcgagacacagatcggtggcaagactgtgactctgggcggtatgtgcaagggttccggtatgatccatccgaatatgtgcacgatgttaggttttgtaaccacagatgtgaaaatttccaaggagatgctgcagaagtgcgtcagcgcagatgtagtggattccttcaacatgatctccgtggatggagatacttccaccaatgatacactgctggtgctggccaacggcatggctggcaacgaggagattaccgcagagggcgaggattacgacaacttctgcaaggcactgcatgagatcaccacattcctggcaaagaaaatggcaggagatggcgaaggcgccacagcactgttcgagaccaaagtaataaacgcagtcagcaaggaagatgccagaactctggcaaaatccgtgatctgttcttctctgaccaaggcagctatcttcggacatgatgccaactggggacgtatcctctgtgcactgggttattccggagccaaattcgacccggaaaatgtggatctgtattttgagagcaagagcggcaagattcatatcttcggtaatggtgtggcatgtgattacagcgaggaagaggccacgaagatcctctccgatccggaagtcaccgcactggtggatatgcatatgggtgaggcagaagctaccgcatggggctgtgatttaagctatgattatgtgaagatcaatgcggactatcgttcctaaaaaagaacgaccggaaagataaatgacaggcggatcacggtatctgcggaaatgaggataaaaatggaaaaagatatggaacaggtaatgaaaaaagcagaggtgctgatcgaggcgcttccttacatacagaaattcaaccgtaagatcatcgtggtaaaatacggcggcagcgccatgagcaatgaggaactgcagaaaaacgtcatcaaggacgtaacgctgttgaaactggtaggtttcaagcccatcatcgttcacggcggcggtaaggagatcagccgctgggtcggcaaggtcggaaaagaggcaaagttcgtcaacggtctgcgtgtcaccgatgaggagaccatggagatcgcggaaatggtactgaacaaggtaaataagagccttgtgaccatggtggaagagctgggcgtgaaagcagtaggtgtcagcggtaaagacggcggcctgcttcaggtagagaaaaaatattccgacggtcaggacatcgggtatgtgggtgagatcaccggcgtgaatccggatattctctttgacatgctggagaaggattacctgcccatcatcgctcccattggactggacaaggattatcacacctacaatatcaatgcggatgatgcggcctgcgctatcgcaaaagcagtacatgcggagaaactggcatttctgacggatatcgagggattgtacaaggacatcaatgacaagtccacatttatttccagattgacagcttccgaggcagagggactgatccacgacggttacatcggcggtggtatgctgccgaagctgaacaactgtacttctgcgatccgcaacggtgtaaaccgtgtgcatattctggatggacgtctggcacactgcctgttgttggagatcttcaccaatcagggtatcggaactgcgatcgtatccgatgaggagnnnnnnnnnnnnnnnnnnnnnnnnnnnnnnnnnnnnnnnnnnnnnnnnnnnnnnnnnnnnnnnnnnnnnnnnnnnnnnnnnnnnnnnnnnnnnnnnnnnngttggagatcttcaccaatcagggtatcggaactgcgatcgtatccgatgaggagtgaaaaaagtgtgcagaataagcctggcagcttattccgcacccggctatttgtgccgcaggcgtcacaaagtagccattatcgcaaaaccaaattagaaatttggtttgcgtttccttgacgaaaagaacgtctgcggaatggagaggaaaaatgagcgacaccatgaaagaatatattgcagaggcggaaaaagacctgctgcatacctataaccgttatcagatcgttctggataagggcgaaggcgtacatctgtatgacaccgatgggaaaaaatatctggatttcgtagcgggaatcgctgtatttgccctgggctatcagaacaaggcatacaacgatgcgctgaaagcacagatcgacaaggtgatccacacctccaattattattacaacgtgcctgccatcgaggcggctcgtaagatcaaaaaagtatccggcatggatcgtgtctttttcaccaattccggtgcggaagcagtggaaggtgccattaaggctgccagaaaatatgcgtatctgaaggatggctgtaccgaccatgagatcattgccatgaatcactccttccacggcagaaccatgggagctttgtcagtaacgggcaaccccaagtatcgtgaggcgttccagcccatgatcggacatatcaaatttgcagaactgaatgatttccagagtgtgctggatcaggtgacagacaagacctgtgccatcattatggagactgtacagggcgagggcggactgcgtcccgctaatgaagaattcttaaaacaggttcgtgatctgtgcgatgagcgggatatcctgctgattctggatgagatccagtgcggcatgggacgtaccggttacatgtatgcatggcagcgtttcggcgtgaagccggacatcatgacttctgccaaggcactgggctgcggtgtaccggtaggtgcatttatgatgacggagaaagtagcacagcattctctgacagcgggagatcacggaaccacctacggcggtaaccccttagcctgcgcagcagtggaaaaagtgcttgatttattcgaagaggaccatataatagaacatgtgagagaggtggctccctatctggaacagcgtctgaacgaactggcagacaagtatgactgtatcaaagaacgccgtggtgtgggactgatgcagggactggtatttgaccatccggtaggagacattattaacagagcattggagaagggattaattctgatcaatgccggtgcggacattatccgcttcgtaccgcctctcgtgattacccgggaaaatgtggacgaaatgattgctattttggacacctgtatcgaataagaggtttaggtgaatttatgtttttgaaaaaaagaattatcgctacagcagctgtgatcgccatggctgctgcagctgtttacggaagtacgcaggagatgagtcagacacaggagagcggaagcggactgcagctgtttcgaggaaaggagacaatctattgctggtattccgatgaggcattgtccggttatatcaatgcggcagcagtatccttcggagaacagaacagtggagtccgtgtgattcccgtacttacttctgacagtgaatatctggaagctatcaatcaggagaccctgcattccgatcagataccggatatctacctgttgagcagcgactctctggaaaaggcttatctggcaggactggcatcgaaagtgcctgacactgtgggaatctgcaatacagaccattttccccaggcggctctgtctgcggtaacctatgatcagaagctgatcggttacccggtttattttgataccagtgcgttggtatataatgaagattatcttcgaacctgggcaacccagcaggcggagaaggaactggcgggaagcagtgagaatgatgaacccataggggaaggagaagagatcatcgaggaagattctcttccggaagaccagaccacggaacaggtgacagcggatgaggcagcggtaaatgcgctggcagagcagtatttcgcggaagcacttccctccacagtggatgatctgctgaatattgcagatacctttgatgcaccggaaggtgtggaaggtgtcatgaaatgggacgtgaacaatattttctacaactactggatcgtaggcaactacatgatcgtaggcggtgatcccggggatgacagaaatgatattgatatcaataatccggagaccattcagtgtctggaagtgtacaaggcactgaaccagttcttctttattgaatccgatacggtgacttatgattctgtgatccaggactttatcgatggcaagaccatgttcaccatcggaaccacggatgtggtcaaacggctggaagaggcaaaagcggacggcagccttgcatttaattacggaattgcccgtatgccggatgtcagcgccgaactgcagagcagatctttgtctgttacgggagcggcagtcatcaacggctattcggaacacaaggaactggcggactgcttcgcagcgtatctggcagaaggatatgcggacggcctgtatgaacgctccggcaaaatgccggcaagtcttcaggcggcagagaatgcagacaacggtgcgcttatgatctttgccgatgagtatgcggacagtgtgtcattgccgaagatgctagagacgggaaatttctggatgcagttggaagtactgttttccaaggtatggaacggtgacgacgtgactactctggtacagcagctggacgagaccatagccggacaggtaggtggtacagagaactaaaaccgttacaataaaatatgaatgaacgaaccggtcacaggatagactactactaaaaagaaaaggtggtagaatcctatgatcggttttttgattgctttagtttccggtgcgctgatgagcatccagggagtgttcaacacccaggtgacgaaatccaccggcatctggaccgccagtgcatttgtgcagtttacagcattgctggtatgtctgggggcatggctgtgtacggagcggacttcattcttgaagatagcgcaggtggagcccagatatatgcttttgggaggggccatcggagcctttatcacctacactgtgatccgcagtatggatgccctgggaccggccaaagcggtaatgcttattgtggtcgctcagcttgctgtagcatatattatcgaactgttcggatggttcggtgtggagaagcagccctgggagtggcggaaagccatcggcatggccgtggcgattgtgggtattgtgattttcaagtggaaatgatccagagctatccgcgtagcggcaattttacgaaggggttctgaatcgttaccacaaatgcgaaaacggcttgtaaattccgtgcgattccagtacaatgaaagttaacagcatagagaggcaatcccctgaaattttgtgaagaaatcaggaaaatggaaaggggactatgatgttttcgataaggttttttaaaacaaaatatgcaggtttgatcggaatgtttttcagtctggtgatgttcatgaccggctgtcagaggaaggatgaggccattgtgctgattccatccggagaagatgtggcggaatttccctcactggaagcggtggaacaggcagcggagcctgcaggcagcagcgtgacagtgcaggaaccggcaaaggctgaaccgcagatgatatatgtctatgtctgcggcgcagtgcgggatcccggagtcgtggaagtgccggagggcagcagagcggaggaagccttgcgactggtcggaggtatgacagcggaggcggatcctttttatgtgaatctggcagaaacggtgacggatggtcagaagctgtattttccaacgttggaggaagcggagactctggaagccgaggtaaaagcgacggcggagggacttgtgaatatcaacacggcatctgcggaggaattgtgtgcgctgccggggatcggagcttcccgggcagcagatattgtgcgctaccgggagcaaaacggagcctttcagacgaaggaagacattatgaaggtatccgggatcaaacagaacgcgtatgacaaattgtgtgataagatcacggtacaatga

SEQ ID NO: 336 - DNA, 14097 bp, unidentified
  source 1..14097: mol_type = unassigned DNA
atgaaagaagactggaaacccggaaccatgatttatccgctgcccgccgtactggtgagctgcggaagcactccggaggaatataacattctgactatcgcatggacggggacgatttgcacgaacccgcccatgtgttatatctccgtacgccccgaacgccactcctacgacatcatcaagcggaatatggaattcgtcatcaacctcaccacgaaagatatggcacgggccacggactggtgtggcgtacgctccggaaaggactacaacaaattcgaggaaatgcatctgacaccggggaaaagcaccgtagtcagcgcgcctcttatcgaggaatcaccgctttgcatagaatgccgggtaaaggagattatggctctcggttcgcacgacatgtttatagcggatgtggtaaatgtacgtgccgatacccgtaatctgaaccctgaaaccggcaaactggaactggcggaaacgaatcccttggtctatgtgcacggtggatattatgagctgggagaaaagataggcaaattcggatggtcagtagagaaaaagaagtaataatgcgataaaggttttaagagatggagttgcgacgaatcttgatgggcttatatctgttggccttccccgccatgatgtggggacagactccggttgtgcccggtactgccgacgaagagcattccggacaccgcaaggaaactccggtcaatttcggtttcaaaggcggtttcacctcttccttgttccttgtatcccagttcagtgtcaacggagtacccattgacgaagtgcagaacaattacaagataggatatttcggttcccttttcatgcggataaacttcgaccgccacttcctgcaaccggaaatatcctacaacatcaaccggtgcaacatcaccttcgagaaacctctgcccgaagacgccgcatcaggagcccggctggaggaagcctccattacatcgtccatccacagtatagacatccccgtcatctacggatacaacttcatcaaggaggggccgtacagccttgccgtctttggaggacccaaagtgcgctatatatgggacaggaaaagtgacatcgacttcgagaatttcgaccaggtgaatatccgtgaaaggctgcgtccgctcaatctcagtttcaccgtcggcgtatccgtcaccatctcacgcgtctttttcgacttccgttacgacatggggctgcacaacatctccaagagcgtgacatacgatattccggccgacaacaacgctgctgacgaaaacacgaaaaacgaaatccgttttcaccgcagggacaatgtgctgagtttttctttcggagtgttcttttgacagtaaatttcttccttttctttcaatttattcatttatttcccgtaaatttgtgcgcttaataagagaacacagatttatcaaacttatctaataagcagaatgaaaagagatgatttaattttcgaacttatcgaaaaagaacaccaacgtcagctcaaaggcattgaactgattgcatcagagaactttgtaagtgaccaggttatgcaggcaatgggctcctgcctcaccaacaagtatgctgaaggataccccggcaagcgttactatggtggttgtgaggtagtggaccagagtgagcagattgccatcgaccgcttgaaacagattttcggcgcagaatgggccaacgtacagccgcactccggtgcacaagccaatgcagccgtattcctcgccgtgctcaatccgggcgacaaattcatgggactgaaccttgcacacggcggtcacctctcccatggctcactggtcaacacttccggtattatctatactccctgcgaatacaatctgaaccaggaaaccggacgtgtggactatgaccagatggaagaagttgccctgcgcgagaaacccaaaatgattatcggcggcggttctgcttattcccgcgaatgggactacaagcgcatgcgcgaaatcgcggacaagataggtgccatcctaatgattgacatggctcatcctgccggactgattgcagccggtgaactggataaccccgtgaaatatgcccacatcgtgacctccactacccacaagactctgcgtggtcctcgcggtggcgttatcatgatgggtaaggacttccccaatccctggggcaagaaaactccgaagggagaaatcaagatgatgtcccagttgctggattcagccgtattccccggtatccaaggtggtccgctggaacatgtcatcgcagccaaagccgttgccttcggcgaaatcctgcaaccggaatggaaagaatatgccaagcaggtgaagaaaaacgccgctgtcttggcacaagccttgatagaccgtggcttcaccatcgtttccggcggtacggacaaccactccatgctggtagacctgcgcagcaaatatcccgatttgaccggtaaggttgccgagaaggcgttggtatctgccgacatcaccgtaaacaagaacatggttccgtttgacagccgctcggctttccagacttccggcatccgtctgggtactcctgccatcacaacccgtggtgccaaggaagacctgatgctcgaaattgccgagatgattgaaaccgttctgtccaacgtagacaacgaacaagtcatcgcagaggtacgtgcacacgtcaatgcgaagatgaaagaatacccgctgtttgcttattaataagcaaacagaattaaaaattaagaattaaaaattaaaggctgcgcaatgttcgctttgaactgcgcagcctttaatttttaattcttaatttttaattctaaacgcgctccgcgcgtttagctcagcccttctatatttccgtccacaatatcaatgtgttcggcttgtggtttcttgggtaatcccggcatacggagaatttcaccggcgatggctacaatcatttccgcaccgttattgaccacaatatccttgatgtggaactcaaagttgttgactgcaccgtatatcttcgggtcggcagagaaggagtactgcgtcttggcgatacagacggggtaatggctgatacccatctgctctatcagtttgataaccttgcgggagtggagactgtaagtcactacgcttgccccgtagaggttgcaggctaccttttctattttacgttccacgcaatcgctctcttcgtaggtgaaggtcagcggttcggatggtttgttctcgatagtatctactaccagattggcaaggtcaacggctccctctcctcctttggcaaaggcgttgttcacggcaaaacctacctcgagcttttcttcgcaatggcggcggatagcttccacctcctcgtccgtatcactggcaaaacggttgaatgccacgatgacctgctggccgaatgaacgcaaattgcgtacatgcttgtccagattgccgaagccctctttcaatccttccatattgggttccttgatgcggtccagactgacgccgccatgcatcttcaatccttgtgcggtagcaacgattatcgtcaacttgggctgtaggccgctcttgcggcacttgatgttgtaaaacttctccgcacccaggtcagccccgaaaccggcttccgtcactacataatcgccaaatgtcatggccatttttgtggcaagaatggagttgcaaccatgggcaatatttgcgaacggtcctccatgaacaaaagcagcagagccttcggtagtctgtaccaggttggggttgatagcatctttcaacagtacggtaatggcaccggctactcctaactccttcactgtgaaaggagtaccatcgaaacggaatcccagaataatattttcgatacggcgacggaggtcatcgaggtccgttgccagacagagaatagccataatttcggaagccggggtaatatcgaagcccgactcctcggtaatgccgttggtgctcggtcccaatccggtgacaatgctccgcaaggaacggtcattcacatcaagtacgcgccgccagatgatttctttcagtccgaagccgtccgcctgatgctggtacaagtaattgtcgagcaaagcggaaatcatgttgtgtgcggaggtaatggcgtgaaagtcgcccgtaaagtgcagatttatcttctccatgggaagcacctgggcatatcctccgccggcagcaccgcctttcatgccgaagcaaggacctaacgagggttcgcgtaaagccacaatcgctttcttgccaatcttgttcagccccaatgccagcccgatggacacggttgttttaccgatacccgctttcgtagccgtgatagccgtcaccagtatcagattgctcttcttcactttctcttcatcaatcagatgcgtaggaatcttggctatgtaacggccatagttctctacttcgtcacgcgggatatccacactttcagccacctgctttatcttcttcagctctatgctgcgggctatttcaatgtccgatttcatacagagtcttttctttaaataacaactttaatgttttgaaagttgcaaaagtacgaaagatgtggcaaagtacaaaagaataccgtattttcacctgaccacctgcatcttctatctatttgaaccgcgacgtatccactgcctcccgttgcttctccttatatccaccgaatttataagtaaacgatacgccgaattcgcggaagcatgagtaatgattcgtcacattctgcgtcttgaaacggatgcggggagaaatctgtcccgtctcaaaaatatcgttgcagtagaggttgaggatggctttgttcttggcaaagccgtagcgcagggcaatattcacattgcccgacgtaggcaggtcgtagatgccctgaatggctttactatgcacaaatccggtcaccgtcagcttcaagtcgggtttggtggagagagtaaaagtattgttcatctgggcaatgccatagcattgctttctgtcgaaaggaatatcccagaaatcaccatccttttcgcgatgccacaagccgatgagggtaaggcgagaattcaaccaatccttcaccttaaatgggatagaggcttgtattcctgcttgttgctgataatcaaaattgagtgtcttgtagatttcaaccagacgttcggaagattggtagagcgtctgtacagagtagtccttggtatggttgaaccaggcgctgaagatgtatttgctcttcaaaatataggtcattttcagctcatactcttgtgccggtttcagcaacggattaccatgcagctcagagtatccgccaccgatgtaagagacggcatcctgcaccgcccagtagtcgggatagtccttgtcgctgctcagagagagctgaaggatatgtcccggtgacggcatatagttcaagttgacgatgggataccagtcccactggttccagacgggagtcttgtaatgctccacagccagggaagcgtccaaagcgagtttgtcgccgaaactcttgctgaaacctgcatagatattccaggtctgctcgcggcggcgggacttcatattgctcaaggcatccgatgaggtcagttgtccgccggtttcggggtcataataatattggtagctgttgtcgatgctggtagtatagatggctccgtaattcaaatcccaaccttttcccagactgtgctcctgggccagaaagaatttccagcggttgatgcgctgacagtcttccgtgtagaaatcgagttcctcatcctgcatacggctatgcagtagttggttggacggagagcggtagtaggtcagttcggcaccggctttgaggccgaaaggggtacgatagtccagacggccgttgtgcagccagtcggtgctattgctatgagttgtggacacctgcgtgcccgtcacgcccttccagttgtgggaggtggaatagccaccgttatagacgaaactcagctgatggttcttggcgatattatagtccgcccctaccctgaaattatgggtatggctgcggccacggcccacctcatctgtagtcatggggtgaaccgagccgtccgccagggtgtgcacagcctctttgtcggtagtagagtagctccggccatggctgtgcgagtaaagaaaatctgctgagaatttatttttgctgaagagcaggctggcgcgttcctcaaagccttcgttatgcttctggcgatacttggcatagagttcgccttgccaggagccggggccgcctaccgattgtttcaaggtgatattgataagtgcgccacgcacctggtagcgtgcaggggcgttgtacatcacttccgccttctctatgcggctggcagggatgctgcgcagcaaagaatagagctgctctgtgctgagggtggttactttgccgtccaggataacggtgactccctgacctgccaactgcagccctccattcatctcgatgacgccgggaagctctttcacggcatcgtaggcattgtctacggggaggttccggataaggcggggcaggtcgtacaccagcttgccttgcgctgccttaacgatggggcgttcaccggtaatcatcacttccggcaaggtctgataaagactgtccagacgggcatcggtcgtgataaggctgtcggcgctgaggatgcggttgtcgtccgcaccggaggtggttgcagtgccgttgttctcttgtgccgaaagactgatgctcaaagcacagcatacaatagggagtaaatagaatcgtttcatgttcttctttttatttatgtttatattcttcttcttctgcaaatcttcgtctgcaaagtacggcagaatcagcagaaacttgtgttatcagcggcttaccaagtgttatccagtgttatcgggagtgttatttagtcttatcggatgatagggttcacaatattaatcttacctttgtatgtataaaagtaaccggaaacaaacatgaaactgccattcaaatatattgccatacttgtcatcgtctccctggccggtatcttcgcctaccaagcctactggctgacggggctctaccataccatgcacagtgaaatggaaagggacatcaccgaagccatgcgcatgagcgactataacgaaatgatgatacgcgtggataaaatgaagcaggacgacataaaccacggtgaagtcagcgtatcagccggatacagcgatgacggaaaatcatttgtccgtagcagtaccaccatctcccgtgaagattctttggacaacaccaccctgcacgaaaccttcatgcccaaaggagacagtgtttacgtgacccacccgaacgattcaacccgcgtggaagtcagtgtcaaggactcggacagctctccccaatccgcattgagtgccaaagggggactggatgtgattttgcgcgaccaaaacagtatgctggaactcgccacctacttccagcgcggactgcattcgggactggacatcatttccgaccccgacgtagtgctttatgacagcctgctgacttcattcctgcatgaccgtaacatcaatcttccccataggctgctacatcttcacaaaggcagtaaatgggactctaccattctctatatagatacattggtaaacatcggtactcccggctatgtgcctacctcaaaagctgtggaatataattattctttcgacatcaatacaagtcaaagctaccgtctcatcatggaaccggtcggcatgctggttctgcggcagatgtcgggcattctcaccacgtcattcatcatcttgattgtactcgctttctccttctggttcttgatacgcaccatcttgaaacagaagacactggaagagatgaagagcgatttcaccaacaacatcacccacgaactgaaaacccccatcgccgtagcatatgccgccaacgacgctctgctcaacttcaaccaagcggaggaaaaggcccaacgcgacaaatacctgcgtatctgccaggaacagcttcagcgcctcagtggactggttgaacagatactttccatgagtatggaacgccgcaggactttccgcctgcacccggaggagtttgcaatacgtgatattctggaaacgctcatcgaacaacacaagctgaaagcggaaagctccgtccacatatcggtggacatcgaaccggaagatttgagcgtacttgccgaccgtacgcatttcagcaacatcatcagcaacctgatagacaacgccatcaaatattcgcacggagaggccgaagtggccatccattgccgcaaggtaaccgtcgaagggcagaatgaacagactgaaatctccgtcagcgaccacggtatcggcattgctcccgagaagcagaagcacatcttcgacaaattctaccgcgtacccacgggtaatctgcacgatgtgaaaggctatgggctgggattgttctatgtgaagaccatgatagagaagcatggtggcagcgtatcggtaaagagtgagttgggaaaaggaagtacctttacgataaggatatgataacattatttgttagggtactttacattacttgttaaggagctttacattacttgtaacaaaagcgacaattatggaaaagataaccgtacttctggttgaggacgaacagaccctcgccatgattatcaaggacacattggaagggcagaacttcatcatccacaccgcagcagacggtgaagagggattgcgcaagttcttcgacctccgtcccgacgtgctggtggcagacgtgatgatgccccgcatggacggctttgaaatggtgcgccgcatccggcagaccgacaaacagaccccggtactgttccttaccgcccgctccgccatcaacgatgtggtggaagggtttgagctgggtgccaacgactacctgaaaaagcctttcggaatgcaggaactcattatccgcataaaggccctggtaggcaaagctttctcctttacagaggaaaagcccaaagaaactaccgtttttgaaatcggtgactaccgtttcaattccgtcactcaacgacttgcttttgcaggcagcaccccgacttcacctaacgcggatacggaagtggaactctcccaccgcgagtccgagatactgaaacgtctttgcgagaaccgtaaccaggtggtcaacacccagaacgtattgctcgacctctggggagacgacagcttcttcaactcccgcagcctgcatgtgttcatcaccaaactgcggcataaactggccggagacgagcgcatccgtatcgtcaatgtgcggggaataggatataaactaatagtgaactaaactaaaactaaactactatttatgagaaagttattattcattacttttatctgttcctcactctgcgcctatgcacagagcgagattccggaagacacaataaagaaccggcctcccgtaaagaaagagcagattcccttttctccaaaagagaacaagcgtacgggccttgatgaaagccagccccaacaaagtctgcagggcgaacagcaggaagagataaatctccatctccctccctccgactatgtggagcccctgccctggacggacatgaagaagatacactttcagaaaaacatctttgaatgggacttccagcgtttcgccgatttcctgctctcgccggaagtcgtactgacgatgtacggcagccataacacctatcctgcaatgggctccatcatgcaggctggcgcaggagtcacttattacagtcccgacggacattgggaattgagcggaggggtatatgccgcccattattccatctcccaaccttcatccattacaggtgcccagtatgccaaaagggatgccccccgaggtactcaatgggacataggctacaatgcctccgtatcctaccgcatcaatccctacatgcgcctgcatgccttcggccagtattcgggctacgggagaagcaactcctttcatggatatatgaacccgatgtatccgcaaagcggttatggcatggtactggaactgaaagtgacggactggctcgacctcaacggagggatggaacgaagatacgaccccaccaaaatgaaatgggtaaattcgcccatcttcgcccctaccattcgtataaagaaatagaaataatacaaagatatttccagaaatagagggaaacgagtatctttgttcagtctgcccctatgcggcagacagcaactgaaattgtgaacaaagaactatgaaacgaatcttcttctgcatcatcattttacttgcaggcatgtcatccgtcagcgcacagaacgggatgcctgccgatacggtacgtactgcagtacatggcgaagcgtctcccgaaggcatgtctccgtctgaaaaggagcttctgccggacgtgaagaattacgacggcttcctgctggatatggggctgatgaatctgtccacccccactcttcccaaattcactttggagataccggatgccagcaaagactatagccgcatcttccagttgaacccgaacgtgacttattcacaaggtctttcgaacatattctcactcagcaactcccggtatttcagttcgaatcccttcggactgacgggcttctggggctctactgacaacctgcaaatgggaagtttcactttgaagaacggcatgcgcatccatacgtacggtgaatatgacaaagacggctggaaagtgcccaacccttccgcactgccttgggaaaagaacaatttcaaaggggcgttcgagctgaaatcagccaacggagcctttggcatacgcatcgaggtacagcagggcagacacgtgccctattgatgcccatcacttaacaacagaatcaatgacaagaaagaaaatactggtgataggcgccaacggttttaccggcagacgcatcctggatgatttgtcccgcaacttgtcttaccagacaacgggctgttccctgcacgacgacatctgtccccattcgggcgactatcgctttatccgtacggatatatgcgaccgccaggcggtggaaaagcttttccatgaagtacagccggatgttgtaatcaatacctccgccctctccgtccccgattattgcgaaacgcaccatgcagaagcggatgccgtcaacattactgccgtggagcatctggcagaatgctgtgaggcgggaggcagccgttttatccatctttccaccgacttcgttttcggtggtgatacggaccgaccctatacggaggaggatattcccgctcccgttaattattacggctacaccaaactggaaggtgagaaacgtatcgccgccgtttgcagggattatgccatcgtgcgtgtagtggtagtgtacggtgccgccctgcccggacagcatggcaatgtgctccaactggtggcaaacagattaaggaacaatgaggaagtgttcgtcgtgtccgaccaatggcgtacgcccaccttcgtgggagacgtgtcgcaaggagtggagaagctgataagccatccgcaaaacggcatctaccacctctgtggcagcgagtgcctgaccattgcagacatcgcttatcgggtagcggacgtattggggctgaatcgctcgctcatccgtcccgtcactacgaaggagatgaatgaaaagacgccacgtccccgtttcagtgggctgagtatagaaaaggcacgccgggaactggggtatcagccgcgcacgctggaggaaggaataaagcagatgttcggatggtaaatgatgcagtcggatggtaaatgatgcaggttgaggatggcagcagattcgactacagcaactccggctctgccagtcctttctctttgcgatacacacgtaccatctccagaatcacatctccatatttctccgcccctttctttccgaaatacggaatgcgtacaagcatagccttatccgaaggaagcagattgctgatacccagaattgccttctgctgaatgacggtgtatacgggcaaccccaacgcggaagcttctgcattgcgccatgccaccaagcggttgtaaagttccggatgcaacacatccgtgggtacttcaacagccgcagcatcgcgtttccgctcacgcggacgtttctctttatcagcctgcttactgcttccctgcccttctttggcagcggcacttctccctttgcctttacccttctgcaaagccgaatcatcaatggaaagcagtgctttctgcttcaagtattctgccacatggaaaccattctccagcacataatccagcaaatcagtcttcaagtcaaacatttcctccagctcctccatggcatcccgaagcttcttcttcaactctttattatcagaagttaccgtactcgccatcaccgcatccagcggttgcaactgctcttgaaaataagtggcggcagagtgtatgcgcccctgcaaagtcgggtcggctgcatagtcctgcgcagtatcaatcaggcgggtatactggatactgaacttctgggctactttcgtcactttgtcgtgaaaacgttccatttcctccttacaggctgcgagttgcttgggaaagagcttgtacaagtgttcgtctatcagccgcacataccgccgcaaagcctgctccatgggctggaaatcgaacaagcccgacagcagttccaggaaataggtctgctgcaaggaacggaagcgtttctcgtccggctcgtttctccgtgcctccatcgtgaaggtatctactgcatggtcactgataacggcctttgcagaaagcggggcactgagcaccactccctccaatgtcttgcagcggctcagagccacataggtctgcccatgcgcaaaggaggcactggcatcaatcacggcacgttcaaacgtcagtccctggcttttgtgaatggtaatcgcccacgccagcttcagcggatattgccggaatgttccttcaatatcttctgtaatctccttggtttcctcatcaagcacgtatttggcattcgtccactcttcctcctgaagtaagaaggtagcgtcgcttcccttactgcgcacttcaattccatctgccgacacggctgtcacctctccaatcatgccattgtagtaacggtgctcaccggaggtgtcgttcttcacaaacattacctgggcaccgcgtttcagttccagtacttcatccgtgggataggaatattcgggaaactttccgtcaatcttggcacgaaaggcatacgagcgtcccggaagttgttccagctcatggtcattaatccgttgggcctgataattgtgggtcaccaggcggatgtatccttcttctttatctggtacgaaattgggaatataccggcggttcaaggcttccagcacttgcccgtcacaacggttttcgcgaatgcggttcagtaattcaagaaaagtcccatcgttctgccgatagactttctttagttctatggtgcaatattccgtctgcttcaaggcctggctggagaagaaataaggcgtgtcatagtatttgcgcagcatctgccactcatcgtctttcactacgggagacagctgctgtaagtcgccaatcatcagcagttgcacgccgccaaagggtttgttccggtcgcggaaccgcctcaagacggcatccaccgaatcgagcaagtcggcacggaccatactgatttcatcgatgaccaataaatctatgctgcgtataatgttaattttctctttcccgtaacgaaaacggtaggttgccttgccatctgcgctgaatgagctttcgggcacataaggagcgaaaggtacttggaaaaaggagtggatggtgacaccgcctgcattgatagcggcaattcccgtcggtgcaagtacaatcatccgtttcggactctctgccctcagttttcgcaggaaagttgtcttaccggtacctgccttgccggtcaaaaaaagatgagtgcctgtgttttcaatgaattgccatgcaagcgctatttcgggattattctccat

SEQ ID NO: 337 - DNA, 5387 bp, unidentified
  source 1..5387: mol_type = unassigned DNA
ttagttcacaccaagatacttggcaacgaccatacgctggacttcggaagtgccctcgtagatctcggtgatcttggcatcgcgcatcatgcgctcaacgggatactcacgggtgtagccatagccgccgaagagctgaacagcgcggcgggtgacgtcggaagcggtctcggccgcgaagagcttggccatggcagcgtccatggagtaatcctcgtgattctgcttcttcatagcggcagcgtaaacgaggtactgggcagcctgagtgcgggtgtgcatgtcggccagctggaactgggtgttctggaactggctcaggcggcgaccaaactggatacgctccttggtgtacttgacagcctcgttgatggcgccttcggcaagaccgagagcctgggaggcgataccgatacggccgccgtcgagggtcttcatggcgatcttgaagccttcgccttccttaccgagcaggttctccttggggacgacgcagtcttcgaagacgaggtcgcaggtagagctgccgcggatacccatcttcttctcgtgcttaccggtggagaagccggggaagtccttctcaacgatgaaggcggtgataccgtggttgcccttgctcttgtcggtcatggcgaacacgacgaaagtggaggcaacgttaccgttggtgatgaagcacttgctgccgttgaggacgtagtcgccgttctcgttcttgacagcggtggtctgctggccggaggcgtcggtaccggcgccgggctcggtcagaccgaacgcgccgatcttgcggccggacagaaggtcaggcagatacttcatcttctgctcctcggtgccgttctcgaaaatgggagcgcagcagagggaggtgtgggcggaaacgataacagcggtggtgccgcaaaccttagcgagctcctccacgcacatggcataactgagaacatcgccgccggcgccgccgtactgcttcgggaagtaaatacccatcatgccgagcttggccatcttttcgacggtctccatggggaagcgctcttcctcatcgagttcctcagctaaaggcttgacttcattttctgcaaattcgcgatacattttgcggaccagcagatgttctttggacagatggaaatccatagtcttttgctccttcactataaaaataattggattgtctaatttttcacaaatcagttccgtgactctcattatatcctgtgcgtttcattttcgcaaggggaactatcattcctttttggaattcgtgcttttcgccgaattcattaaagtctttttgacatttccgttccttttatgacagttttctgtcattttcaggaatcctttccattccaaaagagaaaaggggaggcagtttttgtaaactgcctcccctttttatccttttagggacggattacttcttgctgtaatcgtagaagcccttgccggacttcttgccaagctggccgccgcggaccatcttcttgagcagcagagcgggacgatacttcggatcgccggtctcgctgtagaggacgttcataatggcgaggcacacgtcaaggccgatgaagtcgcccagggcaagggggcccatggggtggttcgcgccgagcatcatggccttgtcgatatcctcgacagaggcaacgccggtctcgaccaggccgatggcctcgttgatcatcgggatcaggatcttgttgacgacgaagcccggagcctcagcgacctcgacaggctccttgccgatctccttggagaggttgtagatgaagtcgaaggtctcctgcgtggtgttggcgccgcggatgacctcaacgagcttcatgctgggcacggggttgaagaagtgcatgccgatgacggcgtgcttgaggccgagacccatctcggtgacagacagagaagaggtgttggtcgcgaagacggcgctctccttgcacatctcgtcgagctcgccgaggagctgacgcttggtgtccatgttctccgccacacactcgatgacgaggtcggcgtccgccgcggcagacttctcctcgacgaggatgttgttcaggatggcgtccttggcctcttcggtcatcttgcccttctcgacgcgcttctgcagggaagcggcgagcttatccttgtggcgctgagcggaagcgacgctggaagcgtacatcagagcggtgtggcccttggccgcgaagacctgagcgatgccgctgcccatggtgccggcgccgaaaactgcaactttcattgtgtgtatcctcctacaatataaatagataattctatggaatcacttgttgataaagggctcgtgcttgcgcttttcgaggaaggcgcccatgccctcctgctggtcggcgctctggaagcaggagccgaaggccttctcctcgatcacgacggcgcggtcaatatcgacctgaagaccgtcgttgatggcctgcttggacgcgcgcaccgcgatgggcgcgttgccagcgatctggccggcgagcttttccgccgcggcgtagaggtcagaaagcggatagaccgcgttgacaaggccgatgcggtaggcctcgtccgccttgatgttgcgggcggtgtagatcatctgcttggccatgccggggccgacgaggcgggcaaggcgctgtgtgccgccaaagcccggcgtgatgccaaggcctgtctcgggctggccgaagacggcggtatcggagcagatgcggaaatcgcagctcatcgcgagctcacagccgccgccgagggcatagccgcccaccgccgcgatcgtcgggatggggaacgcttcgagcttgcgcatgacgtcgttgccctgcttgccgaaggcctcggcctcctccttgctgagctccttcatctgcgcgatgtccgcgccggcgacaaaggacttctcgcccgcgccgcggacgatcaggcagcggatctcgcttaagtccaccgcgtcgagcgcggcatcgagatcggcgagcacctgagaattgagcgcgttgagcgccttttcgcggtcaatgatgagataggcaatgttgcccttgggttcatatttgacaaaagacatcgtgtgtctcctcctgtcttcttcaactgccccctattatatgggcggcaaggcatatttgcaagagaaaaatcacttttttcaaaaaagtttcacacttttccggtgtcattgcaagaaacgttgcatttttaatgatcttttctcccaatgcagcaactcttgtataaaatttttaaaatgacttgtctcttgcaccaattttcgatatgataggctttaattataggaaaacgaggttcattctatgcgaatgcgcaaaaagaaaaacctgcttccccgcatggagcggtgcggggcgtatcagatcaaggacccctacgagcgcaagggccgctggcacgacttgatgcccgaggcgaaggagatccgcgtggagctcggctgcggcaagggccgcttcaccgtcgagacggccgcggcggagcccgacgtgctgctcatcgcggtcgaaaaggtgcccgacgcgatggtcgtcgcgatggagcgcgcggcgaaggcagagctgcacaacgtcttcttcatcgacatcgacgccaaccagctgcccgaaattttcgatgcaggcgaggtcgaccgcatctatgtcaacttctgcgacccgtggccgcccaagcggcaggccaagcgccggctgacgcacggcaatttcttgaagctctaccgcaaggtgctcaaggacaacggccaaattcatttcaagaccgacaacgacccgctgtttgagtggtcgatcgaggagatcccgcagttcggcttcaccctctctgaggtcacacgcgatctgcacgcgaacggacagcgcggcgtgatgaccgactacgaggccaaattctatgccgagggcaagaacatcaaccgctgcgtcgccacgatgcagccgtgggaagagcccgaggaagaggatacgcccgaagaggcggacgaaacggctgaataaaaggaaggctttcagccttcctttttgctttcttccagatacggcgaatacatcatcaccgcgtcgttcacggcgacaggcgtctccgcgagcagcttgccctgcaaatcaaacgtctgccggtagagctcgttgtggcggatgtagccgccccagtactgcgcgcgcatctcgtggttgcgctctacgaccgcatagcgctcggtcggctcggcgctcacgcgccactcgccctcaaggtctgttttgccgacgcggacgcgcatctgataggtgtcctgtgtgtcgttgcggatcatcaggtcaagataggggtaaaagcaggtcgcaccgctgccgaagggctgcgtgcggttcgcgtcgggaaagacgtcgtagccgtggcggtggcgctcgacgaccgtgagcggcgtgtgcagcgtcatccagtagatgaggtttgagagctggcagagcccgccgcccgtcgcggccagatacccgccgttgcgcaggatcatgccgggcagataccccttccccgctgtcggctttccgatgagataccagtagctcatcgtttcaccggggcgcagcaaaagcccgtcgagccgcgcacaggcgaggcggagattcgtcaccttgttgcgctggagctgcatgtcgacgtccttgagctttcgcatgagcggcgtatggtgggaaaacgcctgatatgctaagtcttccccgctgcgctcgcgcgcaaaatgcttccgcatcgaaagccatctgagttttcgctgcgcgctaaaatacgcgccgccgagcttcagccgcaaattagagcgttttttcggttcgcggacggtcatatgcttccctcccctgtttttctgcttttatagacgcaaaacggcgggaaaaagttccaacattttcttatttcaggctcatcacgtagatttgacacgggttccacacgtcccagagcgtcgggaatacctcaaactcgccaaaaccgagggcgagatagaagcggttcgtcgcgtcgtactcagggtacttccccatctgcacggtcttgacctgcaaaaacgagtagccaagctccttcgcccgctgcttcgctgcggcaaagagcatcttgccgacgccgcggcggtggtattctttcagcacgcccatgacatagagttccgccgtatccctccccgtttcggcaaggtaaaggaagccgacggcgttctcgccgtcgaacgcggcgaaaaacggctgcttaacactcttttcgatgtattcctcgcgcgcctctggaatgccaaaccagtcgggcagcgcctctaaaatcaagcgcgcgatgcactgcttctcctctgccgctgtgatctctctaacttccat

SEQ ID NO: 338 - DNA, 9153 bp, unidentified
  source 1..9153: mol_type = unassigned DNA
atgggaaaattcagtgtcaaaaaaccgttcacggttctggtggctgtcatcatggtgctgatgctgggcttcgtgtccatcagcaacatgcagaccaacctcttaccggacgtgaacacgccgtacctgatggtggtcacggtgtatcccggtgcgagcccggagcgcgtggagagcgaagtctctgacgtcatggaaaacgcgctgggcaccgtggcaggtgtggaatccatcacggccacctctgcggagaactacagccttctgctgatgcacttcgccgagggtacggatatgaacagcgccttggtcaaggtgtcaaacaaggtggaccagaccacctccagcctgcccagcagctgtctgtcgccttcgatcattgaatacagcctgaacatgaacgcctttatgactgtggccgtcagccgcgagggcagcgatgtgtacgacctgtcggatttcgtcagcgataccctcgtgccttatgtggagcgcaagggcggcgtgtccagcgtgtccgccaacggcctgatcgagaagatggtgcaagtccagctcagtcaggagaaggtggacgccatcaacgaacggctgctggaagtcatcgacgcccgactggccgatgcgcgggctcagctcgacgccgctgaggcccagatcgaagccggccgtgcggagtacaaccgccagttcaagaacttcaataagaccgtttccaacaccgtgatgcagcagtacagcggcgaggtcggcaatgcggtggagaccgtccgcaaacaggcacaggccctgctggacagcgtcaaccaactcatcgccgtggtgcaggagccggagatccaacaggccctgatcgacgtccgggacggcttgcagcgcgtcatggacaagttcaacgagacgggcatgaaggacatcgactccctgattgagatcgtggctgagctgcgcgagatcaccgataagttgaccaccgccttgcagcaattgcaggagcgcctgaacacggagaccggcaccgagggcagcaccgccaccgatctggtcgatgacctgcaggtgcagcagagcctgagcaccgtttacaacaccctgaacgacgtcatcaaggctatggacgatgtccccggcctgatgagcaccttctcggacgccttgggcacctattcccagcagcagctggaagcctatatgcagttcaccgaggcccgcgagatgctgaacgagtacgaaaagcagctcgaaaccgcaaagcagacctatgaggacgccaaggagaaggccatggccagctccgacgtctccaagatgctggacatcgacacgctggcgcagctcatctacgcccagaacttctcgatgcccgccggttacgtcaaggattccagcggcaaatcgtggctgctgaaggtcggcgaggagtacgacagcatcgacgatatctccggtgccctgctgctccatgtggacggcttcggcgatgtccgcctgtcggacgtggccgatgtggaggtcatcgataacgccgaggccagcttcacccgcctgaacggcgagcgcgcggccgtcctgaaaatctacaaaggctccagctccagcgccagcaccgtctcggacaactgcctgtccgcgttcaaggagctggaagctcagtacgacggcctccatgtagtcgtcctgtccaaccaaggcaactatatcaccatcatcgtcaagagcatcctcagcagcatgatcatcggcgcagcattggccatcatcgtgctggctctcttcctgcgggatatcaagcccaccctcgtggtcggcttcagcatcccgctgtcggtcctgttcgctgtggtgctgatgtacttcaccggcatggacctgaacgtcatgacgctggccggcctgtcgctgggcatcggtatgctggtggataactccatcgtcgtcattgaaaacatctaccgtctgcgcagccgcggcgtgcccgccgcccgcgcggccgtgcagggcacaaagcaggtgggcatgtccatcgtggcatccaccctcacttcggtctgcgtcttcctgccggtcgtcttctcgtccagcctcgtcaagagcctgatgcagcccatgtccctgtgcatcggctactgcctgatggcctctcttctcgtggccgtcaccgttgtcccggcggctgcctccaccgttctgaaaaaggcggagccgaagcagctcaagtggttcgacaagatccagaacaagtacgccaagagcttggagtggtgttttcagcaccgcgctctgccgctggtggcagcagtggctttgctggtcttctgcggctggcgggtcgtctccatgggtgtggagctgctgcccaccatcaccagcaatgaggccatcgtcaccctgaccaccaccaaggacctcagcaaggaggactcctacgccattgccgaaaaggccatcgacgccatgctgaacgtggacaacgtggaggaagtgggcatcaccaccgacacccgtgtggccggcatggatgtgggccagttgggtctgcccagcgccatcaccgacctgctgaacgccgccaacagctacggcacctatcaggtcaacgtcatgctgaacgagtccctctcctccacccagatcgaagcggcccgtcaggcgctggaagatgccctctccggcattgaggactgcaccgccaccgtcgagatcagcgggatgcaggagctgaccagccagctggccagcggcctgagcgtcaagatctacggtgcggatcccgataccatgacccagctctccgagaaggtcgtggagatcgtcaacgacaccgagggctttgccaacgccaccaacggtctgggcagcggcgatgccaccatcaatctgcagatcgaccgcgacaaggtccgctcctacggcctgaccgttgcgcaggtctaccagcagattgccgccaagctgaccaccaccaccacggcgcagaccccggtctccgtggacggcagaaccatgagcgtggagatcagcgacaacctcgatcccgtgaccaaggaaaacatgatggatatcacctttgagacctctgtcatgtccgccgacggcaccaccaccaccggcacctgtaagctgagcgacatcgcaacgtgggtcaccggcagtgcgcccaactccatcaccagccagaaccagacccagtacgtcaccgttacagccaacacgctggacggctacaacaccacggttcaggcccgtgagctggaaaagaagctggaggccttcgccctctccgacgagatgccggagggctgctccttctccatgggcggcgagtccgacagtgtcaactacatggtcaaggagatggtgcagtggatggggctggctctgcccttcgtctacctcgtcatggtggcccagttccagagtctgctctcccccttcatcgtcctgttcaccgtgccgctggccttcactggcggtctgctgggtctgctcctcaccggccagcagctgaccatgatctccctgatgggcttcatcgtcctgatgggcaccgtcgtcaacaacggcatcgtcttcgtggactacaccaaccagctccgaatgggcggcatggagcgccgcgcggccctcatcgccactggcaagacccgtatgcgccccatcctgatgaccaccctgaccaccgttctggccatgctgcagctcgtcttcagcaacgatatggccagccagctcatgagcggcatggccatcgtcatcatctgcggcctgacctatgcgaccatcatgacgctgtatgtcgtgccgctgctgtatgacctgctgttcaagaagccgccgctgaacatcgacgtgggcagcgatgacctcgacgatatccccgacgatgccgccgagtatatcgcccagtcccacgcacagccggaagcataattctcagacgacaaagccgtccactttggaagtgggcggttttttgtttcaacctctcagtctcgctgacgctcgccagctcccctaataaggggagcccttggcaaaaccggaaactctacctatacgccagagcctcccctactaggggaggtggcattgcggagcaatgacggagaggttgtacagagaaaaaactgccctgcgcaagcaaggcgtgtttttacgttgcaaaatgcccaaaaaatatctcgaaatattggctgataaatctaaaaagatgtccacacaggagacgtaaactgtgatataatcataattataaaggatataaccgagagtgtggtatccaatcatttcgaaaaaggaggcgaagccctatggcacagtttcgctccaagccctttggcgtgaccaagaatggcgaaaaggtcaacgagtacatcatgtcgaaccccggcgggctggcggtcagtgtgctgaattacggctgcgtgatcaaaaacatctttgttcccacaaaacatgggccggtggatgtcgtggtgggccacgacacctttgccgactatgaaaatgacttcaattcctccagcagtacctgctgcggcgcatttgtggggcggtacgccaaccgcatcgagaacgccgagttcagcgtgggcggcagaaagtaccagctggaaccgaacaacggcaaaaaccacttgcacggcaccttccctcgcaaaatttacgacgtcaaggccttcggcgataccctgctgctggagaccgagagcccggcgggcgaggatggtttccccggaaatctgaagatctcggtgcgctacatcctaaccgaggacaacgccctgcggatggattaccgcgtctcctccgacgccgacaccatcctgaacctgacgaatcacacctacttcaacctcgacggcggcggcgatgtgctgaaccagaagctgcgcatctacgcttcccgctatctggagggcaacaatgagacctgccccaccggcagcatcctgcctgtggacaacacgccgatggatttccgggcgggcaaggtcatcgggcgggacatcgacaccggctttgcccagaccaccatggtgggcggcggctatgaccactgcttcgtcatcgaccggggccgcggtgccagccagagcctctgcgcgtgggcgtccagcgataagaccggcatcagcatgaaggtctacaccacccagcccggcgtccagctctacaccgccaactttttgcaggactgcccctctcccggcaagggcggcgtcccgatgcagaaatatggcggctttgcgttggagacccagcacttcccctgcagcccttcccacccggagttcccctccacggtgctgcgggccggcaaggttttccgcgccaacaccaccctgcgcttcttcacaggcaagcagtgcgggaaattatgagctttgagggagctgccgctgcggctccctttccctttctcccatttgcacaaagggccgcttctctccatgtaaaatcggagaaaaatcttcttaaatcaaaaagttgaatttcaaaaaacaacaaaaatccatcttaataaaattccagatacttgattctgcatccaaaacgcggtattctttaggcagagcgcggggcacgcccgcatcggtattttggtgataagcgaggtactttgctatggcaattctggtttccggcggtgccggttatattggcagccacacctgcatcgagctgctgaatgcgggctacgatgtcgtggtggcagataactattacaatgcttctccggtggtgcttgaccgtgtcaagcagatcaccggcaaggacttccgcttctacaacgcggacatgaccaagcatgaggacgtggagaagatcttcaccgagtgcccggacatcgacgccgttatccagttcgctgcctataaggctgtgggcgagagcgtctccaagcctatcgagtactattacaataacctgaactgcaccctcgtcattctggatgtgatgcgccgccacaactgccacaacttcgtgttcagctcctcggccaccgtctacggcgacccggcctccgtgcccatcaccgaggacttccccgtgggcaagaccaccaacccctacggcaccaccaaggccttcaccgagcgcattctggaggatgtctgcaaggcggacccggagctgaacgtcgccctgctgcgctacttcaaccccatcggtgcccacaagtccggcctcatcggcgaggaccccaacggcatccccaacaacctgatgccctacatcgccaaggtcgccatcggcaagctggaaaaggtccatgtcttcggcaacgactaccccaccccggacggcaccggcgtgcgtgactatatccacgtcgtcgatctggcccgcggccatgtctgcgccatcaagaagctggagaccaagtgcggcctcttcatctgcaaccttggcaccggccacggctacagcgtgctggatgtcatccacgccttcgaaaaggcctgcggcaagaagctcccctatgtcatcgacccgcgccgccccggcgatatcgccgagtgctacgccgatcccaccaaggccaagaacgagctgggctgggtggctgagtacggcatcgaggagatgtgcgccgatagctggaattggcagcagaaaaaccccgacggctaccacactgtgaagtaaaaaaccaaacaaaacgcaaggctcgcctcgtccgctccgcgcggatgaggcgggctttttttcgcttcctgccttgacaacgccgggcagttagcatatattaaaactgtttctataggctaacaatttgtcgaaatggaaaggcagactgccatgacattaaaagaactgaagatcggcgaaagtgccgtgatcgatacggttggcggggagggtgccctgcggcagcattttctggatatggggctgatccccggcgagcgggtcacactggtgaaatttgcgcccatgggcgacccgatggaattgcagatccatgggtacgagctgacgctgcgtctggacgatgcggcccggatcgcagtcaccccggcggcgagtgccccggccgccgcccatgcccggcgggaaagcaaaatggtggagcatccgggtctcggcgagggcgggcgctaccacaccaagaaaggggaacacccggtgccggagggcacgactctgacctttgcactggcgggcaaccagaactgcggcaagaccaccctgttcaaccagctcaccggctccaatcagcatgtgggcaatttccccggcgtgacggtggaccggaagagcggcgccatcaaggagcacccggagaccgaagtcaccgatctgcccggcatttactccatgtccccttactccaatgaggagatcgtgacccgtcagttcatcatcggggaaaagccgactggcatcatcaatatcgtggacgccacgaacatcgagcgcaacctgtacctgaccatgcagctgatggaactggagacccccatggtgctggctctgaacatgatggatgaggtgcgcggcaatggcggcaccatccgcatcaaccagatggaagccatgctgggcatcccggtggttcccatttccgccgccaaaaatgagggcgtcgatgagctggtggatcatgccatccatgtggcaaaatatcaggagcggccgggccggatggatttctgcggcgaagaagatcacggcggcgcggtgcatcgctgcatccatggcatcatccacctgatcgaggatcacgccaaagcggcggggattccggtacggttcgcagccaccaagctggtggagggcgatgcccgcattgagcaggcgctgaagctcgaccagaacgaaaaagaaatgatcgaacacatcatcgtgcagatggagcaggagcgcgggctggatcgtgctgccgccatcgcggatatgcggttccacttcattcaccggttggtcgatcagaccgtcgtgaagcctcaccagagcaaggagcagctccgcagcagcaggatcgaccagttcctgaccggaaaatatacggccatcccggcattcgtggggatcatggcgctggtgttttaccttaccttcggggtcatcggcgcggggctgcagggcttgctggagaccggcatcgatcgactgaccgtccttgtggacgacgccctgacgtattggaacgtcaacgaggtcgtgcactcgttggtcatcgacggcatcttcaccggtgtgggcagcgtgctgagctttttacctatcatcgtgaccctcttcttcttcctttctctgctggaagataccggctacatggcccgcgtggccttcgtaatggacaaactgctccggcgcatcggcctttcgggccgcagcatcgtgccgatgctcattggctttggctgcacggttccgggcgtcatggccagccgcaccctgccctcggagcgcgaccgcaagatgaccatcctgctcaccccgttcatgagctgctcggccaagctccccatctatagcttgtttgccgttaccttcttcccggaccacgcggcgctggtcatggtggggctgtacttcctcggcatcatcgtaggcatcctcgcggcgtttgcgctcaaggggaccctcttccggggcgaggctgtgccctttgtgatggagctgcccaactaccgcctccccggcctgaagaatgtctgccagctgctctgggaaaaggcgcgggatttcttggagcgtgccttcacggtgatctttatcgcgaccatcgtcatctggttcttgcagaacttcgatccgcagctcagcttgacggcggacccgcaggagagcattttggcgctggtggcaagctgcatcgcgcccctcttcgcgccgctgggcttcgcggactggcgggtgtccacggcgctgatcaccggcttcatggccaaggagagtgtggtttcgaccttgaccattctgtatggttcctcggctgcgctgggggcagcgctttccccggcggcagcggctcccctgctggtgttctgcttgctgtacaccccctgcattgcagcggtggcttccgtcaaacgggaactgggcagacgctgggccaccgttatggtcgtgaatcagtgcgttgtggcgtgggtcgcggccctgatcgtgcggctcatcgcacgggtggtcctctga

SEQ ID NO: 339 - DNA, 9821 bp, unidentified
  source 1..9821: mol_type = unassigned DNA
atggacgatttccagtttttgatctaccgttccgcggaagaaggcgctaccgtcaaagccgtgatcaaggatgacacgatctggctgaccatcagtcagatggctcttctttttgataaagaagagtccaacctgcgccgccacatcaagaatatttttgacgacggtgagctttccgctgagaacagcgtgcaaaaaatgcacgttgatggcgtcaagcagcccgtcgccttctacaacttggatgttatcatctccgtcggttaccgagtcaattcccgccgggctacacatttccgcatctgggccaccggcatcctcaaagagtacatgacgaaaggctttgtattggacgatgagcggttgaaacagggcaaggatgctttcggaaaggattacttccgtgaattattggagcgcgtccgctcgatccgcgccagcgaacgccgtatctggcagcaagtgacggatatttttgccgagtgctgcatcgactacgatcgcaattctccgaccacaaaagagttctacgccatggtacagaacaaattccattacgccatcaccggccagactgcagcggagatcgtctacagcaaagctgaccataccaaagaacatatggggctgtccacatggaaaaacgccccggaaggccgggtgctcaaatccgatgtttccattgcgaaaaactatctgtccgaaaagcagatccgtcaattggagcggaccgtttccggctacttcgattacattgaagacctgatcgagcgggagaacaccttcacgatggaacagtttgccgccagcatcaacgagttcctatccttccgacgctacgatatcctgccggacaaaggcaaaatctccgcccgtcaggccaaagaaaaagccgaagcggaatacgatttgttcaaccctacccaaaagatcgtatcggacttcgacaaagtcttaaagcagctggctccgtaatgcgggcagcgcacgcatctactcatgcgtcgcttttttctacagcaaaaccccacccccggcgcagaaggttccgcgccgggggtggggttcatcctatggttctattttcgctcatttgagcatgcagtacacataaccggcggccgtgccgatattggcgaggcccagcagagcgccgatgggcgaagagaagtagacaagggccgaatcccggatcagggtgccgttgagggtggtgccatcttccgggtactgctccggatatgtcttctggatctggccggcgatggcaccgatgctggaaatgttcaggtaacccagcacagtcgtgccaaggccgcacaccgttgccatcaggccggtgatcgagccgctgctgatggcgttcccgacggttttcacgatgcccactgttgccagcgcacccatgccgatattgaatgccgtccggatccagctgcctttgttttcgccttcggcatcgccgcctgtggtatacgtcatttcctccatggtgaggagtgcataattttcaggatatatcaaagtcatcattgttctacctccagaatgatacggtacgaaggtcgtcttttcttttattatagaggcagtggaaacttctgtcaagagacgaaacttttccgtacagacgcaaaagcaccgcacagcgatggttttcacatcgtgcgcggtgcttttcaccagaagttcacttcttctggtcttcttgttcttttcgcagcttcttgatccgctttttctcgctttccacatggggccacggccacgagaagccctcgttctcgcggcaccacttgaccagcggggagaaagagaacgccagcccgaacaggtacagcagaacgtacagcaccgcgtccagcgtgaacagtgcatccagcgcggcaatgactgccatgatgcagcccgctttcaggaagaacaggccgttctggcggcagtattcggcaaagttctccgccttgaccgcctgtcggccttggtcgccccagacacgggggttcttcatgaccgaatagccgtagaagaccatcatcaggccgcaggtcaattgaaatccgaaaaacatagcgcacctcgtccgtgtttagtcgtcgtactcctcaaacaggggcttcatcatgggcaggaagtccagcgttgcaaagtagtcgcgcggggtctcggcgcggcggatgagacggtgggagccgtcctcgcagagcaggacctcggcgctgcgcagcttgccgttgtagttataacccatggccgagccgtgagcgccggtgtcgtggatgtagatcaggtcaccgatgtcgatcttgggaagcatccggtcgatggcgaacttatcgttattctcgcacaggccgccgaccacgtcatacttgtggtcgcagggggcattctccttgcccagcacggtgatgtgatggtaagcgccgtacatggccgggcgcatcaggttggctgcgcaggcgtccagaccgatgtactccttatagatgtgcttctcgtggatggccgttgccaccagtgcgccgtaagggccggtggtgaagcggcccatctcggtgaagatggccacatcgtccatcccggcggggacgaggatctcctcaaacttcttgcggacgccctcgccgatggccatgatgtcgttttcggtctgctccgggcggtacgggatgccgacgccgccggacaggttgatgtaggagatgtgggcaccggtcgccttctggacccggacggccagttggaacaggatgcccgccagctccggataataggcatcggagatggtgttggaggcaaggaaggcgtggatgccaaagttcttggcaccctttgccatcagcttcttatagctgtcgatcatctgctcctcggtcatgccatacttggcgtcgccgggcttgtccatgacctgaaagccttcttcgctcgcacccagttggaacgttccgcccggattatagcggcagaagatgttctccggcacaccggccacacggtcgaggaagtccaccatggtggcgtcgtcgaggttgatgtaagcgcccagctcataggctttcttcatgtcctccacgggggtctggttggaggagaacatgatgtcgccgccggtaaagccgcagacttcgctgagcatcagctcggtcagagaggagcagtccacaccgcagccctcttccttcaagatctggagaatgatggggttgggcagcgccttgacggcaaaatactcccggaagcccttgttccagctgaaggccttattgatgcggcggacgttctcgcggatgcccttttcatcgtagacatggaacggggtaggaacatcctgaatgatctcctgcgcctgttcttcggtcagaaacggtttcttttccataatatacttccctctcattttatagcgtcaccgccgtgcggtgcgggttcaggtcttgaggttgctgcgggtgggggtgaaggtgggaatcatctccgccagctgcttcaccacgccctcgtcgttgtgttctgccgcagcggtcagcgtctgcaattggctgtagaattcggcaaggtcgatctggcgcggcggagccacaaagatcttgttgtgctcggtgcggcgcatcttgtcctgctcctcgtccatcatcagctcttcgtagagcttttcgccggggcggaggcccacgattttgatctccatgttcacgcccggctcatagccgtaaaagcggatcagctgcttagcaagatccatgatcttgaccggctcgcccatatcgaggacgtagatgctgccgctctcggccagcgcaccggcctgcagcacgagctgagccgcttccgggatggtcatgaagtagcgctcgatgttggggtcggtcagggtgacggggccgccctttttgatctgcgcctcaaacagcgggatgacgctaccgtggctgcccagcacgttgccgaagcggacagccacacacttcatgtcggtgttgcccgcgaaggtctggatcagcatttcgcagatgcgcttggtgcagcccatgacgctggtggggttgacggccttatcggtggagagctggacgaaccgctccaccccgtgctcgctggcactggtgagcaggttcttggtgccaagcacgttgttcttgaccgcctccgccgggctgacctccatcagcggcacatgcttgtgggctgctgcgtggaagaccacggtggggtgataggtctcgaacacttcatcgaggcgctttttgtcccggatggagccgatgagcaccgtgaccgggatatcccggccgtacttctgctgcagctccatcagcagctcgtaggcacagttctcgtagatatcgaagatgagcagtttgccgggctggaaccgcatgacctgacggcagagctcgctgccgatggacccgccgccgcctgtgacgaggacggtcttaccggtcaggtagccggagatcttctcgatgtccagcgtgacctcctcacgggagaggaagtcggcggtgttcagttcgcggaatgcctcctgctgcggtgcgccggccccgaccagctgcgggtcgctcaagatctggaccgcgcagtgggtggagacacagaggtcgatgacatggttcagcttgctgccccccagcgtcgggatggcgatgatgatgctgtggatgttgtacttttcgcagatctgcgggatctgctccagcgtaccccgcaccggcacgccgtggatggtctggccgaacttggcgggattatcgtccacggcaacaacggggtggccgtagctttcgttggacttgcagacgttgatggcccacgcaccggcttcgcccgcgccgacgatcagcaccgggcggttggggtccttggcagggacgccgcgcatccgctcgccgatgggatggttcaggaagagccgccacgccagacggctcccgcccaccagcaaaaagataagcaccgctgccatcgcgttggcggagtcgaacagcacgccgtggatgaggccgtggttcacgaaatagacgatgccggtgggcacggcgatcatgccgccgaggcggatgagatcccgctcgcccgcgtacttccacaaggtcgagtacagcccgcccaccagaaagctgatgaggtaaagggccacgatccacggcagattatcatagagcagcgcccggttatggggccaccacgccgcttccaccgcaccatcggcacggagcagcagcgcaaagtaaaagctgaacaggatgagcgccgcatccagcaccaccagaatcgcccggcgcagccagacctgcggcgtgatttttttgatatccttcacaaaaagtcctctttgccttcggcgtcttgtccggcgccggtttattcgccacagcggcagaaaagagcctgttccgccatggtatccattgtattatactcgtttcccgccgctgtgtccagaagatttcatctttcgggcggatttccccgctttttccgcaccgaggatggcccgcacttcctccccaaggcccagcggccacgccgccgcagccccgacgagccccatcccgccgccgcccgcagccagcgcggcgagacggagcggcagctctccggcagaccacgctgccagcatttcccggaaaaccatccctgcccctgccgagacggctgccgccagcaccggagcccccagccagcgccacaccgccgggcgcaccccgctgacgcgcagcagccgcccggtgttcgccagacaggtataaacgctggacagcagaatgacgaagagaaagccccgcatcccgaagcggggcagcagcagcatgacccccgcaatgcggagcacagcgtcccacaggctgtagcggaagacggccttctgctctcccatccccttcattgcgccgtccaccatgctttcaaggtacatcagcggcatggccgggccgaggactgtcagataaaagcccgcctcggccccgttttctccgtacagaaggtctgccagcgggccgccccacacccagaacaccgcccccgccagcgcagagaagtaacccgtcagccgcagcatccggtccagcaaagccgaaagccgctttttctcgccccggatgtgggcttgggtgatctccggcatcagcagaacggataagctccccagcagcccgaagggaaaggtcagcagcggcagggccatacctttcaaattgccgtattgggccacggcggcgctgcggcccccggcggccagcagatataccgtcaggcacgcgggcaccagcatgttttcggcggtatggagcgcgctggcaaggcagcgcccgccctccaccggccacaggatctcccacagccgcttcgccgggtccgccgggcgtcgggcagggcccgcaccgaatgcggacaccgcctcctgccggtaaaacagggccatcatcccgcaggagacggcttcactcagggccgttgccgcgaggacggcggtgcatttgccgcccacgtccagcgccgcgccccggctcagggcgaaccagatggccccgatccggaccgtctgctcggccagttggctcaccacgttgggcgacacccgccgcctcgcaataaaaaagccgcgcagcaccgccgagactgccatccacggcatcccgaaggccgatacccgcagcgccccagtggcccggacatcccccagccaccattttgcggccaagcccgccagcccgaactgagcggccagcgctgcactgcccagcagcagcgccgcccccagcagacgcaccagcatcccccgcgcttcggcccggctgcggctcagctcctcggccatcaggcgggtggccgccaccgaaacgccggacgtcgccagcgtgacaaagagcgaatacaccgccagcaccaactggtacaggcccatcccctcgccgcccaaggcgttggccagccagatgcgcaaacccatccccgccagccggagcacgatgtccgcccccgtgagcaaggccgcgtttttcaggtagctctgccgcattgccgcacctcccccatcttcgcttttactatatgaaggcggctttgcaaaatatgagttgggccgtgggttgtttctttcctagttttatgatatgataggagccggtcaagactttttgtccaaacatcaacgaaggaggaaaggccgctgcccctgtccggcccggccttatgagagtatgagcgaagaatgtacccatgactgctccaactgcggcgcagcatgttcttcccgcgatgctgccccgcagcatgacgcccccaaccccaacagcagtgtcaagaaagtgatcggcgtcgtgtccggcaagggcggcgtcggcaagagcatgaccagcgccctgctggcctgtgctatggcccgccgcggctaccactgcggcattctggacgccgacatcaccggcccgtccatcccgaagctgttcggcatccatggccgggccatggccgacgagaagggctgctggcccatccagagccggatgggcatcgacgtgatgagcatcaacctgctggtggagaacgaagaggaccccgtcgtctggcgcggcccggtcatcgccggtgcggtgaagcagttctggaccgatgtggtctggaaggacgtcgatttcctgttcgtggacatgcctccgggaaccggcgatgtgcccctgaccgtcttccagagtctgcccgtggacggcatcgtggtcgtggcaagcccgcaggaactggtcagcatgatcgtggccaaggccgtgaatatggccgagatgatgaaggtgcccatgctcggcatcgtcgagaacatgagctatgtcgtctgccctgactgcggcaagcacatcaacgtcttcggcgacagccatgtggacgaggtcgccgccaagcaccacctgcccgtgctggccaagtgccccatcgacccccagttggcctccctgtccgacgccggtctgatcgagacctatcccggtcagtatctggaaggtgctgccgacgcctgtgagaagctgctgaagaagtaaagcaatcgatccttcccctgtctgtgttcctcttgagcacgcaggggatttttttatttgctttccgctcatttcatgatgcaatgatgcgctcctgttgggctcctatgcccccggtgaagcattatcgcaagtcaagaaattagcgcaacattcaaacagcatatttgcgatatgcaattcaacgttgttgctgttgcattaaaaagttgaattgctatagaaagcaagatgttacgcagtttttcgggagagcaaactgtttttgtgaagtaggttcatcttttcttctgtttttttgaaagattttctggttccgctctcttgtaaatccgtacagaaagctttataatggtaaagcgttctgtgatattgggacagaacgggtgaaagtataaatgggaaaaggagtattcgattatgttgacgaatgaatacctgaaacgtgtttatgatggtctggctcagcgcaatgcaaacgagcccgaattcctgcaggctgtccgcgaggttctggagagcatccagcccgtcgtggagaagcaccccgaatacgaaaaagctgccctgatcgagcgtctggtcgagccggagcgcatcatcaccttccgtgtgccttgggtcgatgatgcaggcaaggttcaggtcaaccgcggctaccgtatccagttcaacagcgccatcggcccctacaagggcggtctgcgcttccacccctctgtcaatcagggcatcctgaagttcctcggctttgagcagaccttcaagaacagcctgaccaccctgcccatgggcggcggcaagggcggctctgacttcgacccccacggcaagagcgacatggaagtcatgcgcttctgccagagcttcatgaccgagctgtaccgccacatcggtcagttcgtggactgccccgccggtgatatcggtgtcggcggccgcgaggtcggttacctgttcggccagtacaagcgcctgaccaacagcttccaaggcggtatgatcaccggcaagggcctgaccttcggcggttctttggctcgtaccgaggctaccggctacggcctgtgttacttcaccgctgaggctctgaagtgtatgcgcaacgacagcttcgtcggcaagaccgtggtcatctccggttccggcaacgtcgccatctacgcttgcgaaaaggcaacccagctgggcggcaaggtcgtcaccatgtccgactccaatggctatgtctacgatcccaacggcatcgatctggcttacgtcaaggatctgaaggaagtccgccgcggccgcatcaaggagtatgccgagacccacgagggtgcgacctatgttgccgattgcagcaaggtctggactgtcccctgcgacattgccctgccctgcgcgacccagaacgagatcaacaaggagtccgctgaggctctggtcaagaatggctgcaccgtcgtctgcgagggcgctaacatgcccagcaccccggaggccatcgaggtctacctgtccaacggcgtcctgtacggacccgcaaaggcagccaacgccggtggtgtcgcaacctccggtctggagatgagccagaactccgagcgtctgagctggacctttgaagaggtcgatgcaaagctgaagggcatcatggagggcatcttccacgcttcctatgacgcttccgttgctgccggttccgagggcaacctgatggtcggtgcaaactgcgccggcttcttgaaggtcgctaccgccatgatggcacagggcatcacctactaa

SEQ ID NO: 340 - DNA, 6697 bp, unidentified
  source 1..6697: mol_type = unassigned DNA
ctattttttctccagccccggccactcctggtctttctctgaaagtgtcagcaacgttccatccgtcatgcaatacccttccgccgatggggttccctgatactccccctgcacatccggccactggataccgattgccgggtcattccatgccaggccgccctcgtcgttcggatgccagaagtcattgactttatagcagaactctgcctcatcggacaggaccagaaagccatgcgcaaagccttccggaatcaaaaactgctttttgttttcctcggaaagttccactccgtaccattttccgtaggttgcggagccttcgcgaagatccactgccacatcaaatacgcttccgcgcacggcacggacaagtttgcactgcggatagttgatttgaaaatgcagtccgcgaagtacacccttgacggacatggactggttatcctgtacaaactggatatcgaatccggcttctttcatttccctctcattgtatgtctccatgaaatatccgcgggcatccccatgtacggccggtgtaatcacacacagcccttcgataccgccgacatttttttccactgttatctgtcccactgttttttcctctttcatgctgatttgtatctattcagaaccccctcagaatagttacgctgtttttaatatttcaccctgccctctgcgactgctttcaaatgctctccatacggactctttccgtagcgtgcggccgagtccatcagtttttcctttgtgatccaatgattgatatatgcaatttcttccggcgcggaaatggtcacaccctgacggtgctcgatcatctgcacaaatgccgccgcatccagaaggctgtccatcgttccggtgtccagccatgcaaacccacgtccgagcagctgcacatttaagtttttctgctgcagatacaggtcatttaaggtggtgatctccagttcgccgcgggcggatggctgtacctgttttgccattttgctcacgcctgccggatagaaatacagtccggtcacggcatagttgctctttggctgtgccggtttttcttcgatggatacggcttttccgttctcatcgaaatccacgacaccgaaacgctccggatcgttgacataatagccaaagacggttgcctgtccttcctgtgcatcctttgcggcatttcgcagaatttttccgaatccgtttccgtagaaaatgttgtctccgagcaccatggcacaggcatcctctccgataaattcctctccaagcaaaaatgcctgtgcgagtccatccggagacggctgcactttgtaggacagatgaagcccgaactgatttccatcccccaaaagtgcttcaaatctcggggtatcttccggcgtggaaataactaaaatatcgcggatgcctgccagcatcagtgtagacagcggataataaatcatcggtttgtcatataccggaagcaattgtttactggttaccatcgtcagcggatacagccgtgtccctgcgccgcctgccaatataattcccttcatcttaaagttccccctgtctctttaattcctgcagataccgccccagtgcgtcctgccaggttggaagcggtgtaaatccattttctttcagtttctttttttccagtctgctgttaaacggacgcgctgcctttgacagaccgtattccgcggttgtcacgggctgcacttcggtagaaatccctgcctgccggtaaatttcttttgtgaaatcgtaccaggatatgtaaccaccctcgtttgttacgtggtaataaccatatttttcggtttccatcatgtcaacaagcagtcttgccagatcgtaagtataggtcggtgtgccgatctggtcatttaccacgcgcacctgcgggtgattttttgccacttttaacatggtcttaataaaattttttccgtttaatccaaacacccatgcgatacgcacgatgaaatacttcccgagtgtctgtgctactgccagttccccgccaagtttcgtctgtccgtatacgttaagcggtgcgtatgctttgcagtccggctcccacggagtctcgccctgtccgtcaaacacatagtctgtgctgatatagaccattttggcatctgcttttttcgctgcgtccgcaatatgtttcgttccatctacgttgatggctctgacttttgcctgattttcttcgtcctctgctgcatccacagcggtccatgccgcacagtgcacgatggcatccggctgtacttgcatgattgtctgttccactgctgccgcatcggtgatgtccagcggcacatacgatgcacaggattccagtgtcggtgcaatatccgaaccgactgcctgatgtccgcgctttgtcagttcgtttaccacgtcatgtcccagctgtccggcaacgcctgtcacgaatactttcatatttatatgcctttctttatatcccttttttcccatacatttctttatagtaattttgatactctccgtttacgatgttctcccaccattccttattgtccagataccattggatggtcatgcggataccatctttaaacatcgtctccggcagccagcccagctcgttgtgaatcttggtcggatcgatggcatagcgcatgtcatgtcccttgcgatcctgtacgtgctcgatcaggctctccggcttgccgagatattcacagatgagttttacgatatcaatatttttcatctcattgtgtccgccgatgttgtagacttctccgacggttccgttgcgcaggatcaggtcaatcgccttacagtgatcctcgacatacagccagtcgcgcacattgagtccctctccgtataccggaagcggcttatctgccagcgcatttgcaatcataagcggaatgagtttttccgggaactggtatgggccgtagttgttggaacagcggctgatcgtcaccggcaggccgtacgttctgtgatatgccataacaagcagatccgcagatgccttggaagtgctgtaaggactggaggtgtggatcggtgtatcctcatggaagaacagatccggacggtccagtggcagatctccgtatacctcatccgtggatacctgatgataccgtgaaataccatacttcctgcatgcgtccatcagcacggaagtaccgataatattggtctgcaaaaagacttccggattctcaatggagcggtccacatgggactccgctgcaaaattgacgatcacatccggtttttcttcctcaaaaagggtatatactcccggacggtcgcagatatcgagttttacgaaacgaaaattcggctgatccatcaccggtgcaagcgtggacagattgcccgcataggtcagggaatccagacaaacaatgcgatcctgcggatgttcctttaacatatagaaaataaagttgctgccgatgaaaccggcaccgcccgttacaataatggtcatgagcatttcctcctgtgtgcatttacgatttctatatttatttccattataaaaggtgacgctaggtcaccttcaagtcttttttatagatttttctaattattttctgcacaggaagattccggcatcttttgtgatatgaaatccatctgccacgcgggcagaaacaaattcccggaactctttgtactggttcaaaagcagctggttctgatttccgtgacaggaaagaatataggaaatcagcggttctgcttccgctatttcaatcgcatcctcgtatcttcgcatctgaatttccgaaaaatacggtgctaacaggttttctccgttttcaagcccgaaccgctcatacagcacctccgctgacaaaacgatttctttatggaactgctgcaccagatcggtaatttcccgcatatgctgctttccgtaggtactgcatagaaaccgtcccccattttttaagactctccgacattctgcaagcacctgtgggatatcttcacagtaaaacagcacatgatccgcgatcacaagatcaaacatttcctcctcgtaaggaatttttccgcagtcaaattttttataggaaaaacggctgtcctctcccagtgcacgccgggcatcctttagcattccttctgatttgtccgagagaacgacccatagatccgcaggcagctgttctctgttttcagtccataatgctccatttccacagccgagctccagaatccgcatccccggctgcagattacactgctgcataatccacggaaaccacccctgcggattgacggaatactccctgtgcaggcgaatccgggcggaaatatttgccgcattctggtactggtttttcaggcttcgttctactgccgtcaaatggatcagatccagcatactgttccagtcaatcgcctgttccgtctggctggcttctatggtgcggtcaattgcctcatccatcgcctgcatttcgtccattttctgccgcagcagcttcttctgtatccgcatggattcaagaagatactgctgatctgccgcagcaagtgtcatctcccggatatcttccagcgaaaatcccagatattttaataaaaggatctgctggagttttgccagatctgcatccgtatacagccgcgctcctgcggcagtccgtgcacttggttttaaaatattctgtttatcataataccgaatcgcgcgaagtgtcacatgtgctttttttgcaaattgtccggatgtgtaatacgcatcctttttcatctacagttctttcacctcatcccgcatttcttctgtcatattctgtacataggtcgtctgggaagtaatttcttccgtgtttgcggcaatcgttgacaccttctgcgtcatggtattcatgctttctaccagatctttgatcgaatccatgctctgtgtaatctttggaagaattgcctcggctttctggtcgttctgtgtcagaagatccttcgtggaatcagacagtgtacggatttcctccgctaccaccgcaaagcctcttccgttctcaccggcacgcgccgcctcaatggaggcattgagtgaaagcagatttgtctgtcctgcaatggcagaaatatcttcattgctctttttatatacactgatgaaatccgacataatgcggatggattcattcagttcatcgcacaggcgggaaatatcctgaatatactgcgcaagattagtcgcttcatttgcagactcctcatttgccgtattcaattctgcaatgttatcactcagggtaataaaccggtctgtgatatctgtaatcttctgctggcggatttcctgttccgtccgctcctgattacgaagttctgcaatcttttttgtctcttcctctgccatgccccgcacatagtgcacacagttttcttttacgttgactccattgtggatggcacgtaccatgttggtgcagcttgaatatccacaggattcgcagtccctgtgctgttcctcataggtatcttttttcatttctgcaaacaggcggttcttctcctgttcggacggttcctcaatatgtactgcgcgattggtgtagctgcgcataaaatcgttgatgtccagctttccaaaagcgtccatgaagtttttcagacgttcctccggtgtcagtgtatctgcccacggactcctgcttttgctcttcctgccaaagtgtgccttctcctgttttgcactggttttgctgttccgcagttttgcgattgtcagcatgacatcatccgttccccgtttcggatctgtggcagttccgtagagacagcccttcgcacagtttaaaatgtctaccataaatggaagttctttgttctgctgaatgcgctgtgcataggaacgcagatattcataggcctcatgctcgccctctacctgacgcactacctgctctttcccaagaaaatgttctacattctcccgcagtccaccaggcatcggatacaaagaacccagtccgtattccagttcatcggtatatggttcacatccttcataatcgtttccgatatacttcatcatcttttcaaaagttacattataagaaacatatccgccgcaattgggatcggtaatctctaattttttggcaatacacggactgataaaagcgatttcatctgtgacctgcatgtattttttcatataaatagcagtacacatcatcggactgtgtaccggcatcagacgcggaatcagctccggtatatatttttccacataggtgactactgccggacacggctgggaaatgcccccgaaaaatttgtgttccataatgtatttcagatatccccaggttgtgatatccgcaccgaacgatacactgcagatatggttgactcccttactctttaaatagcccagcacacgctggtattctttgggataatttgccagaaatgccggtgccagtatcacggaaattttctttcccgatgcaaggtcttcaaagaagcggtccgtatcatcataatagtctctcgcttcatgtgggcagacatcaaagcattccccacatgcaatacatttgtccgggtctaccgttacataaccttcctgcgttgcaatatttgccgtaagtacaggacagccccgcacgcatttgttgcatccggtgcataaatcatttgtgtaaatcagttccat

SEQ ID NO: 341 - DNA, 8750 bp, unidentified
  source 1..8750: mol_type = unassigned DNA
atgaaagttgtaattcttgccggtggctatggcacgcgcatttcggaagaaagtaagttcaagccgaaaccgatgatcgaaatcggcggtatgcccattttgtggcatatcatgaaagagtattcttactatggcttcaatgattttgtgatctgcgccgggtataagcagcatatgatcaaggaatggtttgcggattatttcctgcataccagcgatgtgacctttgatttcacccagggcaacaagatgatcgtgcatgaccagcacgccgagccgtggcgcgtgacggtggtggataccggcctgaacacgatgacgggcggccgcatcaagcgggtgcagaaatatatcggcaacgaaacctttatgatgacctatggtgatggcgtctgcgatgtgaacattgccgaactggtcaagttccataagcagcatggcaagctggcaaccctgaccgccgtggtgcaggaacagcagaaaggcgtgctggatatcggccaggacaattcggttcaggcgttccgtgaaaagagcgtcaacgatggggctatcatcaacgcgggctatatggtgctggaaccggaagtgtttgataccatcagcggtgatgataccatttttgagcaggccccgctgcgcgagctggcagccaaaggccagctgatgagctatgtgcaccgcggattctggcagtgcatggataccgagcgcgaaaaaagtatgctggaaaaaatgtgggcgtccggctgtgcgccctgggaagtgtggaaccaacaatgaacttggaattttatcgcggcaaacgcgtgtttgtaaccgggcataccggttttaagggcagctggctctgccgcatgctggtgggggtcggtgcggtggtaacgggttacagcctggaaccgcccacaacccccaacctcttctctctggcagggctggaaggcaaaatgaccagcgtgatcggcgacatccgcgattttgccagcctgaaagcggcctttgatgccgcccagccggaaattgtgctgcacctggcggctcagcccattgtgcgggacagctacaaggacccgcgctatacctatgaaaccaatgtgatgggcaccgtgaacctgttggaatgtgtgcgtaccgcccaaaccccaccgcgctctgtgctgaacgtgacgacagataaggtgtaccagaataatgaatggtgctggggctaccgcgaaaacgaaccgttggacggcttcgacccctactccaacagcaaaagctgctcggagctggtgacccacagctataaaaacagcttttttgcggatggcagcgtggccatctccactgcccgcgcaggtaatgtgattggcggcggcgattttgccaatgaccgcatcatcccggactgcgtgcgtgccatggcaaaaggggagagcatcggtgtgcgcaacccgtattccacccgcccataccagcatgtgctggaaccgctggcggcgtacctgctgatcgcccagcgccagtatgaggataaccggtacgccggctattataatgtcggcccggatgactgcgactgtgtgacgaccggcaccctggtagacctgttctgccaggcgtggggcgatggtgctgcatgggaaaaccgcgctgaggcaaacgccccgcatgaagcaaactttttgaagctggattgcagcaaattgaaatccaccttcggctggaaaccgcgctggcatatggcggaatgtatgcaaaagaccgttgcgttcagcaaggtatggctttccggcggggatatcccggcggagatggacaaagagatcaaggaatttttgagtgagtaagggagcagacgatggcaaattggagcaatgaggccgaagcccgcgagcagatcaaggcgctggtggcagaatattaccatgactttaaggagaaaaagacggatttcaagcccggcgaccgcgttacttatgcatcccgcgtgtttgatgaaaaagaaatgtgcgccctgaccgatgcaacgctggatttctggctgaccaccggccgctttgcggatgaatttgaaaaagagtttgccaagtggatcggcgtaaagttcgccaacttggtcaactccggctcctccgccaacctgattgcctttatggcgctcaccgccccggaactgggcgaccgccagatcaaaaagggcgatgagatcatcactgtggcatgcgggttccccaccactgtcaccccggcgctgcagtatggcgctgtgccggtgtttgtggatgtgaccgtgccgcagtacaacattgatgtgaccaagctggaagccgctctttcccccaagaccaaggcagtcatgatcgcccataccctgggcaacccgtttgacctgtccgccgtcaaagccttctgcgatgcccataacctctggctggtggaggataactgcgatgccctgggcacccagtacaccatcaacggcgaaacccgctttaccggaacctggggtgatatcggcacctccagcttctacccgccgcaccacatgacgatgggcgagggcggctgcgtgtatacaaacagcccgctgctgaaccgcctgatcaagagctaccgcgactggggccgcgactgcatctgcccgtccggccatgataacttctgcggccaccgctttgacggtcagtatggcgaactgcccgcaggctatgaccataagtacgtttacagccactttggctataacctgaaagtgaccgatatgcaggccgccatcggctgcgaacagctgaaaaagttccccagctttatcgagcgccgccgccataactgggaccgcctgcgcgcagccctggaaccggccgctgataagctgatcctgccggaaccggccgccaacagccgcccgtcctggtttggcttcctgatttcggtcaagccggaatccggcctggaccgcaacgccgtgacccgctatattgaggaccacaatgtccagacccgcctgttgttcagcggcaacctgatcaagcacccttgctttgaccagatccgcggcaccgacgcctaccgcgtggcaggggagctgaccaacactgactttatcatgaacaacaccttctgggtcggcgtgtaccccggcatgaccgatgagatgatcgactatatggcgaagatcattattgaagcggtgaaccagtaaaaagcgctgataagatgaatcaataagaaaaagcaaagccgtgctgataagaaaaaatggctgctgcactgcggtaaattatcaatacaggctttgctttttgattgcttataaagaataataaaggaacgggatccatgcagaaattgttggcactgttgggagcaaaaagcaaaaaggaatttgttgcgctgcttgcacagtttatcaagtttggccttgttggcgtaagcaacacggcggtatcgatggcggtgtattatatctttttgtggatcagcccggacctgtatatggtaggcagcgttctgggaacaattctgagcattgccaatgcctttttttggaacgataagtttgtgtttaccgggaatgcaaacgattggcgcagtaaactgaaacgccttggaaaaacatatgtcagctacggcggtacgtcgatcctttctaatgttttgctttggatagaggttacgttcttcagcgtaagcaaaacgatcgcgccgattgtaaatttgctggtcacgattccgctgaattttatcatcaacaagttgtggacatttaaggaaagataaacgacaaaatgtttcctgtcaacgatgtggagcttatccggcacggaaaagtgcggtatcgggatccctaaccatcatccgactcaacaaggttggttggcggtgctttattgttgaaaataagactgcaaaatatatcggtaaaaaatatgggaaaccagggaatatctgatacataaccgggaacagaaatagggcaaggctgtgtatggacaacatgacaacaaataacgagaataaatctggtatcagcattggattagatcagctgttgccggaagataacaaatcggtgcatctgggactgaattatggccagaatgaatgcaacagccagcgcgtgctgaaagagaataacacgaaacggggaaaaggcctttttggtaaaaaaggaagtgggagcaatccgttctggaaaaaaacggccaagctgtactgtgtactcagcgcagtgtgtgccattgtggttatggtaacgctgtatgttacccatggtgattttctttcgtactttttataccatgatacactggatgccggcatggattttttccatagcattgaatatgttcgtggacgccagccgtatgcggtgtttgacacactgtatccgcccttggcaaatttgttcttttatgccctgtttttactggtgcctgcttcggtatctgataactggacctatgactttgaggcgtcagttgccatgcgcggcacagaaactgatttacgcacaacacagtcgtgctttttgctatacgtcttttttgtggtgctggcggttcttttgctggcggttttgctccgtgacgtgatgcaaaatgcccagtgggccagggccagtacgttttttgccttgttcagctttggtgtgcttaatgcggtagaccgcggcaatattattttgctggcggcggggctttcgctttttttcgtcatgtatcaccgttcaaagcgcgcatgggtgcgggaactggcattggttgcactggcagtagcagccggacttaaaatttatcccgcattcttaggtgttatgcttttaagaaaccgggatttcaaagcagcaatccgcacggtgttttatggcattgcagcgttggtgctcccggtgtttgccttccaggagggcgtgtacggcttgcagctttggctgaagattttgttctcttttggaagtaaaagtaaaacaccttgggcaggcaatggcatcaacagcatgttcgcacatggggcgcatctggtggacctgattgccggaaccagcaatgcaacggtatctttttttgcagcagcctttgctgtggcggcggtactggttgtgtgtgctctgctctgccgccaagaatggcaggcgttactgctgattaccgtggctatgatgtaccaaagccagggcaactatatttactgcatggcgctgattccgctggcgtattttcttgcacaggaaaaggtgatgacacgtcaaaatatattgccttttgtggttttgatggtatttaatctgccgcttccaatctttgaagagcgtaactcttatattcgcaacaccattgtacagttggcaatactgacagctatcatctggggcgttgtacaggcagtaaattgtgtgttggcagcgctgaaaaccaaaaagcctgaacaatcaaaactagataaaaaagctgcacgcagcacgctggttactttcggcgcttcactgggtgcattggcagtttcccttgccgttttctatggcgtgtgggtgctgtataatgcgccgtctattaccatgcagctgggggatggcatttataacacagaatattatactcctgaaaactccaacaaagagctgccgttttactggtgcaagaaaagtgcggagatcaaactggtaaacccgcagctgaatacggaaaggtacacctttacctttacagtgggggattatttctttgatatttctgaccgccccagcattaccattaccttcggtgacagtagccagacctttgtggtcagccaggaaaacatgaaaatccgctataccgtggatgttccttttggtgaaagtacaatcgatattagctacagcggcaagcgggtcgatgccccgcaggattccagaactttgtattttgtaatggttcagccgcagcttgaacggattaaataaaaggaggacactctcaatgaaacagcgtctggccgattatgtggccgattttcttgcggcgcacggtgttacggatgtgttcagcgtggtgggcggcggcgccatgcatctgaatgatgcactgggccaccacccggcgctgcatgttacctataaccatcacgagcaggcaagcgccattgcggcggaagcatatgcccgtattgataacaaaattgccgccctgtgcgttactaccggccccggcggcaccaacgccctgaccggtgtggtgggcggctggctggattctatccctatgttcgtgatctccggccaggttcggtacgataccacggcccgctatgccgcgcagtttaccgatggcctgcccctgcgcgcggtgggcgaccaggaatacgatatcaccaaatctgttgcccccatgaccaaatacgccaccatgctggaagacccgaaccagatccgttatgtgctggaaaaagcctggcacctggcagccaccggccgccccggcccggtgtggatcgatatcccggtcaactatcagggcggctacattgaaaccgacagcctgcccggctatgacccggcgcaggacgatgcccggctgccgcccccggtggacgatgccaccgtgcagatggtgctggaaaagatccgcaacgccaagcgcccggtgttccacgccggatacggcatccggctttccggcgggtacgcagcgttccgcgccgtggcggaaaagctgaacatccccattgtgacctactggaacgccgtggacctgatcgaggacgaaaacccgctttactgcggtcgtgccggcaatatgggcgaccgccctggcaactgggccatccagaacgcagacctgattctggctgtgggcacccgcatttccatccgccaggtgggctataactggaaaacctgggcccgcgcggcggaagtcatcatggtggatattgaccgcgccgagatgaaaaagcacaccctgcatgtggagcaccccgtgtgggcggatgccaaggactttctgcaaaagctggatgccgccgcagcgccgctgacccctgtcagccaggcagcggactggctggcaacctgccagcgatggaaaaaagattaccccgccgtgctgccgcgccagtgggaagaaaacggcaccaccgccaatgtgtacgcctttgtgcgctacctcagttcccgcctgccggaaaacagcctgaccgcagtttccaacggcgcctgctgcgtggtgggcaatcaggcgtatgtcatccaaaaaggcagccgcatggccaacaacagcgccattgccagcatgggttacggcctgcccgccgccattggcacttgcattgcaggcggccgccgtaccaccatctgcctggaaggcgatggctctatcatgatgaacctgcaggaattgcagaccatcctgacaaataagctgccgatcaagattttcctcatcaacaataacggctaccactccatccgcctgacccagaacaacctgttcaaagaccattgcaagatcggcattgggccggagagcggggatctgtccttcccggagttccgcaaaattgccgaagcgttcggctacccgtattcctgcgcacattccaacgctgagatgaaacaggtggtggatgccgcccttgccgcagaaggcccgactttctgcgagatctttaccgatacccagcaggtctgggagccgaagagcgccaccaagcgcctgccggacggcacactggtcagcccgccgctggaggacctggcaccgttcctgccgcgggaagagctggaaaagcagatgtttatccccctggtgccggagcagtgaatgatgatagaacgtaacattaaaaccgtaatcgtaaccggccccaccggagccgtgggcacagcattgtgcagccggctgctgcaggccgggtgtaccgtggtggcggtctgccgccccggcagcccgcgagccgtagcgctgcccaaggatgcaaacctgtatgtagttgcctgcgatgccgccaacctgacggatttgccgcagtgcatggccgcagccgggctgcccgtgcaggcggatgcctttttccacctggcgtgggcgcacaccattggcgcgggccgcaatgatatgccggctcagattgagaatatccgctataccattgatgccgtgcgcaccgcggcggcaatgggctgccgtgtgtttgttggtaccggcagccaggcagagtatggccgtgtggacggtgttctgcgggccgatacccccacaaaccccgaaaacgggtacggcatggccaagctgtgtgcaggccagatgagccgtaccgaggccgccgccctgggcatggaccatgtgtgggcgcgtatcctttcggtttacggcccgcatgacggccccaacacgatgatctccgccaccatccaaaaactgttggccgggcagtgcccggacctgacggcaggggagcagaagtgggattatctttactccgccgatgctgcggatgcactgtaccgcatggcctgccatggccgcagcggtgccgtgtacccggtgggcagtggcaccgcccgccccctgcgggaatatattgagaccctgcgtgatgccatcgacctggccctgccgcttggcctgggcaaaatcccttacgggccgcagcaggtcatgtttttgcaggcggatatcacccagcttgcggcggataccggctttgcgccgcgcaccgcctttgccgatggcatccgcgccaccattgcgtgggcaaaaacgcaaaagcaaaccaattaa

SEQ ID NO: 342 - DNA, 15071 bp, unidentified
  source 1..15071: mol_type = unassigned DNA
atgttagaaataactaatgcggtaaaagtatttgctccttcgacacctaatgaaatgaaagcgcttaacggacttaaccttaagcttgaagacggcgaatttgtaaccatcataggctcaaacggagcaggtaaatctacactttttaatgctatatgcggtaatttctggctggattgcggcatgattttactggatggcgaaaatattacctttaaatccgaacataaaagggcaaaagttatcggaagaatttttcaggaccctatgaaaggaacagcacctaatcttaccatagaagaaaaccttgctcttgcatattcaagaagcaagcatgcaggacttagaagtgccgttaccaaaaaggaaagaaaaatgtttaaggaagcccttgccggattttccatgggacttgaagaaagaatggatacaaaagtaggccttttatcaggaggccagagacaggttgttactcttttgatggcaacccttgttccaccgaaacttcttctgcttgatgaacatacggctgcacttgatccggctacggcggacaaggttatggatattacaaaaagaattatttctgaaaataatctgactacgttaatgattacccataacgtgacacaggcacttgaaacaggaaccaggacgattatgcttgacagaggaaatatcatatttgacatttcggaaaatgaaagaaaaaatatgacggtagatgaccttatggatatgtattccgcaaagaaaaaagaaaaatttgctacggacagcattgttttttcatagattttaccggtaaaaatcacaccatccggacaatacttccgggtggtgttttactatgtttataattgacatttatatgacctcatgatattattattcaggaaatcaactttctattattataaataaacattgttaaaaaagtaacaatgttgacaggagagcttatgaaagcagtgtatccagggagttttgatccaatcacctatggacatcttgatatcataacaagagcatcaagaattgtggacgaactcgttgtgggaatattggttaataataccaaaagaccgatgtttacaatggatgagcgtcttgagatgttacgagagactgttaaggatttacataatgtcgaggtgaaaacttttgaaggtatgacaattgattttgcgagacagaatggagcaaaagtaatcatcagaggattaagagttatttctgattatgagactgagatgcagattgcccagactaacagaagtcttgatccggagattgagacactgttcctatctaccggtcttgaatattctttccttagttccacaattgctaaggaagtagcattttacaatgccggagttgagaaactggtaccaccaattgttgcccgtaaatttaaagaaaaatataaaaagtaaatattcaaggaggatttttctaatggctaagaaaatcgttttagcaggcgcatgccgtactgcaatcggaactatgggaggagctttaagcacagttcctgctgtagatttaggagcaatcgtaatcaaagaagctcttaacagagcaggagtacctgctgacaaagtagatcatgtatatatgggatgcgttatccaggcaggtcttggacagaatgttgcacgtcaggcaacaatcaaggcaggacttccaattgagacaacagccgtaacagtcaatgttgtatgcggttcaggacttaactgcgttaatatggcagcacagatgattgaagccggagatgctgatatcgttgtagcaggtggtatggaaagcatgtcaagagcaccatatgcacttccaaatgcaagattcggttacagaatgaacaacggaactcttgttgatacaatggttaatgatgctctttgggatgcattcaacaactaccatatgattaagactgctgataatatttgtgaacagtggggccttacaagagaagaaattgaccagtttgcagtaaacagccaggctaaggcaactaaggctcaggaagaaggaagatttaaagatgaaatcgttcctgtagaagttaaggttaaaaagaatacagttattgttgatacagatgagggaccacgtcctggaacaacaatggaaggtcttgcaaaacttcgtacaatcaatccggacggatttgttacagcaggtaatgcatcaggaatcaatgacggtgcagcagcaatcgttgttatgtcagaagaaaaagctaaagaactcggtgttaaaccaatggcaacatgggtagccggagcactcggcggagtagatccatcaatcatgggtatcggacctgttgcatcaacaaagaaggtacttgctaagaccggtttaacaattgatgatatggacttaattgaagctaacgaagcttttgcggcacagtcagtagctgtagctaaagaacttaacttcaatatggataaagttaatgtaaacggtggtgcaatcgcactcggacatccggttggagcatcaggatgccgtatccttgtaacattacttcatgaaatggctaagagagatgccaagagaggtcttgctacactttgtatcggcggtggaatgggctgctcaacagttgtagaacgtgactaattaaataataactgccatcccctgacagggatgacagttattgttgtgtaatatataaaaggagactattgatatggaattcgttacatacgaaactgaaggacacgttggtttaattacaatcaacagacctaaggcattaaacgccttaaacagccaggttctcgaagaacttgatgcaacattcaagagtgtggatttatcagaaatccgctgccttattttaacaggcgcaggcgaaaagtcatttgttgccggagcagatatcggagagatgagcacacttacaaaggcagaaggtgaagcattcggtaagaagggcaatgacgtattcagaatgatagagacattcccaattcctgtaattgcggccgtaaacggattcgcactcggcggcggttgcgagatttctatgagctgtgacatcagaatctgttcagaaaatgcagtattcggacagcctgaagtaggacttggaatcacacctggttttggcggaacacagagacttgcaagacttgttggtgccggtatggcaaaacagatgatttattctgcacgcaatatcaaagcagcagatgcttacagaatcggtcttgttaatgacgtatatactgctacagttgatgaagcaggtaatgtaactgctactgcacaggaaaatcttatagcagcggcaaagaaaatggctgcaggaattgcagcacaggcgcctattgcagttcgtaactgcaagaaagcaattaatgatggtcttcagacagatatggacaaggcaattgtaatcgaagagaaattattcggtaactgctttgagacagaagatcaaaaggctggtatgggcaactttcttgaaaaagataaagagaaaaagttaaaagttgttccttttcagaataaataatcaaaaataatacaattttaggaggtcgcaacatgaaagttggcgttattggtgcaggaactatgggccagggaattgcaaaggcatttgctttggttgatggctacacagtagctctctgcgatattaagcaggaatgggctgaaggcggaaaggataaaatcgctaaaggctacgcaaaattagttgaaaaaggaaagatgacacaggaaacagttgatgccatcctcgccagaatcactcccggtctcaaagaagatctttgcgcagattgtgatttaatcgtagaagcagcatttgaaaatatggaagttaagaagacaacattcgctgaattagacaagattgctaagcctgaatgtattttcgcttctaacacatcaagcctttcaattacagaaatcggaaacggacttacacgtccaatggtaggaatgcatttcttcaatcctgctgaccgtatgaaacttatcgaagtaattgcaggcgtaaatactcctgatgctacagtagaagcaataaagaagatttcagaagaaatcggtaagactcctgtacaggttaatgaagctgccggcttcgttgttaaccgtatattaattccaatgattaacgaagctgctttcattaagatggaaggtgtttctgatatcgcaggaattgattcagctatgaagcttggtgctaatcatccaatgggaccacttgaattaggtgatttcgtaggacttgatatctgccttgctattatggatgttctttataaagaaacaggcgacagcaagtatcgtgcatgtccactccttcgtaagatggttcgtggtggaaatcttggctgcaagagtggcagaggcttctatgtatacaatgctgaccgtacaaagacaccagttgatgctttataattaaagcattagcaatatataggaggaattatacaaaatggatttcattttagacaaaaaacatgaaatggcaagatctcttttcagagatttcgcccagaatgaagtaaaacctctcgctcaggaagttgacgagactgaacagttcccggttggtactgttgagaaaatgcagaagttaggtttcatgggaatacctgttccacaggaactcggcggacagggctgtgatatcttaacatatgctatgtgtgttgaagaattatcaaaagtttgcggtactacaggtgttattgtatcagctcatacatcactttgcgtagacccaattttaacatacggaacaccggaacagaaggaaaaatatgtaagaccacttgcaactggtgaaaaacttggagctttcggtttaacagaacctggtgcaggtactgatgcacagggtgttcagacaaaggctgttcttgacggagacgaatgggttcttaacggatctaagtgtttcatcacaaacggtaagtatgcagatgtttacatcatcattgccgtaacagatgtagttgaagataagaagggaagaaagaaaaaattattctctgctttcatcgtagaaaaaggaacacctggatttacattcggtacaaaagaaaagaagatgggtatcagaggctctgctacttatgaattaattttccaggattgcagaattccaaaggaaaatcttcttggacagcagggaaaaggtttcccaatcgctatgcatactcttgatggcggacgtatcggaattgctgctcaggcacttggtattgctgaaggcgcattagagacaacaatcgattacgttaaagagagaaaacagtttggacgttcaatcgctcagcagcagaatacacagtttgtacttgctgatcttgcaacaaaggttgaagctgcccagttattagtgtacaaagctgcatgtgctaagatgacacagaaggtttactctgttgaagctgcaaaggctaaattatttgctgctgaagttgcaatggaagttacaacaaagtgtgtacagttacatggtggatatggttacatcagagaatatgatgttgaacgtatgatgcgtgatgctaagatcacagaaatctacgaaggaacatctgaagttcagagaatggtaatctcagcagatttattaaaatagactataaggagtgaataaccgtgaaaatcgtagtatgtataaagcaggttcctgatactaaaggcggagttaagtttaatcctgatggaacacttgacagagctgcaatgcttacaatcatgaaccctgatgataaagctggtcttgaagcagcacttagattaaaagatcagtatggagcagaagttactgtacttacaatgggtcttccaaaggcagaagatgttcttcgtgaagcaattgccatgggtgctgacaatggtatccttgttacagacagagttttaggtggagctgatacatgggctacatcaacaacaattgccggtgcattaagaaatattgattatgaccttgtaattacaggccgtcaggctatcgatggtgatacagcccaggttggaccacagatagcagaacatcttggaattccagtaatttcatatgcccaggatatcaaagttgatggaaacaaagttactgtacagcgtcagtatgatgatggatatcatatcgtagaagctgaaatgccatgtcttataacagctctttctgaattaaatgagcctagatatatgacacctgcaggaatcttcaaagcttgtgacacaagttttacagtttggggaagagcagaccttaaggatgttgaagatggcaatctcggtcttaacggctcaccaacaaagatagctaaggcatctgataaagtacgtaaaggtgccggagagaaggttactcctgattcacctgaagatgcagttaactacatcgttggtaaattaaaagagaaacatatcatttaacagaaggaaatggtgaacaaatatgaaaatgagtccagaagaaattgcacagtacaaaggtgtctttgtatttgcacagcaggtagataatgagatcagcggtattgcttttgaattacttggaaaagctaaggaattagctgctcctcttaatacagaagttacagcagttcttattggttcagatgtaaagaatcttgcagatactcttgcagagtatggtgcagataaggttatcgtagtagatgatcctgaattaaaagtatatagaacagaaccatatgctcatgcattagcatcagtaattaatgaatttaaacctgaaatcgtattagtcggtgctacagcaatcggccgtgaccttggtccaacagtttcagcaagagttgcaacaggtcttacagcagactgtactgtacttgaaatcggtgatttcccaattaatgcaattcctggtagagaaagtgaacagaagcacaaccagttattaatgacacgtcctgcattcggcggtaacacaatcgctacaatcgcttgtcctgataacagaccacagatggcaacagtacgtccgggtgttatgcagaaaattagcccaatcgcaggcgctaaggctgaggttattgaattcaatcctggttttacacctaacaataagtatgttgttgttaaagaagttgttaaagctgtatctgatatcaaagatatcatggatgctaagatccttgtatcaggcggacgtggagttggttcagcagagaacttcaagatgcttgatgaacttgcagaagttcttggcggacaggttagctgctcaagagcagttgttgataacggctggaagccaaaagatcttcaggtaggtcagacaggtaagacagtacgtcctaatgtatattttgcaatcggtatttcaggtgctatccagcatacagccggaatggaagaatcagacatcatcatcgctattaacaaagatgagactgctcctattttcgatgtagctgattatggtatcgtaggtgatcttaataagattgttcctgcacttacagcacagttaaaggctgaattaagcaataaataatcattaatttgattgaaagagtatcacatatgtggtactctttttttatacataaaattatagaagtcagaaggagagaccaatgatagcggtagtagtaaagtgtgggaagaatgattatatggttattgatgacagggagtggtcgtcgtttaacaacagtataaagagcttatcaggttcagataagaagaacagaacataccaaatcggagacagaaattttacatataaagagacaaaaaaatttaaacatttatttacgggaacttacgcaagtgcatataatttaatgccggaaattattacagagcatggaaattataaaaaccttatagatgatatactggaatcacttaaaatagcaccgggcaagaggtgggattatgtcctgtttttcgcaaatgactttaataagtcagtttttaaaggcacggactatgactataattttgaagccgtcaggaagcatgatttcttaatgttttttgaagatgaaaatattgaaaaattaagaaccggtgaatacgaagctttactgaaaatagctttgtatgcaaggtatgatactgaggatgatattctaaacaggattcttggggatgccagatttgaacttccggcagattttgatatatattattccgatgaatcggaaatggacgagaaacttaaatttatcaggaataaatcaataatcgaggacttttttattaataacaggagaggattacagcgttttctcgcaagggaaaatgagtatagtacggagattatttctgtacttagccagataaatcctgttatttatacaactgacagaccggtaagcaggatgcgatttacggatttgtttcctaaaaagattaaagataagattggaattatgggcttccttgatgcaagaagtgcaaccaacaatattattataagaattagtcagacagcggataaattatgtaaattagactttgaaagcgcatataaggttcaaagtgaaattgataaagcatcagcggatttttgcgaaattgcggaaactgccattgacggaatagttaatgttcccgaactttttaataataacagctctaagaaaatacttgaaagtatcggtaatgttaccaaatgtgaaggcaacagggataaatatatagacttactcaatcgtgcaattcttgcatttgataatgaaaattacacaaaagaagaacttaaaccgattttttcgctgtgggtagagggttggtcagtagaattcaaaagatgtgccaaatatcttaccgatgaaagtattgacttcatgaaaaagtatctttcagaggcagaaattaaagtggtggaggataattgcaataaaaaataatacaaatcaaagaaattgtaaattgataaataatactgtaagatatacaatttatctataatattttaacgaagaagtgtatattatgataaaaaaaagaattatatcacttataacaattgtattgtttggaattttggtgtgttgtctgccagtaatggcagatgggtctttttcgtggtcgcaagacgcaaataggtccaaggcagaagtaacttattatgggaatgtaaattggctagataaagggattgcacctaaccgttatacattttttgctaaattatatggaaaagataagtcagttgttacagtaactaatgctgcatacttgacaattacgtcaggcgttattggaaaaattatatttacagataagatatactggaatcacgaatatagtacaacacagaaaaaaacaacggctacgtctataagagttcagtgggggtttgatggtttttccggttataagagtttaagctaagggagttgaatgttttgaaaaacaataaaacattttcatatatagttttatttatatcaatgtttatttctgtaattgttgtaacaatgcttgcacctgtatcagaaacattttttaatagtaatgacggttacagatatgaagaatacataagtgtatatccattcatggtagaaggcggtacgtcatattccgataaagaatatgataaatactcggatataatcaaggaatttatagaaaaaattagtttaatggatggcaatatttccatggatttggagctcaatgtttcaggaggtgcaacagcacagggaaaggtgtatttttcacttaaagagactcctgctgtaccgctagaaaagagtaaaggctctattgttgaaaaaaacggtgtctatgtaggcaataagtatgttaaattaattgataatgatatgattagtatctttaatgataattacagtgtacttggagttgctgcaaccaaaaaacttgagaagaacgagtgcatatatattaaatattctgaattgaatgacgcaattaaagaaaaaattaacaggaatttatgcaaaaatgtctattttggtgaaccggtggtgattcattatgaaagcaataatgctgatatgacattgttaaaggattatcttacggataatacatatatgtatgaaataacagaggcttcgggacaatcaggttataatatactttttggaaagattaagaatatattgttaggcttgacaggactactctgtatatttgtgatcggagaatccgttgtgcttttgatgtcctcacttgtaagagaagcttttataaaagaagtttttggtatgagcagaagtaaaatttatgtgcctgtgcttcttagaattagtttatgctttgtagcggctgcgatagtgggacttttagttgtttatgttatttttaaagaaattttggttattaggttctggttattggctacggcctttttattagttgttacttttgtgatatttggcttctcttatctgaacgttgacagacgcagggctgacagggcagaacagatattaagatttacggagtagaataatgaaattaaagaataaagtcgggatggcatatgatatatgtctggaaaacaggaaaaagttctatatacatcttttagcagcatttatattttacagtatacttatttttcttatatatctgattgttgatgcatacagttacgaatacagaattaataaaagcataaaatgtggtattgacaggttagggtatgtttcggttcctatagatgccaaatacagtgaaaaaatatattccgaaatatcacaaataggagaaattgataacatcggatgtatttctgatggcgtaggtaattcagctccggcattacagtttttacttgatatacaaagtggacataaaaattccaaagataagaccgactacgctatagaaacaacagttatgaatataggcatctggcctgttatgaatattaatcttgttgaaggaaaagaaccatatgatgtagatattgaggacaataataaagatataattctgtatttgtcagaaaaatattgtgatatcgtaagtgtaggtgacgtctttgaagactgtgacgtagaaggaaatgtgatttacagatatactgtaggaggattttttgatgaaaagtcatctttgatggatccgcatgtttttgatgatttaacattggtaaagtcaggcagttactcaatggagtatggaatcattgaactggtacaatgggaaaattacggcggaagcttttttacatatagtaaagagaatgattatgataatatagtttcaaaaattaacgggatttctgaaaaatatgacacagaaattaacacatataaaatatcttctgtagtcgattacaccaaaaaaaatacagatatgcagactagagttttaaaaattgcacttggactttttggcactgcgatgataatttctctttcggtcagccagatatattcgataataaccaaatcaagggattacggaataaggctttcaaacggagtcacaaagaaggatatgtgctctattatttttatacagaatataattcagacagttatacctgtaatattaagtatgactgccatgtattttgtgttaagaatattctttggcggagacctgacatcggaacaattaataaagcatattttcactttatattgtgtgcctatatcacttgttgtaactataatagttgtcatgatgtcttcggtgattccggctaaacttatgaaaaaaacgtctgtgcttaacttactgaacgggaggataacggaatgattgaacttaaaaatgttgttaaagtatataatgcggatgatacaagtgttaaggcacttgataatatatcaattaaaattgatgacggggaatatattgccgttatgggacgttctggttccggtaaatccacgttgttaaatataatcggaggaatggagaaagttacgtcgggacagtatttttgcaatgaaaaagaaatcagctctttaacaataaaagaacttgatctgttcagaaaaaataatatcagttttatattccagaattatttccttataaattcatatacggtgtctgaaaatattgaagtgccgcttattgcaaagggaattccggtaaagaagcggaagaatatagttgatgaaatgatgaaaaaaaccggaataagtgatattgccaaaaaatatcccaatcatatttcgggaggacagatgcaaagatgtgctattgcaagggcattagcttccgataacaggattattctggcagatgaaccgacaggagcccttgatgcaaagacgggacaggagataatggaacttttaaataatattaaaacaaaaggaaaaacaattattcttgtaacccacgatgaaaacatagcttcttatgcggatagaattgtaagaatagaaaatgggaaaatagtttaaaaaaggtggaaattactccacctttttttcattatgttaatgttattcagttctgagcgctataacaggatctttctttgatgctaccctggcaggaataagacctgcaatcaatgtgaggaacacgcttattgcaataaggataagcgcacccttaagcggaagaaccgcaacacctgaaattcctgagaatttcttgatgattatgttaatcggtatgttaagcagaagcgtgaagcctatacctatcatacctgcaacgagtccgacaatcattgtctcggcattgaatacccttgaaatatcatgctttgaagcaccgatacttcttaaaataccgatttcttttgttctttcgagaacagatatgtatgtaataattccaatcataattgatgaaaccacaagtgaaattgatacaaaggcaataagcacataagatattgcgtcaacaactttacttacggatgacatcataagacctatgtaatcggtatatgaaatttcaagactgtcattaccttctgatttgactttgtcattatatgctgaaattatatctgaaatggcatcttttgattcaaagtcctttgcatagatattaatctttgaagggttatctgttgtaacgtagcccagtgcttcaatattatttttgtatgtatttgaacttgattgctgtatctggcttttgaacatttcaattattacatcatcagaaaggttggcaatgtaggcactgattattttctgctgttcttttggaagtgtacttatatatgcattaatatcatccattgtaaggtctatatcaaccgttgagaatggaagacctgtaagaacgtctatatcagggttatcaagctgtgctttaacaatatctgacttattattttccgaaacaatataatccacaaggttctttgtatagccgacaacgcctgtaattgaagtagcaacagcatcatcttttgcaactataattccggaaactttaacttcaataccattgtcaataagctgttttacataatcttcgctgcttgacatgttcttgtaggcccctgttgcttcgtcatacctgtaatatgctgatggaagcactactttaaatctgagatttaaaagatcctcgtaactatagctgcttactttatcatcaagctgtttgttaagattaatcattatattttttaattcggatgaattcctgatacccagcgcatataaagaaacatcggtaatctggtgattcttatcggctacaacaacaacttcattgtaattgtcaggccatgaaccggcaacaaggtcatactgtgaattaagcaggtcctgattatcaatcatctgtgaccacatatcagtgttggaaaatgaggaaacaagggaagatgacattgtctcatcgcttacaccccatatatcctgatacaatgtgcttggattgactttgttaattctgccggagtaatcttttgcatatacattgagaggaatatcgtactggtattgtacatcaagcacataatcgccgatattgcaatccgggctttcaagatatttctttagttcagaaaggttatttttcttaacctccgcagacattgtattaacaaactggctcataacaggggcagcatatatccggccttcttccttatcttcaactgtgcctgtctcgcccatcatggaattaagcatacttgaatagtccacactttcattttcaatggttataggatatgttgaaacagtatcttcctgaacacggtttatgtatgcctgaaatccggatgaaagggaaaggataagggcaatacctataatacctatgcttcctgcaaaagaggtgagaaatgttctgccctttttggtaagaagattcttaaaacttaatgaaagtgcggtaaaaaatgacattgacactttctcttttttaatttttttatccaaagctccggcaacaggagagatttccttgcctgcaggtatttcatacggagcagtatcatcggttactttaccgtcaaggagtcttatgattcgagatgaatactgctctgcaagttcagcgttatgtgtaaccatgatgatgagcttgttatctgaaatcttctttaaaatatccattacctgtacgcttgtttccgaatcaagcgcacctgtcggctcatccgcaagaattatatcagggttgttaacaagggctcttgcaatggcaaccctctgcatctgtccgcccgacatctggttaggctttttattaatctggtctccgagacctaccatctcaagagcttcaacagcacgtttcctgcgttctgctttggatacaccggataatgtaagcgctaattccacattggacaaaactgtctgatggggaatcaagttgtagctctggaaaataaaaccgatcttgtgattgcggtaggaatcccagtctttatccttaaattctttggtagaacggcctcctataatcaggtcaccgtcggtatatctgtcaagaccgccgattatattaagcattgtggtcttgccacagcctgactggccaagaattgatacaaattcatgttcacggaaagatatgcttatgccctttaaggcgttgacaacagtgtcaccggatatatagtctttggttatgttatttaactgtaacat

SEQ ID NO: 343 - DNA, 10323 bp, unidentified
  source 1..10323: mol_type = unassigned DNA
ttaaatgctcgtatcctcatatttatataactcccactctccacgatgtctgcgaaaatagaaaatattggtatatccgtttccaatcccatttactttcaggattttcgtattagagtaatcgctattcttttgtccgtaattgatattggacagtctgtctacaggcaataccggacggaaagcataccactgattcaagtcgagtgtagtctccaggatagaaaattcatcatccggatctatcgtaatatattctaaaggttcgcgaatatgccggctctgataaacactatcagtcacaaaacgcaaataaaacgcaacgaagtcttcattctccccctgctctatctgccggagattaatagcttccagcatccagacgcccttggtacgttcgaaatagtatttcttcaccatacggttttccagcaaaatccattccacctgtacggatgtcaaggcagtatctcccaccaattccaagtcatcttcatcatcgaagagcaatgtgtaatagctctgctgggtaaacagataatcatgttcccactcccccctctctattttagaaggtttatcaacgtcgtaaaaaggcaatggaaacttagtccgctgccgttgcagagcgtcatccgaagcgtaactatagacgaaatcatcaaacgattcatccgcttctattggcttagggtcattatcaacttcagcctgtggtacagtatcagctttgtgtgtagctgaatccaccaaattggtgattgtcgcaaaaggatccatcttcgtcttcttgttgccgcacgacaccaagaaaacgagaagaaagaaccccaatcctatttttctcattctttaccggcccctgaaggtcacttatttagtttagctcttaacttctcaagcatgtccaccgtcatggactctaaatcatattgcggtttccaatcccactcttcacgagcacaactgtcatccaagctatcgggccaactgtcggcaatggattgcttcaatggatcaatctcatataccatttcaaaatcgggcacatgcttttttatctcccggcagatctcctccggatcaaaactcatggcagcgatattgaaagcgttccgatgcttcagacgtgttgggattgcttccatcaacgaaatggctgcattcagcgcatcaggcatatacatcatatccatataagtaccgggtttcaaaggacatacgaacttttcacctttcactgcggagtaaaaaatatcgaccgcatagtctgtagtcccccctcctggaggagttacattggaaatgatgcccggaaaacgaaccgcacgagtatctactccatatttagtataataataatcgctcaacaattcagtagttactttggttaccccatacatcgtacgaggacgctgaatcgtatcttgcggcgtcttcacatgaggtgtagcttctccaaacgaaccgatagaactcggagtaaacactgcgcaaccatattcacgtgccacttccagcacattccataatccgtctataccaattttccaagccatggccgggcggctttcggcaaccaccgaaagcaaagctgccagattataaatcgtatcaatcttgaattggcgcgccaccacttcaatagactgacggtcggttacgtcggcaatagcagaaggccccgatgcttttaattctcctttaggcatagcactcggaatgtatccggctataacatggtcatctccataacgtttacgcaattccaatgtgagttccgaacctatctgtccggttgctccaattaccaaaatattcttcatacgacttatttataaggtgctccatccttagagacgtgcaaatatacatacttttttttcattattctatcattttgctattgtttatttgaagaaaaatcgtgtcctttgtatcgtttagtaataagatgacaaacttttaatttataaagctatgtacgggaaaatgaaagaacacctcagcaatacgcttgctgaaattaaagaggccggactctacaaagaagagcgcctgatcgagagtgcgcaacaagccgccatcaccgtaaaagggaaggaagtgctgaatttctgcgccaacaattacctgggtttgtccaaccatccgcgactgattgccgctgcccaaaagatgatggatcaccgtggctacggcatgtcttccgtacgtttcatctgcggaacacaagacatccacaaagaactggaagctgctatctccgactatttcaaaaccgaagacaccatcctctatgctgcttgtttcgatgccaacggcggagtgttcgaacctctattcagcgaggaagatgctatcatctccgattccctgaaccacgcctccatcattgacggtgtacgcctgtgcaaggccaaacgttaccgctatgccaatgccgacatggccgaactggagaagtgtctgcaagaagcacaggcccagcgtttccgcattgttgtaacagacggtgtattctccatggatggcaatgtagctccgatggatcaaatctgtgatctagcagaaaagtatgatgctttagtcatggcagacgagtctcactctgccggcgtagtaggtccaacaggccacggtgtaagcgagctattcaaaacttacggacgtgtggatatttacaccggtacactgggtaaggcttttggcggagccatgggcggattcaccaccggacgcaaagagattatcgacctgctgcgccaacgcagtcgcccatacctgttctccaattctgttgctcctgccgtgatcggtgcaagtatcgaagtcttcaatatgctgagagaaagcaatgccctgcatgacaaattagtagaaaacgttaattacttccgcgaaaaaatgactgccgccgggtttgacatcaagcctacacaaagtgctatctgcgccgtgatgctgtatgatgccaaactttcgcagatttacgccgcccgtatgcaagaagaaggcatttacgtcaccggattctattatcccgtggttccgaaagaccaggcacgcatccgtgtacagatctctgccggacacgaaagagaacatcttgacaaatgtatagatgcattcatcaaggtaggaaaagaacttggagtattatcgcgctaaagcgcgataagctacgggctacaaatgacgagttacaagttgctgcgctgtattcgtaagcgaataattgttcgccagactaccacaccgaaaggaacttacaactcgtcacttgtagcttttaccaccggcagcaccaccgtaaacctgcttcctttccccggttccgaccacagttcgattttgccccgcaatttttctacaatcacctgacagatagaaagtcccaagccggctccttgcgaaaactcatcctgtttatagaaacggctaaagatcattttctgttccgagagttcaatgcctcttccggtatcttccacgtagatagccactcggtccgattcagaaagataacggtatcccaacttgatatatccagttttagtaaacttagaagcattattcaggaaattagtgatcacctgtgtcaagcgccccttatcaaccatcacttccacctgcaccgcatccaactctttgatgaattccaattgttcggaaatcagcatctgatgagtcatatatatactgtcaaccaattctgaaacgaaacacttctcgtattcaaatgacatgtatccggattcgatgcgcgaaagttccagaatatcattgattagtttcaacaataaatcactgtttttattaatactgccgatatattccagacgctcctccggactcacaccatcatcaagcgccaatatattggagaagcccacaattgcattcagcggcgtacgaatctcatggctcatatttgccaggaaagactgctttaattcagccttttcagccagtagtcttgcttcttccaattcctgttcacggtctttaatcgcctgtatattcagcaacagaccggcagctttatatcctccaccgggaagcagtatcgttttatagcgaaactcccaccactgatagcctttttcattaaagtcacaacgcacctgagaaaccactttgcctgccttagaaatgtttttccagtaccctctcacctcatcccaatgatcgggatgcataaacgacaatagttcctcaaagccaagtgacttagcactcattttctgtgatatccagaattccttttcaaatacaaaatggtcattttccagcttccaggcaaaagtgtcgctaccttcaatagccaacgccaatgtttccttttcactttccagttcataaagggcacgtctcttccgcccttgttcgcggcgataaaggaagaagagccagacaaacaacgtggaaagcagaatgataatcaacacaacaccgattccccatactaccggatattcttcctggaaaggaatatttataatcgtacattccgccggaatactctctttggaaataccccgttgctgcatcacgttccagtctaccacatatttcttacggctctctctgacgggtatatccgaaggcttctcaccatgcaaaatacgtatggcagcactcacttcctcttcggccagaatcgggaatgtcgtaatatatccaccaagcaatttttcgttatagccgaatgcctcattaattgcagtgagactggggcttgcacatatatttccaatattgaccgatgtataatcgcgtttcatctggaggtagcacattcctgtggaatacttactcaaagtccagataaagttagcagtttcctgtttctgtccaattcgtaccgacaggctggaaaaacgggtatatccctctttatggggataatgcaacctcttttcacggggagttcccgagtagccgaccatacaggtcactttttcatctttcagttgattttctatatccgcccgtatctgccggtcaatatacgtagaatcaagtaccgtaaacagctccacatcttcaccaaataactttgctcccaggcgtatattcttcatcagatccatccggtcatggaaccccgtcacattaggatactctttcaataattcccaattaggatagttcactccaccaaaaaccaccggaatttcttttactaaaggatgacaacacttgaacagtgaataggcagcctgatcatcattcaccagaattacttcaggttcccagccgtcggaaaccgaatcgagcagatgatacatatacttcaattccggttcttcctgaaaagcctcacaatccagatatacgatacgaatatctgcattcaccccgtttcttctgaattctttatctatcaagcgattgaaatcaggatagccgacatagctttcctcataagaatgcacgattaaaattcgccgttcttcccgatccgaacagctgttcaaaacgaaaaaaaacagaaaaatccatgcatatataggcagaaatgtgtttttcatgattcgactgtctgatccataagtggaacaaaggtagaataaaatatgtataatccaaagaaaacaaaaaagaagctgtctgaaaaaaatcagacagcttccctacttagcaattctatatcaaaagattattaacgttcgcccaatttcacatctacaaagaagatacccgttgcaccggctttcttaatcatatcaacaatgcccgcagcagttgcctcttcttccacctgttcgcgtacaaatccccacaggaagtcctgtgttgctttatctttttcggcagcagccacatccaccaacttatcgatcatttcggatacacggcactcgtgtttgtaaacctgttcaaatacttccagcggagtaccgaaatcgttgggaactacatccagcttatcaactttggctttaccaccacgcttgattacgtaatcggccattgcacaggcatgctcgttttcttctgcccactgtttcttcaaccagtgtgccataccgctaaaaccttctttctccatataaaaagacatagccaaatacatgttagccgaccacatttcagccgtgatctgctcgttaattgcattctgtaatttttcagtaatcataatcgtattttttaaattaatttgaaatcattacaaaagtaacaatgatacacagacattgttcatttaataacattttttatataaaacaacccggattggcaggcttttcccgcagaattgcagcagcatcgaaacacgaacactgtctgatccattcttccggttctatttcacataaccattcaagtcagcgctgaggtcacgatgccccaccagccggaaatccggataatcttttagcagcaacttggcaagcagcagagggaatgtttctgaaagtcggttcccgtatcggcaaagtatccgctcacatccagtccaccttcatagcacacgccgattgagcgagcgttgtggctccgggcgtgcgcaccgttttttaaaaccggacgaagacttttgatatctctgttcttccttaatataaatgataacctacaccatatataacgcaaggtccataccgccttcatctttctcaaatctttctgtattcataacttagttgcacactacaaaataactcctgaaaacagaaatcaaaggcgtaatgtctatgaacacaaagtaaagaaagtgaggataggaaataaaaatgaaagcgtacaatcatcaaaaggatgatgtgcacgctcatacatatagtttatacttttaagagttcttacatattgttttacaatgtccgtaaaatcggaccacccatatcaaaacttataacaaacaagtttattcttttaatgttatgacaataaagatagctttttcctctaatcttcaacctaatgggctgagtcatgaaaagattaaatctttataccaactcgtccgaagtatacccctgtggcaactcacgacagttataactcgaagccattatctcaccataggcgcctgcagaacgcaatgctatcaaatctccgcgcttcaccttattcaagtctatcgcttttccgaaaacatccgacgattcacagataggccctaccacatcatacgcctcaaccgcatcctcggaagtaatattctctatcttatggtaagcctgatacaacgcaggacgaatcaaatccgtcataccggcatcaaggatggcaaatttcttattggctccctgttttacataaagcacctgcgagataagtgaaccgcactgccccgttatggcacgccccagttcaaaatggagtgtttgataagagcgtagtttcagatgttcggcataagtagagaaataatctttgaaatcaggtattgcctgacggttgggatgcttataatcaatccccagtccaccacctacattgatatgctcgatacggatgcgatgtgcttccagtttgtcttgcaactcattcacacgattgcacagggcaacaaaatcacccatatccaatatctgcgaaccaatgtggaagtgcaatccgatgaacttcacattcttcatctccaaagccacttctatcacatgatccatgtcttgcatactaatgccaaacttgttttccgccagcccggtagtgatgttggcatgcgtatgtgcacctacattaggattgatacggaaagcgacattagcgatcttacctttagcagccgccaattcattaattacttccaactcaggaatagactccacattgaaacagaagatattgtagtccaagctcatgttgatctcccaatcggacttacctactcctgcaaaaacaaccttattcgcaggaaagccagccttgatggcagcacgcacttctcccccactcacacaatcggcacccaggccgttctcacggataatggtaagcaccttcggattagcatttgctttcacagcataatgcacctcaaaattgccatacttagcggcttctgcacgcatgcaggaaagagtgtcgcgcaataccttcgtatcataataataaaaaggggtacgcagctcacggaatttatctatgggaaatgttcctttcatacttcaaaactttgtttataaagaaaagaacgcaaattacgcgaattacacaagagcctttatcagcgagttgtgcaatttgtgtagtttgcgttccatatcatattatatctgtacttccttatttctcttattcttcgttgaacagtgcatcactaagcgactgcaatgccttattcttgtcgcactcacggatgaggaaagaaatattgtagttactaccaccgaatgagatcattcgtaccggtatgtcgcgcatggcatccagtgccttcgcttcgaaaccgacattctcccattccaaatcacctaccacgcagacaatacacatatccttatccaccgtaacggttccgtacttcttcaggtcgtccagaatctcgttgagatgcttcgtattatcaacagatacagatactcctacctcagaagtacaaatcatatcgatagaagtctgatagctttcaaagatttcgaataccttgcgcaagaaaccatgagcaagcaacatgcggctggatttaatcttgatagccgtaatattatcttttgctgcaactgccttaattttgcccttctcggtatcattggaaatcatagtaccgggagcagttgggtccatcgtattcagcagacgcaccgggatattggcatacttggcaggctgtatacaagtagggtgaagaatcttcgcaccaaaataagccagctcggcagcttcttcaaaatgaagatgacgtacaggagcagtcttatcaacgatacgcgggtcattattgtgcataccgtcgatatcggtccatatctggatttcggaagcattgatagctgcaccgatcagagaagcggtatagtcgcttccaccacgttgcagattgtctatttctccgtaagcgttgcggcaaatgtatccttgtgtgatgtaaatctcagcaccgggatgcaattccaactgcatctgaagtttctccttaatatatacaggatcgggctccgcattcttatcggtacgcatatattccaaagccggaagcaaaatggacttcacaccacactcttgcaggtaatagttcatcatggcagtagagatcagttctccctgtgccagaaccactttctcctcaaacagtgtgaaaaggtctttggtataagaacggatgtagtcaaaatgagatttaatcagttcctgacctttctgtttatactcgggagtggaatacaactcattcacatgctgtttatatttagcctccagcttgttaatgatctcgttggcaccctccggatttttcttgtacagatagtccgaaatttccaccaatgtattagttgtgcccgacatagccgagagtacaactatcttctgttcaccatcagtgatcaatttggctacttcctttatccgcgctgcagaacctacggaagtacctccaaactttaaaactttcattttcgttcctgtattaaatgattatatattattatttgtttcttctacagtcggcatcatacccgaatactcggacgttacatctgttatctgatgacctgcacagcgatatacctgtcccggaaactcgtgaagcagatggaggttgtgcgtagtcatcaataccagcgagccacccgtgcggctgatgttatgtaacagtcctacaatagcacgtcccgtttccgcatccagattaccggtcggttcatccgccaggataatctccggagagttgagcatagcacgggcaataacaatgcgttgctgttcacctcccgaaagttcgttagggaacttatatcctttattacccattcctacctgcatcagcacttcagcgatacgatcttttatttccgatttgtttttccagcccgtagccttcaatacaaaagcaagattatcgttcaccgtgcggtcagtcaacagttggaaatcctgaaacacaatgcccagcttacgacgcaactgcggaatatgcttgcgcttaatgcggctcatatcataccccagtaccattgcttcgccggcagtgatatccagttctccgtagagtgtctttagcaaactggtcttacccgaacctaccttaccgatcaggtacacaaactctcccttctgcagctcgaggtttacctcattcagcacgcacaagtcctgttggtgtacttccacatctttatatcgtatcagcggttcagccat

SEQ ID NO: 344 - DNA, 8123 bp, unidentified
  source 1..8123: mol_type = unassigned DNA
cttgtaatccttacagtccggctgccaaggctctgtaccctgaccgtcaaacacatagtccgtactgatataagtcatcttgcagttcagtttcttgcatacatttgcaatattttgcgtgccacctgcattgatagcacgaacttttgccactttatcgtcatcctctgccatgtccacagcagtccatgctgcgcagtggatcacggcatccggatttacttctgtaattactttttcaacggcattcttatcggtaatgtccagagcgacatacggtgcttttgttaccgcagaaccatcagctacaccgctgtaattttcctgaatatcagatcctacactttcatgaccacacttcagcagttcattcatcacgtcatgacccagctgaccgccaacgcctgttacaaaaaacttcatggtcttttctcctgttagcgattgctgtacattttctcgtagtagttctgatactcaccgctgatgatggtctcccaccactcacggttatcgagataccactgaatggtcttcttgatgccatcctcgaacttagtctccggcagccagcccagctcgttgtggatcttagtcgggtcgattgcgtaacgcatatcgtgacccttacggtcgccaacgtgagtgataaggctctccggcttacccagctccttgcagatgattttcacgatctcgatgttctgtttctcattgtgaccaccgacgttgtagacttcaccaacgcggcccttgtggataatcaggtcgatagctttgcagtggtcttccacatacaaccaatcgcggacattcagaccctctccgtaaacaggcagcggcttgtcagccagtgcattggcaatcatcagcggaatcagcttctccgggaagtgatacggaccatagttgttggagcaacgggagatggtcaccggcagaccataggtgcggtggtaagccagaaccagcaggtcagcggcagctttggagctgctatatggagagctggtatggatcggagtctcctcagtgaagaacaggtcaggacgatccagcggcaggtcaccgtaaacctcatcggtagaaacctgatggtaacgctgaatgccatacttgcggcaagcgtccatcagcacactggtgccgatgatattggtctggaggaagatgcccggatcttcgatggagcggtcaacatgagattctgccgcaaagttgaccacgatgtccggatgctcttcctcaaacaacttgtccacagcttcgcggtcacagatatctgccttcacaaagcggaaattcgtgttgtccataaccggtgccagtgtggacagattacctgcataggtcagcttgtccagacagatgatccggtaatccggatacttcttcaacatatggaatacaaagttactaccaataaaaccagcaccgccggtaacaataatattcataatctattctcctctacactttccctttttaatacagatgctcctgatacttgccatccatgacatccttcaggtactgaccatactgattcttcttcataacctcatagacttccatcagctcatctttgctgatccaaccgttcaagtatgcaatttcttccaggcaggcaatcttacgatgctgatgctgttccacggtcttcacgaagttggtagcatccacaaggctctcgtgtgtaccagtgtccagccaagtaaatccctgacccaataactccacattcagggtaccatcttccagataaatacggttcaaatctgtaatttctaattcaccacgcgcagaaggtttcaggttcttagcaaactcgaccacacggttatcatagaagtacagtccggtcacgcagtagttactcttcggatgttctggcttttcctcaatagaaacggccttaccgttcttatcgaactccacgatgccgaaacgctctgggtcgtccacatagtagccaaacacagttgcgcccttgccgttctcagcgttttccactgcggcagtcaaccttttctttaacccgtggcccgcaaagatgttgtcgcccagcaccatagccacagaatcatcaccgataaaatcggcaccaatgataaaggcctgtgccagtccatccggagaaggctgaacagcataggtcaggttcacaccaaactggtgtccatcacccagcaggttctcaaagcgaggagtatcctgcggtgtggaaataatcaaaatgtcacgaatgccggcgttcatcagaacggacatcggatagtaaatcatcggtttgtcgtagattggcaaaagctgtttgcttgttacttttgtgaggggatacagacgagtacccgatcctcctgctaaaataatacccttcataactgtttcctccctcgtcaatctttacatttgctcaaacagtttcccatgttcttctgaaactctacgagcattaaatctgttatgtacatcttccaagccctgtgccaccaatctatctcttaatccatcttctcgatagatccgtagcacagcctcacttgctccaatatcatcgtcaacttctactagcagaccattttctccaccccggattatattcggaatggcatccacgctgcttgccacaattggtttgcctgccatcatatattcgggcagtgctagaccgaagccctcccagcgactcaacaagcacgcaacatcaaatagctctacatagctcattggattatcaacccaacctgtgatgtgtaaactgtccgagaaaccattgtcttccgcatactttctaatctcggcttcttgatttccgtttccaacaataataaagtgtgcatttggaactgcttcttttaccttctttgccatcttaacaaacacatccggtgctttttgtgaactcattcgtccaaccataccaacaacaaatgcgtcttctggaatgttcagttctctccttttaactgcaccatgtactccattctcataggcttcgatgtccacaccgctaaaaatgacctgtaacttgtcctctttgcatattttcttatccaatgctgactgcttctccgcgtctgaaatgcagataatcttatcacagaatggtgcagctatcttttcaatagctgtgtacattgcctttttctttgcagaacatcgcatattgaatgcccacccatgtgggttgtatacacaatgattcttcaagccgatatccgcaacacgagcaatagcccccgctttactggaatgagcgtagacgatatcggggttatacttctttatcagtgttctaacctctttaatcgcccttaggtcgtttccgccgatggctctagtcatctcaacctgttcaaaagaatctaccagatctctgtagtcttcttcatggaaatcctgtgagcaaactaatacattttcaaacttatctttatccaaatacttgagaagcattcggatgtaacgatccacaccacctgcggcctgcgccacatgcaatattttgattttattcttcctcatctccaaatactcctcgtcattttctccgcaatctatgtacacatccatatggatggtatttctttttcctcatgccgctcacacggctaagtgttttcttatgcagtcgtatccaattaccccagcaatcgtgttttctacttcataaaacatccgttgagtacactcgtctctatttctctatagccgaagtgctgttttatacagtcgacccccgtataccctgctatgacgttttttctaagcgttggattgttgaatcgaaccctgtcggtgcatgagttttgttaaaactgtatatatcacccagtccatttttcgccattcattgttcgttatgaacaaatcattcactcttaccgcacaaaacatgtatttatcatcaccatccaggctctactcaacagctgttttatgaagtagaaatcatctgtttttctctatttttcatgactcaacaaaccgttatgatgtaggtgtcattagcaggtcagatagtgtactcaacagcagtttcagacgttaatgataaactcatagatttttgttgttttatcctgttttccgccatttctatgattcttctgaaaaagatgtgccaattttgtgccacatgggccaaaagctcagcgttttgtgtaaatatctagcatttatagttcatatagctgtgaaacataaccaatttcagcaccctatatggtgtgcaaaacaggttcttttcgacgatgctacgtcaatacggtttgttgagtagacattagatggacagcttactccctttattcctttggcatttacacaccagtggacatcccccgcatttaagctatagaccaagtcagccttatcctgatacggaatgaacacaatgttttcaaagtgatgcctgttactatactgtaccagcttttgcaatacagatcctgcacctataaaagcaaatacaacttctcttccatcttttgttctcagaccatcttctctcacacctgtcaatgtatatccctttaagtaactcggcaccacgcaaatgatcgtgatgttaaacttatccagcatactctccgccaattcacacagaatctgccccgtagatgcagtatctggaatatagtaatgagcatagatcaggagattctttttatttatcattcttttcttctccatccccaattctttccacaaaaacaaatcccgcaacagcgtatgcgcctttgcattcgatgttgcggtcaagttcagtcttttctctgtaagtttttttgataccgtctccctgaagcatgttcttattcttgtttctcaaaccattttaccggtacggaggtttccgatcctatttggaagcctcctacgcaccgttgccctccatgcccagaagcacctataaacaactggcatcaccaccgacagccccgcttctatccggtacaggtaccagatccgtcctgcagcataaccctgtctatttctccgtcttcagaatccgtgacagttctgccacgttattggacgaatccatagctgcataggttacgatcacttcgccatttccggtctctgtcaccttttcaatcagtaaggaggctgtcacatccccgtcatgggaatcgtaagcggttacgccttccagcaacttattggtatctgtgccgattgcataggtctgctcggtatccggcagtgtgatcaccggcgctgtccggtccatttgtaagtagaagaatgcgcaaagcgcaatcaaagctgcatctgcaataaaaaatccgatgatcagaccttttgtactcattttgcatcctccttttctcccgtgttctgttccggtacagcagtttctgtctcagcagctgtcgcgtcggttttggagcccgcatccagcggcagctcaccctgtgcttcgtctgcaccatcctgtccgtggccgtaatagttgccatagtaatggccataatattttccataataaggattctttttggtgttgaccttgttcaggacacatccaagaatccggcagcctaccttgtccagctgttcttttacattctgagcaaatttgtagctgatggctccgctttcgacaacgagtaccgttccatcgcagatcgcacctgcaaccgcgccgtcgatgacgctgccaaggggcggggtatctacgatgacataatcgtattgcatccgcagcacttccagcatatttttgaacgcatcgcctcccagaagctcactggggttgggcggtacaggtcctgcaaaaataatatcgaaattgttgacgttggttctgcagcatacatcgtccagttccatctgtccgctcaggtaatgggacagtccgtatttttcacggtttgctttataacggccccgcagtactgattttcgcagatctgcgtcaaccagaatcgtcttcttgccgctttctgcaagggacaggcataactggaaggaaacgcttgtctttccttcgtttggcgtacagctggtcagggaaatcactttgacattttttcccgcaaagctcagattggtacgcaatgttttataggcttcttttgttctgaaatccagacgctcgatggagcgaattattacgttctgcatatttccctgtcacctcactttccgcttgtcgcttgttttttatattttttctttttcttcttgctttcaacttcattcagcggaatcatcgcaagggtggaaattccaagatatttttccacatcctcttccgtctgaatcgtatcgttcatcaggtgggaaaggatgatgatggctgctacaatcaggataccaagcattccgcccaacaccgtgttctttccgacggaggggctcgccttatgggtcggtacgtttgcagtttctacgatattcactgtttcgatatccataacgttgcggatatgggtcgaggctgtttcacggattgcattagcaattttcattgccgcaaccggattgctgtccgtcactgtaatggagattactcgggtgtctgcgggcgtgctcactgtaaccttaccgcttaactgctcataacttaacggcagattcaactgctcgatcaccgcttccagtacgaaacggcttttgatcagctccgaatagtccttaaccagctgcgtgcctgcctgcaggtcgctgtaggttacatttgtgttgctactgtcctgtttgttcaggatatagatttttgttacagactgatacgtgggcgtcatcaggaatttgcttcccccaaaggccagaagtgctgtaaacagtcccactgcaatcatcagcggaagctttctccagagtacccaaaaaagttctaccagatcgatttcggtttcctcgttgcttctctggttttgattttccatgtctcgttcccctttttctattcgatgtcttccatatctgtattgtccagaatgtgtgctgcgtttttgtagagcagacgtgccgcatattccgggctgcagtgtctttgcagccatgaggccccttccgccatcgatacagaccggtctccctctgctctgtgggcgtccgttcctatcagatctgcaagctcttcttttatcaggctgcgtgctgtgcgttttagctgtccgcccagcagtcccggcagctctcctgcgttgatctggattcggcagcccatgtcctttaattcttcgacccggttgaaatcctttaccacgttccgatagcgctcggtgtgggcgacaatcggccggtagccctcgcagagtaggtcatacaggcagttgcggatgtacgcccattcttcgtccggcgaaaattcggtcagaatataatccgatccggcgagggttcccgccttgccctgttttagcagctcgatggtatccatacagcaaaaaatctcaccgccgctgtaaagtctgatgtcaattccgttttctttcgcagcctgctgcagcttctgtgtccgttccagtgcagaagcagcggtaatgctgcgtctgttcggtttctgatgcggagtcaggataactgctgcagcgccctgttttacttcctggcgcagcatcgccaggctctcttccagatttctcgcgccgtcatccacctccggcaaaatatgacagtgaacatctatgtactgatttttcttctccggcatctcaggcctcgcttccggagtctttttcgctgtccgaactgctttctgctgtctccggtactgtctcgtattctgctgcagcttccgcctgtgctgcccgaagtccatcggcaaacagccacagcatccgcaggcagtaatcctgtacaacctgaggcatcccgtcgagtcctcgcatcagctgttcttcctgacttaccgcggattttttctcttcttcaccataaatcagcgtatccagactcactccatacaagcgggacaggttaatcagtgtttccacactcatgccgcaggttccccgctcgatatccgcataatatttattgacgacaccgagccgttctgccaccagctctctgctccagccgagctcaagcctccgacagcgcatccgctctccggcagcgatccggtcatatgccggcttctcctgctttctcttcat

SEQ ID NO: 345 - DNA, 6512 bp, unidentified
  source 1..6512: mol_type = unassigned DNA
ttaaaaatattcggcaattttttcctttaaccctacccagaagtcttttgcatcctgggaatccggcagtaaaacggcatcctcgtatgcctgataagcggttttttccgcatcatctgcagtctgtgataaaaataccgaataatgaccactcatatcatgcagtctgtctgcaagccgcactgttacaaaatctgcaaaatccgctgcctgatccgtattttttgaaaaatcattgacaataaacatatccgtagatgcacatccgatagaaggaagttcctcattcagtgccgggatctccatcacagaataagatatatcgtctaatttttgcagggaatctgtgtttacaaacgcacagagtgtttttccggctttaaaatgttctaaaatgctgtccatggagactgaattgatgtctaaggaaaatgatcctaaaatggtttcaaagtattcaagatctttctgatacagatcttcatcataggccacattcatcgtttccggcgccgttttctcaaacgttacactgtttccaacgaacgggaaatcgtaaaatgcatcatttacatcccactctaacaggtattccacattttctcccggttcattctcattagaataatcaatgatcgcctgcagtgactccggctggttttcaaaatatccgttctgataaacaaacacatttgcatcgtaactgagcggatatccaatcattttatcctcataggtggaagctttcactgacttttgggatgccccctcataagatcctccatcctcattttccatggcaagaccatataaatatgcctcctcaagttcatcgccatttaacagataaacatccggataatcctctccctgcatggtattgtcgtaaatcatcccgatataatccagagtatcctgacatttgaaagctgccttcacacccgtctgttcaaaatactgtctggctgcatattcaaaaaaatcttcataagatggatcttcataccacacggtcaggtctgtatctgccagatcgtatgcatctgttttcacatccggctgttttccttctgtgcccggttcttctgcctgcaacggaaatgtcgtctcttttacaggctgttttgaaacgacaccagccataatggctgctcctgcgcaaaccactatggctgcaattacacttctcttttgtatgttcttcataatcccattttcctattcctcgttttacgacaacagactgcacacatccgcgtgcagtctatgattccttacatctgatccaatgcttttttcagttttccgatcatctcatccacatgttgtttctcgatgatgagcggtggtacaaaacggagtacgtctgaacctgccgtgatcacaatcagtccttcctccagtgcctttgcagcgatctgtccgaccggcttttcggataccacaccctgcatcagtccaagtcccctgcgtgctgtcagaaaatcgtaggaagctaccagttcatctaatttttcttccagatatggtgtgatttctttcacatggtctgtgatgtggtcgcgctccatcatctcaagcaccttatcaactgcagcaccgacaaatgggtttccgccgtaagtcgttccatgatcgcccggttttaaagatttttctgccaccttttcggtcatcaggaatgctccgaccggaacaccgcagccaagcgcttttgcacttgtcatgatatccggtttcacaccgtaatgctgccatgcaaacatctcaccggtccgtcccataccgcactggatctcatctaagatcagaagaatatcatgctcatcgcagagtttccggacaccttccataaattcttttgttgccggataaataccgccctcgccctgtactgtctcaaacaggatcgcgcatgtcttgtccgtgatccgttttttcacgctgtcaaggtcattgtagtctgcaaatttcacacccggcattaacggttcaaacggttcctgataatgtttatttccggtgacggagagtgctccgatacttcttccatggaaagaatgattcattgcaatgatctcatgtcctgcatgtccgtctctcgtgtaagcgtatttttttgctgccttgattgcaccttcgattgcctctgtaccactgttggtaaagaacacacgatccatcccgctcgcttttttcacacgctctgctgcatggatgattggcacattgtaatacaggtttgatgtatgcataatcttatcgatctgtgcttttaaggcatccccatactctttgttgccgtatccaaatgcctgaactgcgatgcctgccgcaaaatccagatattcttttccgtctgtatcatacagataaacaccctcaccgtggtctaataccagtgaaaaacgattgtatgtgtggaggatatttttctccgcctcattgatatatccttctttattcatgataaaacttcgtctccttatctcctaaaatggcagttccgattccgcggttcgtaaagatttcaagaagcaggcagtgtgcgatacgtccgtctaagatatgtactcttgaaacaccgttctcgatcgcatcgatacagttgtttaacttcggaagcatgccgccgccgataaatccgtccccgatcagttctctcgcctctgatacacgaagctcggagatcagtgtatctttgtctttcggatctttgtaaacgccctcgatatcggttaaaaatgcaagtttttcagcttttaccgcttttgcgatcgcacatgccgcatcatcggcattgatattatagctgttgtattctgcatccattcctaccgggcagatgatcgggagaaaatctttttccagcagatcatataaaatctgcggatttacctctgtgatctcaccgacaaaaccgatatcctcaccatttgagtatttcttttctacttttaacagtccaccgtcttttccgctgatgccgactgcattgacgccaagctcctgtaccagtgtcaccagtgatttattgaccttatttaacaccatctcggcgatctccatggttgcctcgtccgttttgcggagtccattgataaatacaggctccatgccgactttgccaacccatttactgatttctttgccaccgccatgcacgatgatcggcttgaatccaaccagttttaacagagtgacatcctggatgacgtgtttttttaattcttcatctaccatggcgcttccaccatattttaccacaatgatcttacggttgaaacgctgtatgtatggaagtgcttcgatgagcacttcggctttctgcaaaagttccttcatattgttatcttccattagtttggttctcctctataaaatcttgatattgccgtacgaaactctgattcaggttgtgtttgctgtggccgcagcagcgccagttttttgaagagtttcgcgttggcctcatatctgcctgcctatgagcggtaatcggcgttaatttttacatagtcgtaggttaagtcgcagccccaggcggtagcctgtgcagcacccattttgatgtcggcgatggcggtgactgcgggttcggataagattttggttgcttcttcttcgctgtagtcgacggcgactccgtctttgatgatctgcatttttcctgcagcactctcgaagaataagtctactttttccggatcaaactgtgcgccggagtagcccatggcacagaggattctgccccagtttgcatcgtgtccgtagatggctgctttggtgaggcttgatgtgatgacggatttgcttaagatctttgcctgctcttttgtctcggcaccgattacttttacctcaaacaacgcagttgctccctctccatctcctgccatctgttttgcgagtgtctcattgacaaatcggagcgcctttgtaaaggtctcataatccgcatttttctcagtaatttttgtgttctctgccattccgtttgccaacaggagacaggtatcatttgtggaggtatcgccgtccacggagatcatgttataggtatcttccacgtccgcttttaatgcctctaacagcagctcctgtgaaattgcagcatcggttgtcacaaaacttaacatggtacacatattcggatggatcatgccggaacctttgcacatgccgccgattgtgacggttttgccggaaagctcaatctcaacagctacttctttttcatgtgtatcggtcgtcataatcgcaagtgctgcattatgtccgctctcgatatcgccatttaattgtgggaccatcgtttcaactcccgcacagatgcggtcgatcggaagctgcataccgatgactccggtcgatgccacaagcacctcatcggttgggatctgaagcagtttgtttactttttctgcagttgctttgcagtaacccatcccctcttctccggtacatgcatttgcaatacctgcattgacaatgactgcctgtgcctttttactgtcatatactacatgctgatcccatttgaccggggcagcttttacaatgtttgtggtaaatgttcctgccactgcacatggtacttcactgtagatcattgccatatctgttctgtctttatatttgattcctgctgctgtacttgctgccttaaatccttttgctgcggtcacgccgcctttgatctgtttcattttaacctccattcctgcactgctttctaatgtaaacaaaattttcatttgcatctcaagtttgtgcgtaactcaaatccttcatgtaaaaattgtatttttcgcactgtctgttcctgtgttttacggattaaatacggtctggttttcttcgtttgtgacatattcataataattgacatcctcgcggaacgtccatcccattccctgccagaagtggtttccgatgtcatttttcttaaatgcaatcagattgaccttgttgacatgttcacgctttaaagccgcaaggcacgcttccaccatcttctgtccgatgccctgctttctgtaatcctcatgaacgcagacatgatataaacatccgcgtctgccgtcatgaccgcacaggattgcaccgatgattctgtcgttttcacacgccaccatactcgtggtcggattgcgtctgataaagcgttccacaccttctttcgaatcatcaatactccggattccaaacccgtgaatccccatccacagtgcatgtacctcctcaaaatcctccattgtcatctcacggatgtttacttttttctcttccatgtctttgattccttttccagcataactgtttcgtccagttactttttacctcttattaaaaatataattcagtgtattactatgtaatctttattactatgtaatctttaattactatgtaatcttcaattactatgcatccatctatgatgcttacgggaacatcggaaccatatttaagccctctgcctcatcaaaaccgaataacaggttcatgttctgtaccgcctgtcctgctgcaccttttaccaggttgtcaagtgcgcccatcatcacgatacgtccggttctctcgtcaatcttaaaattaacatctacataattactgccctctacccattttgtctccggacagacatctttttccagcacacggacaaatttttctttgccataatatttatcatagactgcctttacttcctcataagaaggaaggctgccatctgctttttttaccagtgctgcatactcggttgcgaggataccgcggttcatcggaacaaggtgcggggtaaaattaacaacgatctctttgcctgccgcataaccgagctgctcctcaatctctggcgtatgacggtgatttgtcactccgtacgctttcatattttcattgacctcacagaacaggttcggcagctttgcaccccgccctgcaccggaagttcctgattttgcatcaatgatcagcgtattcgggtcgatcagcccctcttttaccagcggataagcggtcagaatggaacaggtcgtatagcagcccggattggcgataagtcttgctccttttactttatcacgattgatctcgcagagaccatagacagcttcctctataaactgcggactcttgtgctcgatcttgtaccatttctcatagacggaaacatctttgattctgaaatcagcgcttaaatctatgatttttaccttatttaatatatcctctgtcagcacacctgccaaaaatccctgcggggttgctgtaaagatcacgtccacctggcttgcaagctcatccatattatcgtctagacatacatcatccacgatctcaaacatattctggtaaacttctgcatattttttatctatgtagctgcgggatccataccatttaatctccacttctttatgtcccattaaaatacggaccagttcatttcctgcatatccggttgcaccgatgattcctgcttttatcatttttctcat

SEQ ID NO: 346 - DNA, 12341 bp, unidentified
  source 1..12341: mol_type = unassigned DNA
ttacatcttatctatgagtgcggcacaggtttttgctgtgagaagtccatcaagaacatcttcttttttgccatccttaacgatttcgccatttgcaataacaattattctatccgcaatattaaggatacgctcctgatgagatattataagaatagtgccgccttttttctcatacattttttcgaatacagaaataagattgctaaagctccaaaggtctattccagcctctggttcatcgaatatagtaagctttgtgcctcttgccataaccattgctatttcaattcttttaagctcaccaccagaaagacttgcattaacctcacgatttatatattctcttgcacaaagtccgacatctgaaagataatcacaaatttgagcaaccgaaagttttttgcctgttgcgagatttattaaatcctgaacggtaatacctttaaaacgaaccggttgttgaaagccgaaacttatacccattcttgctctttcagtgatatttttgcctgttatatcaacaccatcaaatataatctgaccgtctgtcggagtatatatacctgcaataatctttgcaagagttgattttcctccaccattaggacccgtcaatgcgacaaagcgttcatcaatcctcaagctgacattgtgtataatttctttttttccctcgtcattttcagctaaaaaagaaatattctttaattctaacattttagactccttctatataatagattccgtaatttatattatacaccattttttgcattttgcgaagtattatacccgactttttaaaatttagtaaagaagctttccctattagcaattattaagagcttgttctaaatctgcaatcaaatcttccttatcttctattccgcaagaaatacgaataagctctgctggaactcctgccgctttgagttgttcatcattcatctgacgatgtgttgatgaagcaggattaagacaacaagttcttgcatctgcaacatgggtttctattgcagcaagcttcaagtttttcataaacgcttccgctgcttttcttccaccctttaagccaaatgatacaacaccacaaccaccattaggaagatatttttgtgcaagtgcatagtatttatcacttggtaaaccagaataattaacataagctacctttgggtgattaagcaaatattctgcaaccgcctgaccattctcaacatggcgaggcatacgaacatgaagtgattccaaacccaaatttaggagaaatgcattttgtggagattgaatacaaccaaaatcacgcataagctgtgcagtgcattttgttataaaagcgccctcctttccaaacttttctgcatatgtaattccgtgatatgattcgtcaggtgtgcataaaccagggaatttctctgcatgaaccatccaatcaaacttacctgaatcaacaatagctccgcctactgctgcaccatgtccgtccatatattttgttgttgaatgtgtaacaatatctgcaccccattcaatgggacgacaatttatcggagttggaaaagtattatcaactataagtggaactccatgtgagtgtgctgcttttgcaaatttttcaatatcaagaacagtaagtgcaggatttgcgatagtttcaccaaaaacagcacgagtattatcctgaaatgctgtattaagttcttcctctgtgcaatcaggagaaacaaaagtagctgtgatacccattttagccatagttactgcaataagattaaatgttccgccgtatattgatgacgatgcaactatgtggcttccacactcacaaatattaaagagtgcaaaaaaatttgctgcttgtcccgaagatgtaagcattgctgctgtaccgccctcaagctccgcaattttagccgcaacatggtcatttgtaggattttgaagtcttgtatagaaatatccagattcctccaaatcaaaaagcttgcccatagcctcacttgtatcgtatttaaaggttgttgattgaataataggaacttgtcgaggttcaccatttcctggagtatatccaccctgtacacatcttgtgtttatcttatattttgacattctaaaagctcctttgataaattttgaataatttctcatataattatatcagattattgcataaagtcaataattcctctatgcagagtttttgaacaagtaaacgaaaaatgatatatcaggcaaagaaataaagattgacaatttaatggctacgaatattagcttaccttcttcataaaataattgaaatggaaagtatgaagattatcgttatataagttgcatattctaacgcagattgatataataaatttataaaattaagattgaaaggaattaaataaatgagtacatttgaaactaaagattacattctacaagaagatttggattatattgcgaactcttttcctgatattaataagcttaaaaattccactattcttgttacaggtgcaacaggacttgtcggctcttatgctgtaaaggctcttgcagctataaatcgtattcataatgctaatatgaaaattcttgctcttgtaagaaatcctgaaaaagcaaaaactgtattcagcaaacttctcgagcgtggggatatttcacttgttatcggagatgttcttcaaaaaatccaaactgaatataaaattgattacataattcactgtgcaagtgttactaattctaaagaaatggttactaaaccagttgaaacaatctgtgttgctgttgatggtacacgaaacatattagagcttgctaaagaaaacgatgttaaatcagttgtttatatatcaagtatggaggtttacggttctcccgatgcttctctaccatatgtaagcgaaaataactatggttatgtagatgtacttaatgtaagaagttgctaccctgagggaaagagaatgtgcgaatgtctttgtgcctcttatgctcacgaatataatcttcctattaaaatagctcgtcttgctcagacctttggtgcgggagtaagcaaaaatgaaacaagagttttcgcacagtttgcgagaagtcttataaatgaagaagatattattcttcatacaaaaggagaatccactggaaactattgctacactcgtgattgtattcttggaatactttatatacttattcgtggtgaaaatggcgcagcatataatatcaccaatgaaaatacaaatatgaccatagcagaaatggcccaaatggttgcagaaaaaagcggaaaaatctctgtggtattcgatattccaaaagatgcattgcaatttggctatgccccatcagtaaaaatgaaactttcatcagaaaaacttcgttcactcggttggaaaagtgatattgacttatcagaaatgtatgaaagaatgattaaaagttggaaaaacacttaaatcaaaaatagtactgcgttgtataaactgtgttattttattacaaaaattaacataataaatggttatatgtacacgaacacaaaaagtcacttttgtgtggtaatttttcttaaaattcgatacttatatctattatgtaatctaaaaaataaatctaaaaataacataataaagactttttattttaaaataaatataacaaaaaataatttagtaatataataacatacccaaaaatccctttatattgcaattttcagctaccaaattaatattttcggtagcttttttgtttttataccaaaataaaatttacttatttttagcttgaccaattcgtaaaaagtaagtataatgaagtaagaattatgctttaatttcgcttataaaaagtcatttttatattaatatttcacgatgaaatttatactgttttaattatatatttgagaatctatttctaagaaaataataaggagaatttataatgaatgaacaacatggtcttatattcgatcgtttaaatgaattttttgaagaactcaatcaacaagatgttgcgccaaatcaagaagtaatagaactttatattaaagaaatatatgctgaggtaactagcctaaatgcagataataatccctatctatcaagacattccgttttagagcgtttatataatttagcagacttaacttgtgattttgctgaaatttttgaggaaaagttctttaatcatcttaatgctcttaattttagaaatattgagcttaaaattgcaaaacaatataaaatgaatggcggaaatgatttttggagaaatatttgggaaatatatgcagatatagctttgcattactctgctttaaatattgattctaaagctctcagtaatgctaaaacagctttaaaactaatgattagaacagaagcaaagccagaccctaagtggatttctttccttaatagcagaattgcttatgcctatcaggatattgctccggataagtctataaattattttaataagtcttctgatgcacttattgaatataacaaagttaaagattgctatgaaaacaatatgggaattatattaaatgatataaacattgcaataattatgcttgagattaatcaggttgacgatgctattaagcaatgtctaaagtgcttagatacattaaataatctttttgaaaaatatggagaaaatgaagaattagtaaattatatttcacatacatatagtattcttagcagagcttactttgaatcgaaagattacgataatgctgaaaaagctattgaaaaggggctttctttctgcaaacgcctacaagaaaacaaatttaataattattgtgaaattattgatgttctttactctactaagagtcttattctttgcgaaaaacaaagatatatgaaagctattgaattacaatataaattgcttgatgtttggtcggactataaagaaggatttaagcgttcaactaaaatttgtgatatatatgtcgaaataagtatgattttctcaaaatatcttgatgaacaaggtatgtctattgaatcagcacgacttgcttttagagagattaagcaatatactgataatgaattatttatgtcggataaatatgctttatctgttcgcagaagatgctatataaatcttgctgatgcttatttcagagcaagaatgtatcaatctgctatatcttcttacactaatgctttggatattatgaaagaagaatttgatatggaatctgaaaagatttcacttgtatattcatactcctataccttatatcagcttgccatgcttgattttaaatacaatagaaaagctgaaggttgtaaacgccttagctattcttatagaagtgtttgcacacttaaaaaatatggtggtgtttacgaagtattatttaatatggttagaaatgctctatcaacttatgagaaaaaatttgacggaaaaattattgaacttgatactgcacagtaatattaaaattctatttgaatacacaaaaaatcctcgaagtcatttttcgaggattttttatttatagagtatataggaatgtagtgaaaacgatttgctatatttttgaataaaatgccattaaaaaggttggattaacacaaattttatgttataataaaaactgaaattaaaatttgaaaaatggaggatttttcatggaagaatataaaaagcagtttattgaatttatggttgattgtcaggtacttaaattcggagatttcgttacaaaaagcggccgtcaaacaccatttttcgtaaatactggattttacagaacaggtgcacagcttagaaagcttggacagtattatgctgaagcaatcaacaaaactttcggacttgattttgatgttctttttggaccagcatataagggaattccgctttccgttgctgcaactattgcaattagtgaaaaatataacaaagacattcgctattgctcaaacagaaaagaagtaaaagaccacggtgataagggtattcttcttggaagccctatttctgatggtgataaagttgttattattgaagatgttacaacagctggtacatcaatcgaggaaacacttccaataattaaggctcaaggagatgtaaatccgattggacttgttgtttctgttgaccgtatggaaagaggaaagggtgaaaaatcagcactttccgaaattgaagagaaatacggacttaaaacaactgcaatagtaactatggcggaagttgtagagcatctttacaataaggaatataagggcaaggttataattgatgataagcttaaatccgctattgacgcatactatgacaaatatggcgtaaaataatattgaaaagtctataaaagtagaaccctcggtttgaccgggggttctactttttatagctttgtatagcctattgaatgcagcaaaaatgaaattactgtatgctttacatttgaaaaaatataatcaaattcaccagcatactttacaatttcgccattaaagcccttcttgaaacgatatactccataattagaatgattttcttcatcacaatgaggtattcccataaaatcatatatatcacattgtgattcaatagcccattttatcatattccactgcattaaataatttggcataagatttctttgagtatcacttgacgctccataaacatagctgactctattgccatatcttactgttaatgctcccgaaattgcctcaccatctggagagtagcacatataaagtctggcattttcttcaaaagcataaagaaatttctcaaaatattccttagagcgaatggcaaaaccatctcgttttccagttgcttgcataagctcacaaaaatcatcaagcttttctacgccataatatttgcaagaaacgcccttacgaacagcaagccttatattatatctccactttgaatgaaacgaggaaaaaatctcatcttcggttttatttttaatatcaagtatgtaattacgctgacactgaattgtattatcttctggtgtattggcattatatttaaaacccaagcgttttaaattgtttatggattcaatatcatcatatgaaatcatagggtcgattttaagcatatatgctttgtgtttttctgcaagaagttttgcctgttcaataattttgctaagtatatccaaattgtgacaatcacacacaggaccccttggagcatacataaaaactgtatgcataagcggaatattcttaattagaatttgcatagttcctataatatttccgctctcatcacgaattattattctctccgatttccattcgttttttattttgcaccaattttcggattgtgtaaaactacctgaactatttaagaatacaaatttttcatattccgacatatattgtttcattttgaaattcctccataacacttctgcattatctgaataaatcaaatataactcaggaactgttacagagtattctgttttttgcaagaaaattgtcaaaatgtgcttttcatactaaagcctgtaaatttcttatcacttatgctgtaatataaaatcgtatctgaatattttgaagtgttgtcatttccacttaaaacaagtatcagttcatctccattagaaaaaactgtatattgtgagtttgaaatcattgatgaaataactactcttattggaaatgcaaacttatcatcggctattgttgaaaaaacatagtttccgttatctacatacatttcaggcatataaattgatgatatataatcatatattttattactctctaagggttgttcggcaacatcttcttcatattcgttttgttcagaaaaatacatatctgtgagtgctaattcagaatattgcgattccataggtttcgttaagtaatctatggcagaacacacatcttctgaaatttctttgcttttttgatttatttcttgagaatctggtttaggtggattttcacttcttactctgaaatataagatactgttatctcctaatttcacaactaaatctaaaatttttgttttattattttggtttgtatatttgaaatcttttatatgcataattgatgcattattgtcaaattcaacattttgagaaaaatctgtattttcttttggaatattatttatatcaagagtttgaataacataaaatatcatctcattaatgttctccaacataatctttttcaatgcttcatcgtcataattatatctatcatcacccaaactatttgcaaacatatctaagctttggtcataaatgtgacttgtaatatatgatggtgcggaaatcaattcatcttcacgatatgagagccacggataaaaccgagagttatctccgtcatctacaaagataagctgtgttatatttttcttttcctcagtaaagatttcatttttatagtcaggcaacatttttccacagaaaattatacccgttatttccgctcccatagcaagtgtcaaaagcaaagtcggaagtataaatttcttaaatttgctcattgattttaccctcactttgctttatacaaatacttataatagtacctttgccaagttcactttcaagctctatttttgcattatgctttttggcaatctctgcacacagagcaagtcctaagcctgctccgccaagttttcttgaacggactttatctgccatataaaacggttcaaaaattcgctttttatcttcctcagctattcccataccataatcacgcactgtgattacagcatactctccctcactacgacaagtaagctcaatctttcctccctcaaatgacgctttaactgcattatctacaaagttatatatcactgatttaaataaatctgcatctgcatttattattaaaggttcaatatgagtaaaaagtgttatagacttagctttcatcataggttcaaaaactatactaagttcattcaatattacatctgttctgaccggattcaactcaagctcagaatctccagaggaaacaagttccataagcttaccagaaatagcctttaaacgctttgattcctctactataatagatgaatattcattaagctcatctggggttacatttttctttatccttaaaatatccgcaaaaccaagtatagatgtcaatggggttttcatttcgtgagaaaggctatctataaagcgttttctatcctcggctattgattctattctgttataattttcctcaacagaaacagccatagaattcacattatttgcgagctgttgaaattcttcactgccacttgtacttactctaaggctataatctccactggctattttattgatggttttattgattctgccaagaggtctgaaaagtaattttataagtaaaagtaagattacagcaatcactgctgccaaaacaacagaaagaatctgcacaaaaaatagttccttatttctctcattataaacttctgtaatattattcgccgtaaaaactttatattccttgccttcaaagcttgatattgaaccaacaaacatatatgtattttctccacaatccaatattattgaggcgagattgtcttcacttgtaatcttttcagaaagtgtttttatatcaggcttttcttctccataatatgatatgttattttcgctgtctgatattatggcaagagcgttttcttcaagctgttgagaaagtatatgctcgataaccttgtctatatcatctttggagagcataaaggcttctgatttcattctttgataagttatattattgcttattgatgcacaaataaactcgtgtgaagacactgcacgacttctctcgcgagttattgtcatatgttgattatttgaaagaacgactaatgctgtggcatttatagcggcaattacaagaaataaagccgaaataaacaccttaaaccatagcttcaattagttcacctctggttatgatttactttcaagcctatatccaagctttggaacggttatgagagaatcctgcaaatcaagttttttgcgaatttgctgaacatgagtatctactgttcgagtttctcccatatattcatatccccatactgctgaaatcaagcgttctcttgtaagagctatatcaaggttttgcataaagaataccgtaagctcaaattcttttggtgtaagctgaatttctattccttgcttttttattatatggcgtgaaatatctacagttatatcgccatattttattatattgttgtttttatgtctgcgtcttagtataacctcaattcttgcaagaagttctactgcctcaaatggcttaactatatagtcctctgccccaagctttaaaccttttaccttatctgtaacatcttgtaaggctgtaaggaatattacaggagttttttctgtatctatgtgttccataacctgaaaaccattgaaatttggcaacattacatcaagcaaaactaaatcataatcgttctcatttattttttgaatagcagtttttccgtcataacaagaatcactttcatatccagctattgaaacagttgcctcgagcatttttactatatttttatcgtcctcgactataagcaatcttatcattgaatttcttcctttaaaataaatttatcattaaaaattatagcataaatatagaattgtttaaacctgtttatagagtaaataagcagaaaaaatgtcataattttgcaaaatttcagaaaatcattaaatttaaaattaatattcatttttcagataatccaccgtaaagctattcgttgacacttttcactctcaatgctataattacttatattcaaaaattattttatattgtaatcaagcaagtggtgattttatgagcaataatcaatattttacagacgataatcaatatagagagtttctcgataaaattgaggttttaaaccacgatgaggaatttgaaaaaattattgatataataatagaaattcctgaaaacgacagaccttatgaacttaatgtactattatcaggtgcttattttagtttagatagatatgatgaagctatcgaacttttagaatctattgaacctgatgataacgaagaagaaattgctaaatattatttctatcttggtatgagctattatcatagtggaaattatgatgaggctatcccttgctttgaaaaaactcacgaaatagacccaaaggatatagatactttgctttttctttgctttgctacatctgaatatggtaatgatgaacttttttctgaatattcacaaaagcttgaagctttagataaagaattatatgattcatattttaattctcaaaatacagtagctgaagcttattctgatgaagaagttataagccttgaaatgtttatcgaagataacataggtgaatataataatgttttgcgagatgtttcaactactgatataagctgtgaccttttgcttattccaccaaatgatgaacatgagttttatacgcttgtaacctgtggaatgggtgctcacaaaatgactgttccaagtgatgaattttatgaccgagctgagcttgttttatgcttgccaaaaagctggcatgttaaaagctcgaatgaaaaatggttctggccactaagacttatgaaatctcttgcacatctacctatattggaaaattcatggattggttgggggcatacaatctcaaatggagaaccatattttgataacactgaactttcgggtgttattcttggcaattcgcctttaatggaggataatgttttagaacttccgaatggtgaaaaggtttgtttttatcagatatatcttctatatgaagaagaaatgaattataaaattgataccagtgcagacgatttatttaatcttgttggagagctaaatcctgttcttgatattagcagaaaaaatttctgcgaaaatggacgcaagaaatataaaattccaaaatcaattatggaagacttatttgaaacaaaagattcacatactggttgttttgctacggacagaataattgtagacggtgctgaaatcagatttatttatcgtgaaatgcctctcgataatcaggatagtggctggagatttatggctggcgatgaagatgatgagtatatgaatgatacaagcaaatctggaatatatcatctgaatactctttgcaactatgagccaagtattcttaaatttcttgacgaaccatacggctctatgtttatcaaaaataaaaatggagaatttgtcaagtttgagagataa

SEQ ID NO: 347 - DNA, 13919 bp, unidentified
  source 1..13919: mol_type = unassigned DNA
atggatacaaagtatatattcgtaacaggcggagttgtttcaggacttggtaagggcattacagccgcatcattgggaagattgttaaaggcaagaggatataaggttacaatgcagaagtttgacccttatatcaatatggacccgggtacaatgagtccgtatcagcacggtgaagttttcgttacagatgatggtgcggaaacagaccttgaccttggacactatgaaagatttatcgacgaaaacctaagcgtaaattcaaacgtaacaacaggtaaaatttattggtcggttatttcaaaggaaagacgcggtgactatgagggaagaaccgtacaggtaattccgcatatcacaaacgaaatcaagtcaagagtttaccgtgttgcaaatacgcaggacacagatattgttattacggaaatcggcggaacagtcggtgatattgaatctacaccgttccttgaatcaatcagacaggttgtaaaggaagtcggtaaggaaaattgtatgtatatccaccttacacttgtaccgtatctttcaacatctggcgagcaaaagacaaagccgacacagcacagtgttaaggaacttctaagccttggtattcagcctgacgtacttgttttaagaactgaaaagcctcttgaagaaggacttgcagaaaagattgcgctattctgtaacgtatcacctgaatgtgttatcgaaaaccttgaccttgatacgctttacgaagtccctcttgcacttgaagaagaaggacttgcaaaggttgtatgtaaccgtcttggacttgaggacagaaagccacagcttgacgattggacaaagatggttgacgtcgttaaagaccttatgaacggcggcaaggaagaagttacaatttcacttgtaggtaaatatgtatcattgcacgatgcatatatcagtatcgttgaatcgctaaagcacggcggaatacagaattactcaaacgttaatatcaagtggataaacagtgaagaagttactgcaaagactgtggataaacttcttaaagattctgacggtattcttgtaccgggcggttttggtgacagaggtattgagggtaagattattgccgctcaatatgcaagagaacacaaaattccgtatcttggaatttgtcttggtatgcagattgcggttatagaatacgcaagaaacgtacttggctacaaggacgcaaattcatcggaacttaaccctgacacaactcaccctgtaatcgatcttatgcctgaacaacgtgacgttgaagatttgggcggtacaatgcgtctgggattgtatccatgtaaggttacaccgaacacacttgcacaaaaggtttataacagtgatcttatttatgaaagacatcgtcacagatatgaatttaataacttctacagaaatgaaataacagacaagggaatggttatttcaggtcagtcacctgacgataaacttgttgaaatggtagaaattcctgatcacccatggtatatcggtgttcagttccaccctgaattcaagtcaagacctaaccgtccgcacccattgtttgcctcatttatcaaggcggcattggacaagaagaataaggcggctgaataattggattgcctgcttgacagaaaggtaagattaacttgaaatattattggaagtatataaaaccgtatatgttgtttttcatattaggtcctttgcttatgcttacggaagttgcgggggaaatcgtgttgcctaaaattatggcgtcaatgattgacagcggtatcggtgcggaagtcgcaggacttggaacgggatatattttgtcgcgggcgttgtttatgattgcgtgtatcggtattatgataatcggcggtatcggcggtcatttctttgcgattagggcgtcggtttatttcagtgcggatttaagacagggagtatttgaaaaggtacagaacttctcatttaagaatatagacaacttttcgacaggctcacttgttacgcgtctgacgaacgacattacgcaagtgcagaatatggttagaatgcttctgattatggcaatgcgttcgccgggtatgctgataggcggtattataatggcttgttcaattaataaagaacttgcgcttatattggcattcgttattccgatactggcggtattgataggattgctgttaaaaaccgcgtttccgcgatttggtgcaatgcagaaaaaacttgataatcttaattcgggtatacaagagaatataacgaatgttcgagttataaaatcttttgtacgacaggattttgaaacagaaaaatttgaaaatgccaactcagaccttatgaatactacaatgagagccttgaaaatcgttataacgacaatgccgattatgatgttggcaatgaatataacaacattgcttgtggtatggttcggcggtaattttgttgtaggcggaagtatgggcgttggcgaccttactgcgtttacaacatatattacgcaaattcttatgtcacttatgatggtttcaatgcttttcttacagctttcgcgtgcgcttgcgtcatcgacaagaattacggaagtgcttaaaacagatgtagaccttacagatgaaaatgcgggtcaaaaggataagaaagttgaaaacggcagagttgaatttaaaaatgtttctttcaagtattacgaaaaacgtaaagaaaacgtacttgaaaatatttcgtttaccgcagagccgggagaaattgtcggtataatcggcacaacaggctcgggtaaatcgtcgcttgtacagcttataccgcgtctttatgacgttacagacggtgaagtgcttgttgacggtgtgaacgttaaggattacggtcttaaaaatttgcgtgacggcgtcggtatggtacttcagaaaaatgtattgttcagcggaagtatcgaagaaaatcttcgttggggtgacgaaaatgccacaatggaagaaattcgtgccgctgcggacgccgcacaggctgacggatttgtaaacgcatttacggacggctataatatggagctcggacagggcggtgtcaatgtttcaggcggacaaaagcagagattgtgtatcgcaagagcacttttgaaaaagccgaaaattcttatacttgacgacagtacaagtgccgttgacacagccacagaggctaaaatcagacaagcgtttacaacgagtttgaaacactcgactaaaataataatagcacagagaattacatccgtaatagatgcggataaaataattgtgcttgaggacggaaagattatcggtatgggaaatcacaatgagcttatgaagaattgtgaagaatatcgcgatatttactattctcaaacagataaagaaaaagaagtttcttaatatttgtacatcttatcagcccacgataagaaatgtattgactatgtgggcagaaaggctatggaagtaaaatgcctccaatgggaccaccgaacagaaacagaaatcagaaaaaacagaaacctaaaaatacaaaggcgactgcaaaaagactgttttcgtatttggaacaggaaaagcataaaattgcggcggcatttgtgtgtgttttggtaagttctgcgtcaacattgtgcggctcgtatcttttaagaccgattattaacggacttatagattcgaccaaaacatctcagcagaaaatcacttcgcttatggcaggacttgcacttatggcagtggtttatgtactcggtgtcggtgcaacatatttgcagggacgtattatgatcagcgtttcacagggtactctgaaacgtatcagaaagcatttgtttcgtaaggtgcagaaacttcctgtcagatattttgacacaaaccctacgggtgatataatgagccgttttactaatgacgttgatattatcggcgaaatgcttaattcgactcttgtacagattttctcgggtacgataactttaatcggtacacttgcacttatgctttacacaaactgggtgcttgcggttgtgacgatcgtggtatcaccgattattgcaaaaatcggaactgccatagccggtaaatcgcgaaaatattttatgaaacaacaaaccgacttgggtaaagtaaacggttatatcgaagaaaccgttacaggtcaaaaggttgttaaggtatttaattatgaagaaaatgtcgtaaatgaattttccgagcttaatcaaagtcttagaaattcacaggttaaggcacagtttataagcggaattatggggccttgtatgaacgcaatgagccaggtcaactacacattgacagcttgtgttggctcgataatcgctttcgcgtcacgttggggcggaggtgttccgttttccgcacttgacataggcggtcttactgttttcgtaaactattcaagacagttttcaagacctataaacgaacttgcacagcaggttacaaatattatgtcggcacttgccggtgcggaacgtgtatttaacgtaatggacgagacggaagaaatagatgacggtaaaaaacttgtacttgataaagtacacggtgacgtcttggttgagggtgtgacattcggatataatcccgataaaacaattttgaaagatgtttctgttttcgcccatccgggacagaaaatagcacttgtcggatcaacaggtgcgggtaaaacgacaataaccaacttgattacacgtttttataatattaataaaggaaaaatcactattgacggtgttgacattaaggatataagccttgaatgtttaagagaaaacatcgcgatggttttacaagatacacatttgtttacaggcacaattatggaaaatatccgttacggcagactttcggctaccgatgaagaagttcgacaggcggcgaaaacttcttgtgcggatatgttcataaaaaatatgcctgaaggctatgatacaatgctaaagggggacggttcaaacctttcacaaggtcagcgtcagcttttgaatattgcgcgagccgctttgtcaaaagcaccgatacttgtgcttgacgaggcgacaagctccgtcgatacaagaacggaaaaacatatcaatgagggtatggacgctcttatggaggacagaaccacgtttgttatagcacacagactgtctacaattcgtaatgcggacgcgattatggtacttgaaaacggtgagattatcgaaagaggtactcacgaagaattgcttgaaaagaaaggcagatattttgaattgtatacgggactcaaagaacttgattaatttatgctatatggcatagaaaggaatggtcagataaaatgaaggtatatcagttaatctatacctctgtacagcatagcctgtccgatcccgaacttggacttgtcaatcagtcggggctgagagtgttttcatgcacacagggacttacaaagcaaaatattgatgaaacaataagatttgctacttacagacttccgaaaaacaatgaaattaaatatacacagacaccttgcgatccgacagtgcctgaactgtttccgaaaattttcagaacgttcagactttcagatggaagatatgttgcaatgcagatttcttatgccggttatgattttgacggtcaaccgggcaatgtgtttgctcatgcatttatatttgatgatgttgacgaaaactttttgccggaaagatatatcggacataagcgttacagaacgcatcttaccgaaaaggatttaaacggtcagattgttcattatttgaaaccgcttgataatatcgcaccgtctgaaggtgtcgaaaataaggttatcaactttatcggcgaacataagtatgaattgacttatgttttagacagagcgacaagacttctgacttcagatgatattaaaaatatatgtatcgcggcaaatgacgcggaaacggtgcagatgtatttgcttgcattaaagtggattttaccaatcagtctttccgaaaacacaggtatttcaacgtataacgtgtacttaccgtcggataaacaaaaacagattgtgttccacggaactataaaacagcataataacataacaggtcaagccattgaggcgagaaaaaattgtatctatattgatatagaaaatacaaaatttccgcatagtgcaaagtcaatgctgttgggatttgacattgatgaacttcgtgaaatatacagaaagtatcatttcacgtcaatgacacagctgcttgactggcaggcaacttgggaaaatacaaccaaaacaggtataggcggaaaacttattaagctaaaaaaatcggcaggtgataatgctttcaaaacacgtgtgcttgaactttatccggctataaacgaccttaatatgaaaaacgtaaaatttgaactttcaaagattatgtttgacaatattgaattgttcccgaatgaaaaagaacgcgtgacggaaatttatatgggtcaatgtatcgaaaaactttgcaaaggcgagaatgttgattttgtaaatcctttgggcaatggcgaaaatgcaaaagaacaggcaaatgcgataagagcaaagctttcgatttatatgaattttgttcgtgaaaatatggacgatatttcagataagaataaaaccgaactgcttggactgttcggaagtataaagcatatggcagaggttgatacctggaaatcgttgtttacaaataaagaagatttaaaattattcgtgcttttggcatcgcagattgtcataacaggtacgggacttaacgcctttacgcaggtaaagggttgggaaaagtccgatttggcagaattggttgcatattttgaatcttcgacaaaagatccgttcttaaagaaaagctgtataaagtatatatacaacaataacttggattggtctaagtacggtatttcaaaaacacttcatgcgaaaacaaaaggcgaaagagaacaggatttgcagaaaatcagacgtatgctttcaaaggtcggatatataccgtatcagcgtgcgacatatacgagcttgaaacctgaagttacggacgatataagaaataataattcaccgcttttgatttcaagactgctttatgcggtttatcgttggcagggaacttacggcaatcagatgaaagccgaaaagtgtgcaaacagagtcagaaaactgcttttggaaatgagaaaaacgcagacttcgtgctttaattttatgattcctaaattggcacttgaaataatcgagtcaccgggacattatcacgaagttatgattaatacggaaacaatgcctccgagcttttggaattggttcttaatcggctataacaagagcaaggaagacgaggataaaatgcttgcgtatacgagagtgtacagtgcaagtaaagcgaaaatgtcgagaattccggcaaagaaaaaaatgcgtgaaacttttaaagacgtagttgaataggagagattatgatgaatataaaaaagaaaattatggtaatatttgcaaccggtattatggcattttcagcatcaccattcgtattggcggcaactccggcacctgcaaacaacactcaacaggcagaacaagttgacacaaccaagcaagatacggctaatcaaaataacacagccaatcaaaatacacaggcacaaattccggcagcaggaaatgtacaaactcaaacggacaattcaacacaagtttcaaataagaaatacttgtcaaagggatgggctgtattttggtttatattcactattataatcaatgcaattatcagcttttggattggaaacagattttataaactttcaaagaaagataatcacctttcatttgaaatcagagcattgagaaaagatattgaggaaaaattcgtaaacaacgtaggcggtttttcagaacaagaagttgatattaagaatctaaacgaaagtcttgcacttgatgatgaaggtttaaagccgactgcaaaacagcctgcacttaatgaagtcagtgcggaagaagaagcacgtttcagaagatgggaagaggcacagtctaaaccgagaaatgaaagagtaaagcctaagtcagtattaaaagaagaatttgacgaagaacttgatgacgttaagaaaataaagagaaagaattatcagcctaaacgtaatccgagcgaagattttgagggcgagaaagaaaacgaaaagtctgaaaaagtcgatatggacgctacaagggaaatcaagctaaagggcgagggtgtaaaatcaaaagccaaagaacttttgggtgatatattcccgtttaaagaggactaaaattaagtaggcaagccgtggcttgtttattgttaaaaagactgtcgtaggacagtcttttttgaaaagaaaggtactgttatggatttaaaagatgttcagccatatatagaggacaaagtctgtatggttaccggcggcggaggttcaatcggcagtgaaatagtgcgttcactgtcaaaactcaatgcagaaaaaatcgtaattgtcgatatatacgaaaacggtgcgtacagtgtaaaatgtgaagtcggcgacaaggtggcggttgaaattgcgtctgttcgcgattatgagaaaatggactgcattatgaataaatatcgtcccgatattgtatttcacgcggcggcacataagcacgttccttttatggagcttagtcccgaggaggctgttaaaaacaatgtaaagggtacagaaacggttgccgatttagccgaaaaatataatgcggacaattttgtgctaatttcgactgataaagcggttgagccgataagcgtgatgggtgcaagtaagcgttgttgtgaaatgtatgtgtatgaaaagtcgctgaaatcaaaacacactaagttttcgacggtgcgtttcggaaatgttttaaattccaacggttctgttattccgttgtttaaaaaacaaatcgaaaatggagttgtgacggtgacggataaggacgttacacgattttttatgacgataccgcaggcggttgagcttgttcttatgtcaattacgattgcgaatggcggcgaaatttttgtgtttgatatgggcggagcggtgagaatacttgacgttgcggaaaaagttataaaagacggtggaaaagtgccgtacaaagatgtaaaaattgagtttacaggtctgagaaaaggggataaacttcacgaaaaactgttttttgactttgaacaaccgcaaaaaacacgctatgaaaaaatattgcgtgtaaacggcagcagtatagaaaattttgcggaaatgcttgataagctgtacgaaaaagcctataaaaacgacagtgacggagttcgtgaaattataatgaaaatgacaaacagttaagggggaagagttatgaaaaaattgctttgtattataggtatcatatttgcgacaatgatgtcaacaacggcatttgccgaaatgttttcttttcagagcgttttgggagtgaatgatatatccgatattcaaagcgcggttatagtgggagataacggaaaatgtgcggatattgaacaggaagatttagaacagtggcttaatgtgtattggaattttcagggctatgagcctgtgattttaccgcagtcgaataacggctattattatattaagctatggaacaaggataaaacaaaatcttatgttgtgaatgcaaattcgggtatattagtaggaagatacggtgaaccgagcaaatctcacggagaggttaaggaaaattatttgtggtattttccgtatataggaaatgcaagaaatgcgttatatacggaaaattcaatattgcaaaccaaatatttatatgaaggatataacttgcgtgatgttacatctgatgatgtggcggttgtgcctgaagacaatatattttcatcagacggtgcgagcgattgggcgaaagaagaaatgcaaaaggcagcggcttgtaatttactgccgatagattttacaaatgaatatacaagaagtataacaagaaaagaattttgtgatttgatttatcgtcttaccgcaacggaatttaatccgattgccgactcaagaaaaggtcaacaggacgcaataaagcaggttatcgcagaaagacagcttgaagataaaatcagcgaagtttcatattccgattgtgattatgaaaaaattaaatttttgtcgggtgcagggataatttacggtatggacgacggaacttttgcacccgatgataatattacccgtgaacaggcggcggctattctttacagaacggctggatttttgggaaacaagacgattgtcgagccgaatggtacgacatttgatgatggaaaattaatttctgattgggcgagagagtctgtttcgattatgaattcaatgaagattatggaaggagtttctgatactgaatttgctccgaaaggcaactacaccgttgaacaggctattgcaacaatggtaagactttataattgttattaaaaacgatgttgcaaaaatgaaagaattgttgtaaaatacattaataactatgtaatttgggagagggtttaattggatatacatgaggcattgcaaaccgccggacagtatatttatataggttttcgtgcattgcttgaggggctgcaaaagctgttcggaatgttggcagattggtttcaaagtctgccatggccgaatgcgataaagcttttcagcaatgatacggctaataaatatttgtttttcggtattgcaatatacttgcttttgatgaatatatgggcattcgcactgttcggtgcggataaatcaaatgcaaagagaaaacagagaagaataaaagaaagtaaattgatgaaagtatgctttttcggcggtgcgacaggcggtattatcggtatgaatgtgttccgtcacaagacgctgaaaaagaaattttcggtcggtataccgattttgttcgtattacagcttattttaaacagtttcatactcggatttttgggattttggacgtttttctaaaaggactggaattttcaaagaaagtgtgatataataaaataagaatttgtcggaaaggaagatacggcagtggaattgaaagatattttatcgacagacgataaattgagaattatacaggaacttgtaccgggtaaacaaattacccttgcacacgttattgcaagtcctgaccctattttatatacgaaacttggacttaatcccgaaattgacttcggaagaagtgcaatcggaatacttacaatgagtcctgcggaaacggctattatagcggcagacttggctacaaaaacatcaaatgttgatttaagctttgttgaccgtttcagcggtacgcttataattacgggtatggttgcggacgttgaaacgtcacttcgtgcaattatggattatgccgaaagaactcttaaatttactgtttgcgagataacaaaaacatgaagaagataatacttatcggtagaagtgagtgcggtaaaaccacgcttacacaggcacttaaaggtgaaaaaatacattatcataagacgcagtatgtcaacagatttgatgttataatcgatacgcctggtgagtacatacaaaccaaaaacttgggaaatgcgattgcaatgtatacttttgaagcggacgttgtgggacttttgatgagttcaagagagccgtactcattgtatccgccatgcgtaacaccgctttgtaacagacctgttatcggaatagttacacagataaacagtgacggtgctgatcccgacagagcggaaagctggttaagacttgccggttgtgaaacgattttcagagttgattcaaaaacgggcgagggcgtttggaaaataattgattatttgcgtgaggacggcgatgtattgccgtgggacgaagaagaaaaaacaagcagatagacgaaaatgtctatctgttttttcttgcacaaaattttgcaatttgcatatgatatagcataatatcgaatgggaggcagaggatatgtgcggaatatgcggatttataaattttaagacaaaccttgtcaagaacgaacgagaaaatcttgctgttgctcaccgtatggcagaaaaactgcgtcacagaggtccggactcttggggagaatgggttggcgaacacgcagtgtttgctcatagccgtttggcggttatagacgttgaaaatggacttcagccgatgaaacgtacagtcgagggacacgaatttgtgattacatataacggtgaactttataacacgaacgacataagaaacgatttgaaatctcacggatacgaatttaccactgcatcggatactgaggtgctattgtatgcctacatacattacggcgaaaaatgtgccgaaatgctgaacggcatatatgcgtttgttatctgggattctatgcgacaaagaatttttgcttgtcgtgacagattcggcgtaaaaccgtttttctatacacagaaaaatgatgtgacggtgtttgcgtccgaactgaaatcactgtttgaatatccggacgtatcggcagtgcttgataaaacgggactttgtgaactgtttgcgctaagtcccgcaagaacacagggtgtcggtgtgttcaaagatgtaagagaacttcgaccggcaagatatatgataatcaaccgtcacggaatgacaataaagaaatattggtcgcttgtgagcggtgagcataaagacagttacgaggaaacgatagaaaaggtgcgttcgcttgtgtatgattcggtgaaaagacagcttatttcagatgtgcctattgcaacatttctgtcgggcggacttgattcgagtattataaccgcaatcggtgctatggaaatgaagaaaaaaggcgaaagaatttcaacgtattcgtttgattacgaggataataataagtatttcaaagcgtcgcattttcagccggacagtgatacgaaatgggtgccgagaatggtggaggcatttgatacaaaccatacatatcttgtttgcccgaataacgtgcttacggagcttttggaggaggcacttttggcgaaagatttaccgggtatggcagacgtagacgcgtcactgctgtatttctgtcgtgaggtgaagaaaaatcatacagttgtgctttccggcgaatgttcggacgaaatattcggcggttatccatggtttagggagaagaaagcgtttgaaacacacggtttcccatggtgctatgatttgtcgataagaaataatattttgcttgacagtgttcgtgaaactttggatatagacaattattcgcgtatgcgatatgaagaaagtattgcggaagtgccgatttttgacggcgataatgatgaggaaaaacgcagacgtgaaatttcgtatctgaatataaattggtttatgacgaatttgcttgacagaaaggacagaatgagtatggcaagcggactggaagtgcgtgtgccgttctgcgaccacagacttgtcgagtacgtttggaatataccttgggaaatgaaaaatcgtgacaatgtttctaaaaatgtattgcgtgaagcggcaaagggaatcttgcctgaagatgtacgtctaagacgtaaaagtccgtatccgaaaacgcataatccgcattatgaggaggcggttaagacgttgcttgacggtattatatccgatccgaacgcacctattttggcgctttgcgataaaacaaaattaacgtcacttttggacggcggttcgtcggattacggtaagccgtttttcggtcagcttatggcaggaccgcagtttataggatatattgtgcagatgaattatttgcttagagattataaagtgagaatactgtaa

SEQ ID NO: 348 - DNA, 10129 bp, unidentified
  source 1..10129: mol_type = unassigned DNA
atgcagggctaccgcgcggcatacggacgaattttcgacggaaacgagcagcttgacgacggagtgctgctaatgtaccgcgctccacacagctacaccggcgaggacaccgccgagatatcctgccacggcggaatttacgtcacccgccgcgtgctctccgcatgcgtgaaggcgggtgcgcagccggcggctcccggggagttcaccaaacgcgcgctgttaaacggaaagctctcgctgacccaggcggaagccgtagcggatatcatcagcgcccagggagaccagctccttaactgcgccaacggtcagcgcgagggagcgctctaccgccgcatggaaaagtgcgccgacagcattatggaggtctccagccagatctccgcatggatagactacccggacgacgacactccggtagtaactcaggaatggctctgcgaaaagctttcggcggtgcgcggaatgttcgccgacctgctctccggctacgacaccggacgaatgctccgggagggtatctcctgcgcgatagtcggcaagcccaacgccgggaaatccacgctgatgaacagccttgcaggtcagcagcgaagcatcgtttccgacatcgagggaaccacacgggatatcgtcgaggaaacgatagccctcggcgatatagtcctgcgcgtagcggactgcgcgggtatccgcgacaccgacgacgcagttgaaaaaatcggcgtggatatcatgctgaaaaagcttgaaaacgcggatataatcctcgcggtgttcgacggctcaagggagctttccggcgaggacaggcggcttctggagcttctcgacccggctaagaccgtggcggtcgtgaacaaatccgaccttccgcagaagcttgagcttaatgaaatttcagctaagcttggagccccggcagtaatctccgcgaaatctggtgaaaactccggtgagcctgcgaaactgcttgaaaaggcagtcagcgaaaagctcgacctcggcaggctcgacccggacgcaggattcctcgcaaacgagcgccagcgcgactgcattatccgcgccgaccgtgcactgaactcggcgctggaagccgcgcagcttggggtgactcccgacgcggtaggcgttatgctcgaggaggctctcgacgcagtgtatgagctttccggaaagcgcgccggcgatgaagttatagacgaagtattcaggcggttctgcgttggaaagtagcgccgccggagggagttaacatgaatatactgataatcggctgcggacgcgtcggcagcgagcttgcggagcttctcgacaagcgcggccacgacgtttccgttatcgaccgccgcccggagaacttcgacaggctcccgggggatttctccgggttcacgacgaccggagttcccatcgaccagaacgtgctcagaaaagctggaatagaaagctgcgacgcggtatgcgccgtcgcccaggacgacgacctgaacatcatggcggctcagatggctaaggagatattcggagtgcagcgtgtgttcgcacgtatctccgacgtggacaagatggacgttttcaagggcttcgggttacacaccgtctgcccgacaaggcttaccgtgcagtccgcatgcgccgccattgaggacgtcagcagcgagaccgaggttttcctcgagcgcaatccggtgaaattcaccacgatgaacacccccgccgagtacgtcgggagcattcccggagacatcgagctggagccggacgaatcgctgttcgcgataatccgccccaacggtactttcctgctgtacaccgggcaggtcatcacgctgagcgcgcaggacaagctcgtattcgcaaaaaaaatctgaaatacacaaatacacaacgaacaaaagaggcacgatatgtataaacttgtaattttcgatcttgacggaaccctgcttaacaccataggcgacctcgccgccgccggaaaccacacgctggaggtcatgggatttccgcagcacccggaggaaagctatcggcatttcgtaggaaacggcattccgaagcttatcgagagaatgctcccggcgggtcacgacaaagagaccgagcagaaggcgtacgacattttcatggagtactactccgcccacaagtgcgaccgcaccaagccctaccccggcattccggagcttataaggaagctccgcgcggctggaataaaatgcgcggctaattccaacaaggcgcatgaattcacgcaggagcttataaaactcagcttcggcgacgagttcgacgacgttatcggattcggcgcaggcttccccgccaagcccgaccccggagccgcgcatgagcttatccgccgtgcgggagttcagccctcagaggcgctgtacgtcggcgacagcaacgttgatatccagaccggtcacaacgccggcatagacgtctgcggagcactgtggggcttccgcggctacgaggagctttcagcgatgaaccctacatatctcgcaaaggacgccgccgagctggaaaagatcatcatgggttgagtgtgggcaatttcaattaaaatccagttggcatagtagtgaaattacacaaaaatataaataccacgggaaaattcttgtgaaaactgtagacaaatccgtccgttcgtgatatacttatatcaacggaaacaccaccgtaaaaaggtgaagctactcagacggaggcgatccatcatggctaagaagataattaccatcacaagacaatacggaagcggcggcagagaaatcggcgagaccctcgcaaagcggctgggcgtaagcttctgggataacaagctgctggacgttgcggcaaaggacagcggcatacacaagactcacttcgaggaaagcgacgagcgccgcacgaacagcttcctgtatctgctctcgaccacctacggtcagggtggagttccgtttgacgacgcgctgttctttgcacagctgaacgctattcagaagattgcttcgaaggaatcctgccttatcatcggcaggtgcgcggactatgccctcagggacttcaacaacgtggtcaacatctacatcacggctcccctggaggaccgcataaatcgcgctataaacgcctatggtatcggcgagaagcacgctgcggagtacgtaaagcgcatggataagcagcgtatctcctactacaactactacaccgacaagcgctggggcgttccagagaactacgagctgtgtctcgacagttccgcgctcggcattgaaggctctgtagacctgcttgaggatttcatcaagaaatattttaaggaataagtaaacgtccggggctgcttgattgcagtcccggattttgtttctaattaagaattaagtgcaggctgttggtctgcacttttttatttcagcaatcaatccgggaactccgcaagctccctgataaacacatcagcaaactgcgaaacgtccccgcggggcgcggtgttcgggtcgtatatcccgatgacccggaagcctgcattatgcgcagtctccgcgcagtaggcggagtcctccaccacggtgcattcagctatggaagcccccagccgctgagctgcctgcaggaaaatatccggcttgtccttgtgcgctcccgcttcggtgcagtcaaggtagaaccggaaaaacctgtccagcccgaatttcttcataaacggctcggacacccagcggtcggtagcgctcgcaatacacatcacggcgccctctgagtaaagccgctccagaagctccagcgctccggggcgcggctgaatgatctccgcatacttctccttcatcgccaggcggacctgctgcattcgctcatggtcgtagcgctcgtcctcccggaagcttccataccagtagcccatgctgtccgcgagggttccgtccaggtcaaatatgtagtatttcatagtacacttccttctattctattattccgtaggtgagtttcagcagcagcacccttgtgaccgcttcgtcgattcgctcctccggtatctcgccggattccaccgccgccgtcagagcctccgctgcggaagcgtagtcggtgcagcacagaatatccgctccggctttcagcgccgtgactgccgccgcgttttccccgcagtactcccctactgcgtccattgagagatcgtcggtcatcgccgcgccggtgaatccctgctcccgcaggaacgcatacattttcccggacagcgacccaagcaggctgtcgtctatgcagttaacgatattgtgcgacaccatcaccaccggagcgcctgcggatatccccgcccggaacggctccaggtcaagctccgtgatctcggaaagcgggcgctcgtctattgaaattcccgtgtgagtgtccaggttgttgccgtagcccgggaagtgcttcagtgcgcatatcagcccgctctgcccgtagctttccacagccgcgcccaccgcccgggaggtctgctgtggatcggtgctgaaagcgcggtcgtagatgaaatccgtctcggagcgcggcaggtcgcacaccggcgcgaggttcatattaagccccagggagctcatcagcccggatatctcctgcgcttcggaactcaccgcgtccagcccctgtgacagaacctcagcctgtgccgggaacggctccgcacggtactgcgggtactttgagatacgcaccaccgtgccgccctcctcgtccgccgcaaacagcattcgcagcttcgacgcgctctgtatctccgcgatttccgcggttatctcctccggagtgctgccgcggaaatccacgccgaacatcacgtaacctccaaggtggtatttctgcgcctcggacagcgcgttttctcccgggtaccttgctagtattacctgacccgctttctcggcggcggtcattcctgagagtatctcagctgcgcgctgttccggggttccggagtcttcggcggtagattccacggtcactgattgttcagttgactggatctgcccgtcagcttcgctattttcggaagttgctccaggttccccggagctgtcagcggctgtagattccgtcaccacggagggcgttggcagacctgaaacaagttcggtggactggcagccgctcagcccgcttattataagtaatgctcccgccaggggaagcagcagtttcttcatggctgtgctcctttcagatttatattagggaaactctaaaaaccggtttgaaaagggaaaatgggtagagtgcgccgaatgcgatgaaagccgacgaagtaaggctgtatgccttacgaggaggtttgaagaagcagtcggtgtgctatacacattttcactcgaacaaggtttttagaggtgaccattaatattgtacagcctggcgcgaaaattgtcaagcagctagttatagattgagtttatagctagctataaaaataaaggattagacaaatacctaccattgtgatatacttagtacagaaagaagaacacggaggtgctgaaatgaaagaaatcatgaaagccataagaaccgaccgaatgtgcagctcagcacgaatgtcacgaatgtgaagacgatcccgataacacggacgcgaaagaaaaaccaaaaactgaacaacctgaacaacacaaacgaacgaaattaattataatttggaggataaacaccatgtcagagaacaagaactacagatttgagaccttacagctccacgttggccaggagcagcccgaccccgcttccgacgcacgcgcagtgccgatatacgcaacaacttcctacgttttcaagaactccgctcacgcagccgcacgtttcggacttgctgacgcgggcaacatctacggcagacttaccaactccacccaggacgtatttgagaagcgcatcgcagctctcgagggcggcgtagctgcactggctaccgcttccggcgctgccgctatcacctacaccattcaggctcttgcaaagcagggcgagaacatcgtagctgctaacacaatctacggcggaacctacaacctgctggaacacacccttccgctgtacggcataaccgcaaaattcgtagatccttatgttgaaggctccttcgaggcggctatcgacgagaacaccaaggcgctgtacgttgagtccctgggcaacccgaactccaacgtagccgacatcgagaccctcgcgaagatcgctcacaagcacggtattccgctggtagttgacagcaccttcgcaactccttatctgctccgcccgatcgagtacggcgctgacatcgtggtacactccgctacaaagttcatcggcggccacggaacagcgatcggcggcgttatcgtagacagcggcaacttcgactggaagaagtccggcagatacgcatggatctccgagccgaatccctcctaccacggcatcagcttctccgacgcagtaggcgcggcagctttcgtgacctacatcagagctatcctcctgcgcgacaccggcgctaccatctctccgttccacgcattcatattcctccagggtctggaaaccctctcgctgcgtgttgagcgccacgtattcaacgcgctgaaggtagttgagtacctcagcaagcacccgcaggtagaggctgtacatcacccctccctcgcttccgagcctactcacgagctttacaagaagtacttcccgaacggtggcggctccattttcaccttcgaggtaaagggcaccgcagaggacgctcagaagttcatcgacaacctgccgatattctccctgcttgccaacgttgccgacgttaagtccctggttatccacccggcttccacaactcactcccagctcaccgaatccgagcttctcgaacagggtatcaagcccaacaccatcagactttccatcggcaccgagcatatcgacgacctcattgaggctctcgacactgcattcgcagccatcaagtaatttcccgcagcattgtcatcggtttttccttactgaatatattttccccgggaacttcccggggagcttttttgtccggaacacctgaaatcaggcgccactttgacggcatacaaagctatgccgcccgtgaggctgtcaataaggtttataaattttcgcgtagcgtattggttttcgcttccttttgcttacaaaaggaagcgggagcgtgaggtgtctcccccagcgggggaggtggcacgaagtgccagaggggctgaccgtaagaccagagccctcaccactctgcgcgctggcgcgcagttaaacgattcaatggcgctaaaggggtgtgggggaaaacaagagttttcccccacagtttttgaaatttactgccgttatgactttttcgacaagccgacgggcaggcgcattgcctgcccgtatcagattatccgccagaaccgcggtcactttgtgagcgaaattctctttatcgtgagatcgctgctgaatgttaccgcattatacatgaacatcgcctgctggtactccgaaaggtcgatgagcctgccgaggtcaacgttgatgtagcgcatatccaccatggttatcttgctgtagtggttcgcaaggaacggcaccagactgtgcgcgtagctgtcctttatcagcaggaggttcttgccgttgtcaacgtcggtctctatggtgactatcggcgaattgcttccggtgaagctggagtatttgtccttaacgtcaaggtagctgcggacgtacagactgtcgtatacagtctccttggccccgtcgaacaccgtcatttttaccttcggaccgccggaggcaaggtggaagtaatcaatgctgtccggagttactccgttgtccagcgttttggaatacagggtaccgcggaagctgctgcttgcggtctcaatattgaactggtcgagggcgtacgcgctgtagcccagagtctttgccgccgcgcagtacgcgtagtacgcgccgaggctcgtccagtgatggtcggtgcggtagaatacgtactccgagctgtgccccgtgaggtagctcaggcagtccaccgtgctgatcccgttcatcttcttgtagcactcgtcaatgaaggtcttttcgctgaggtacccggcgtaggacggtattttcgaagtataaagctcctgcaccgtcggcgccatcatgaagcttacctgaatatccgggtgagtctccgcgaaacggttcatcgcgttcagcgaggactcaacgtcgctcttgtcgtaggtcttgaaagcctgtatcatctggtcgtcaatggtgtaaactccgttgatctccttcttgcctgcgagcttctccatctcgttgcgggcgcgcacccactcctcgcggcctaccaggtggtcggaaaagtaggtctcgaatttatccatccagctgtcttcgtcgcgggtggtgatgtcgtcccagcggatagcgccgagcacatcgccaagattctccgccttgtccattttcgtgtggttaacgatatccgggaacttcgccagcgtgcggttctcgttttcgctgcgctcctgcttcgggagagcgacggtaactatcggcaccgtaagcagtattacggcgaacagcgccgcggtcagcttcgcgggggtcatgtgaaatttcttattcattcggctctcctttctcagaagttaaagtacaggaacggattgtagttcgaagtggaaaggtacgccactgaagcgagcatgatgaccgtatccacaaccgggaatccatactgcacccaggtcggagcctttttgcggatataatccgcgaaggtcttgagcacatcggagctgccgaaaatgcacactgcaaaaataataccatagtttacgatatagttcgttgcggtgtcgtctatgaacacaccgtttccgccgaacatcgccgaaatgaacgtccatatctgctcgaaaacgttgccgaagctgacagtcccgggagccaccgcgtcgaacattacccagccgaacaccaccataatgaacgtgtacagccaactgaaaaatgagggtatcttctcaagcacctttccgagaaacagccgctcaatcactatcaggataccgaagtaggtgccccacagcatgaagttccagcttgcgccgtgccagataccggtgatcgtccacactacgaggaggttgataatggttcgcggcagacccttgcggcttccgcccatcgggaagtagatgtagctcttgaaccagtcgccgagcgtgatgtgccagcgccgccagaattccgcaacgctgtgcgacatatagggatagttgaagttctccgggaagttgaatcccatcatctttccgagacctatcgccatatcggagtatccgctgaagtcaaagtagatctggaacgtgaacgcgaggataccgagccacgccgtcactgcggagagctcgccgtaatccatcgcctttatctcagtccacagcagacctatgttgttggctatgagcaccttcttgccaagcccgacgatgaatcttgagataccgtcgccgatcatcttttcggtgatggtgcggtcgtcgatctcgttctggatatcctcgtaccttacgataggccccgccacaatctgcgggaacagcgtaacgaacgccatgaagctggccgcgttcttctgaacctttatctgccggcggtagaggtcgatggtgtagctcatcgactggaacgtaaagaagctgatgccgataggaagcggcaggttcgggttcgggatagcgatcccgaatccggcgttcagagcctcaatgatgaacccgaggtacttgaacgtagcaagcaggccgatgttcattatcagcgagaccagcaggcacgccgttcgtattttcggccggtcgtcgtatttgtcgattatgcggccggcggtgtagtcgatgaaagtcgacagtatcatcaccaggacgtatatcggctcgccccatgcgtagaacacaagtccgcttatcagtatgacgacgttcttggctttcttcggcacgaggtagtacaatatcagcgttatcggaagaaacgcaaacagaaatgttaagctggaaaataccat

SEQ ID NO: 349 - DNA, 15892 bp, unidentified
  source 1..15892: mol_type = unassigned DNA
aatgagcatagtggcggtttccgcaacaggaaatgcaagccagattccgttcagttggaataatttgtccagacaccataaggcaggaacaaggaaaagcagttgtctgcataattgaatcgctatgctggaacctactttttctgtcgcctgaaaataggtggaaatcatggtagagagaccgcaaaacagatagcttgccgccataattcgcatagcggatattccaaaggagcgcatggcttccgacgctgtaaataatttcaaaagctgcgccggaaagaagttgacggtcaatgttcccagtatcatcataccggagaccaaagcggttccgtattggaaagcggagtgcagcctatctctgtttcccgcactgtagttaaatcgcataatgggcaaacagccctgaatcaagccgtttactgtcataacgatcagctgctgtaccttaaaatacgcaccgaagaatgcaatcgccgtatcggaatacgccaccagaaacagattgacgaatgtcaccataaacgaactgagggcattcataatgaaagatggtaagccaagggcgaatatacgggcaatcatccacttttgtatatgaaattctttgatctttatccgcactttttgctttttgcccaacagcaaggcaaatgccaaaatcatggataacaaatagcccgcaacagtagccaccgcagcgccacggattcccatagctggaaaaacaccaataccaaaaattaggagtgggtcaaatacaaaattaacgaccactcctgcaatctggaaccacataggagcaaccatgttcccggtagcctgtatcatcttctggattgcgatatgcaccatgttgggaatttgcatgaacgaacatacgctcatataggcaagactcaactgataaatttcttcgttattggtgaatgccctaaagtagggtttcataatcagtaatgacagaagattgagcaaagcaccaattccaaaggccagtaacaatccatgtgtgacggtagtatttgcctcattctgctttctctgtccaagatacccagcaatcagtacattcacgccaacaccgatccagatagatgtcgcattcatcaaagttgtaatgggaaacgacagggaaaccgccgtcaaagcattttcactcagccgcgctacaaacgcgctgtctatcagattataggaatattgcagaaacatggaaatcagcggcggtatcgacatttgccagaggagttttccaacgggcgcaaccgccattttgttattggtctgcatgctttccaccttctccacaaattgtccgaacaatatagttttgtttgcgtgctgcgtgctgaccggcttcttggaccggatagcccaatgcaatctcccgcctatatttggagcctgtaattgcaatgatggttggagattgatgtcctccgtcggtaggagcgtaagtccctgcttccagtacagcgtccacagccttggaagggacaggttccgatttataagcccgtacactatgtcgcgtcttgataagagacaaaaaaattttttccatacagatatagtcctccattctgctaatacttccgagatacaggcaacaaaaaagccacacaactatcacaagatagctgtgtggcaaaaagatgatcgaatccggaaaagtccactaaaattttgcgtttgctattatagcgaacttgaaggagactgtcaagcatcaatcattacggaattgtggctaaaaagggaaaatagaaaaaagcttgacaattgcgaaatagtgtgctaatgtagtaaaggttttgcgaaaagtaaaactcactgccgtagacagtaggtgcggatttccgcgtaagtctgattatagccgcctaccgaggaagatgaagtatctgatatgataattttactcctctctctacgtagagaggtttttttattagaacttttgcgtgcagtgcagggatcttgccagagccggttatcggcagatctgtgatgatcctacaaaataatggggcacacccatagaaaggagatacactcatggcaaaagtagagttgaaacagcctatcgttgaggagattaaggctaagattgatggtgctgcaactgttgttctcgttgattatcgtggacttacagtagagcaggacacaaagcttcgtaaaggacttagagaggcaggatgcgagtacaaagtttacaagaacacactgatgaagcgtgctttcgagggaacagatttcgcacagttggacaaccttttggatggaccttctgcaatcgctatttctaaggaagatgcaacagctccgatccgcgtattaaataacgtagcaaaagaggctgaggcattagagttcaagggtgctgttgtagagggtacactttatgacattgatggcatcaagtctttggcaagcattccttccagagaagaacttatttccaagttgcttggttccttacagtcccctatcaccaatcttgctcgtgttcttaatcagatcgctgagaagggtgacggtgctgcagaggcataattcatgcaatgcagatgacgcattgtgcgtcgcaattttatgaaacaacgaaccaattggttcacaaaattacgattattacaaattttatggaggtaaacgaaatgactacacaggaatttattgatgctatcaaaggcatgactgttttagagttaaatgatttagtaaaggcttgcgaggaggagtttggtgtatccgcagcagcaggcgttgttgttgcagcagcaggtgctggcgctgatgcaggtgctgagaaggacgagttcgacgttgagttgacagaggttggtcctaacaaggttaaggttatcaaggttgtccgcgaagtaactggtcttggcttgaaagaagctaaggaagttgttgatggcgctcctaaggttgttaaagaaggtgcttctaaggatgaggctgaggacatcaagactaagcttgaggctgagggtgctaaggttactcttaaataatttaatgttgattcacatcccgaattatcgggaaaaggataaacgaatgatggaaaacggatcatgcaaatggtccgttttttctctatacaggaacattgacgtctctgtataatgtgtctgaatcaaaacagtatttgcatagaatgtctgcaatgaagggctatttgccttttcggcgtctgcaggcgcaatgtttgctggcggtcatcaagagaaagctaacttcatcccatgattttttcattgcaacgatgcggcggttaaaaccctgacagcagcaaaagcgtcgggaaatccattgttttagacacattgtagatacatctccttccttatttgcaatatgtggctgcgaagaatttgaggtatgggaagtttgagtggtttactataatatatgcttttggatggaggatgtgttaatacaggcgaataatattatccgtgtgatatgtgtgaacaggaaaggaaggacgtgccatgaagaaaacagtattgatcacaggtgctaccggagggatcggtttagcgtttacaaagttattagcgaagaaagaatatcgtttgttgctggtatcttccagtgagaagcgtttgcagcacttgaaagagttattgctgcgtgtaaagcccaatttagcagtggagatatacgcagaggatcttgcggtgcagggagcggcaggacgattgtatgatcggatcggtaaagacggctggcaggttgatgtgctgatcaataacgcaggctttggtatggtaggtgccgcgcatacgctggatatggaaaaagaggaacagatgcttcaattgctcgtggtaacgccgacgcagttgtgtaaatgctgtctgcgtgacatgtacaaacgtggttcgggaaaaatattgaacgtagcatccgtaggtgcatttcaaccgggaccgtatacggcgtcttattatgcttcgaagagttatctttaccaatatagtcaggcgatccgcttggaagcaaaaaaacagggcgttcaggtgtgtacgctgtgtccgggttctacacgaacacatttctttgaaaaaacaggagctaagacgccaatttgggcaatgtcgccggagcgcgttgcaaaagaggcgtgggaaggattaaatgcggataaggcagttgtggttccggggatgataaatcggctgctgcgtcttgtgccggcacagatcaaagcttacggtgtggcgctgctaaagaaacatacctaaaaggacactattaaaatcgaaagaaaatggtagccatagtgctataaaagaaatctgcctaaaaagagcaacaaaaaaagcccctacccaacagtccgtgctgtcaaattgggactttcatgcgcgatcaggggttcgaaccctggacaccctgattaagagtcaggtgctctgccaactgagctaatcgcgcaaaacgtattgttttacaacgaaatatattatagcaaagcaacctgcgaaatgcaagcgttttttgaaaaaaattacaaaaaactaaaaagcataaaaatacgtaatgaaaagtctttataaacaatcaccgattcaaaattgtttgtcatagtttttgcccacataataagtcaatacagcatctttcgcgcgataccattctttaaggatggttttgcttccgcagaacagatcaaaggattgcagctctttggtgtcatatacctttttgggtctgatcgttgtcagatttttctctttggaaaggcgcagaccggtatcgaacagtgttccgtaatccagacagtagtaagtgccgtttttggcaccatgtgagcgcagagtgtttagtgtgcttggtcctgccggatcgccgtaaactaagagataacattcattcttgcgcagcaagggtgtaatgttgctgcttttatagacggcagaaacggaattcgcatccaaacagggactgtcgaaagtataagcattgatcgtattgccgacttgcaaaggatgcgtcgacttgatgttctttaacagttttaacttatacgttgcaaagagagaattgtatttcacatcttcggtcacctgaaaaatgccgacgtttttgtattcgtcatataaatgcttgatgttctttttgcgctgtgccgcccgaatacttttgagccaattgatggatgtctcgtctttatcgagcagcatatcacgcttgagaaactgcacttttgagatggaccgtgcgctgtatcgtgctgtgtaggaagcaacaggagctttgggagtggagagcttttcactcaaaagcttttgcgagtacagcaatgctgcccccacacaaaataatgcaagtgcgatgagggttatggaaaaccaatagtttttcttgtttttcttaaggttttctttgctcatagccgattctgatttatgatttcctgtatttctgcgaactgtttttaatctgctttctatactcaattgtattcctcctctatggccaatggaaatgtaacgatcactttgaacagatcgccgtcaacgtgcaatgcgagagtaccattcattaactcggccagatttttagcaatggacaagccaagcccattaccttgtgtgctgcgagaactgtcaccgcgtacgaaacgctccagtaatgcatcggtgctctgttccagagggtattgcgatgtgttgcggaaagtgatctgtgcacattggtcgactgtggcgagatcgatataaacacgggtgccgggttgtgaatatttacatatattacccattaaattatcgaatatgcgccagagatgtcgactgtctgcggtaatgacaaggtccggcagatctgcgttatcgacgttcggatcgatcataggggtactttgctgcttgcgaaggatcaattctaaacctgcctgagttagtttgtcggtaaattcaccggcagtttgtgccagcagtatatttaagttgcaaggttccgggcaaacggttagattgccggttgatgctttggaggcctcgatcaggttctcaatcagcttttttagcttgccggattgacgatcaaggacatctaagtattgcgccttttcttcctccgacagattatctgcttttaacaagtctacataatttataatagaagttaaaggtgtttttatgtcatgtgacacatttgtgatcaattctgttcgaaaacgttcgcttttcatcttgtcctgcactgctatttggatgccgtcctgcagtcgattcagtgtttcggcgtggcggcggaaaggtccaaacaattttgaggtgtccaatttggtggacagagcgtcttcggcgagactgcggctcgcatctgtcagtttggtaaattgttccacacagaatagaagaaacaatgcttctgcaactttgtaaatagcaaaggtgataatttcaagatccgtattcatgtcggttatgccgatcacaaacagttcgatcagcgtaagtacgatccatacgacgccaatcctcactgctaaatgtatatgtgtgccgataaactctaacgcccatttcaagttgtgggtcaaattggatttaatacgacgtaacagctgcataacgccgtggcatactgtgtatttgcggaacgttttggtaccaagccgttcacccagattaacgaaaacagagcttaacaggaagaagaaaagcactattccgccaacggcgagaagcagatttccactcattaataatttcttggactgtagtgtgcgcagcaataagaaacttataaagtagacaacccaagccgatataaaggtcatactactgagatagaccaataagggaatgcgtgtcatgaaggaaggtttcccggatgactttagcagtattgtctggtggcagcactggtataatgcaccaagtaaagcaatcaataataatgccgttaccaaaggaatggcatagcagatcggatataatgtgttaacaagcttggtcgtgtaagcaaacaggtcatgctttgaagtgtctacaggagtagaaactttggaactgatggaatagaagtgtgtttcgtccgtggtctgtatgctatagtatacggttgcgtgaaccatttgtaatggaatccgtctgccgttttgtgtgacggtctttggatggttgtaggcacccagataataaatggcggcatctgattttgataaaaactcagatgcaggaaactgactgtcctcggaaccccaatagaccacaggatcggtaagctgccaagaggctgccatacgatcgcttttgatatcatgcatttcaatatctttggtataataaggaatatcatctaatatgatgcgaacgggattcacgtcatggatataattacgtatattcaagttctcatagcttttgtctacacagacgtaacagctccggcgcttggaatatttaaaggtcaatgaacttctggcacttgctactcctttagccttaaccacagcgaaggcggttggaatttcgacggtcctgaccggaaaatagtattgtgatttggttcgatagtacaacagtccattggtagtgcattgaatctggtctatcgttgtagagtgttttcggtatagatcgacatctgttccgtcataatctgtggtaatgttgttttgcaggatcgtagcaagatttggctccggcacagatcgtgttgcctttgtgtcggtaaatgtagtgtgatacagatgtgcagacgctggctgagcatcaatttccatattccatacaccgaacacgctgtatttgaagttggtgatcttttttttgttgacaacggcatcttcatctttctttttgttgatctcgctcatgatggtagcttcgtaatatttcgtcaacagatcgtacttgttgttcaagatttctttcttggactggtctttatacattccaagttgatagcataatagcgacaataaaataccaaggatcagaccggtaccggtgatcatcgcaatggcaatagcaccgatctgccgttttttgatttggtgatttgctttcatatactcctccaatctgaagtggatcacttcattcctgcatcgcattgtatcgcaatgttatgacgcagatcttccaaaatattaattgttatctagtttataaccgcgtccccacactgcttttaaataacgtggttctgccgggttatattcgattttttctcgtaagtgtcggatgtgtacggcgacagtgctttcttcaccataagcattgtcgtgccatacgttttggtagatttcacgtggtgtaaaggattgtccgacgtgctgcatcaaaaataacagtatattgtattcgatgcgtgtcagtgcaatgggatcagagtctaacgtgacttccttggtaattggatttaatacgataccgccaacagaataaacatcgctttgcgttttgccgccgccaagctgcatatagcggcgaagctgtgatttaacacgtgcctgaagctcgatgggattgaatggttttgttatgtaatcatcagcgccgactgttaaaccgagcactttgtcaatatcttcgcttttggcggttaacaaaatcacaggaacattgctaaattcgcgtagcttcgtgagtgcagcgatgccgtccatatgaggcatcataatgtccagaagaaccaaatggatttcctcttctgttagaattttgagtgcatctgcgccattgtaggctttgaaaattttatagtcgtcgttgcgtaagtagatttctaatgcggtaacgatatctttttcatcgtcacacagtaatatttggtacatgtttccctccgtaatatttattgcctccttacaagatttatcttgcatagttctattgtagagaaatgaatcttaaaattcaacatgctatttgtttaagattttattaagaaactcaacctgcgcacatttgaagctgctcttgataaggttattgggatgtttgttcaaaaagggtgaattgaaaaagtcggaaaagtgggaaaagtaaaaaaaacacttgctttccatgcgaaagtgtgatatattaaacgagttgctgacattgatatgtcagatatgcgcgattagctcagttggcagagcacctgactcttaatcagggtgtccagggttcgaacccctgatcgcgcatttttatattttaaagagtaggtgtcaaaatttttttggcacctttgtttattaattaacagcaatttcctatcaactgaaaactaattgcggcaaggcaattgctatagtttcttcatggcagaacccacaatatggtggctgcaaaatataatgaaactatcgacataataagcaataagtgaccagatggcagcttcggatgtgcgaagttggaatgaaaaatatatttatatggaattactgcgttctatgacgggaaaggtttgacatgaatatatccgtaggcatataataaaaagtacgagtaagatgcggcgagacatagaaatacttgcgtaggcggtattttgatatacgttttatgtgtaaaccgggtgaccggtattgtgtatatattttctcgttgtaataaaatcaaagtatagagaggtacataatatgatagcaaaaaaaatggtgaaatttgttgagggaagctcggttacaagagcaatgtttgaggaagggaagaagatggcggttgagtttggcgcagagaacgtctatgatttcagtcttggaaacccaagcgtagagcctccaaaacaggttaaagaagccattattgagacattgaatgaggatgcaccgaatttcgtgcatggttatatgaacaactccggatacgaggaagtgcgcgagagaattgcacagtccttaaatcgccgctttgacacaaagttttctcagaataatatcattatgacagtaggtgctgcaggtggtcttaatgttgcacttaaaacattgttagatccgggcgatgaagtaatcgcatttgcaccatattttggagaatataataattatgtagctaactttgacggtgtaatggtagttgtaccggcagatgtaccttctttccagctcgatcttgagacgtttgcaaagaagatcacggcaaagacgaaagcagtgattgtcaataatccgaacaatcctaccggtgtagtatattcagaagaaacgattcagaaattggcagcagtattggaggagaagcaaaaagagtttggaacgcagatttaccttattgcagatgaaccataccgtgagcttgcttatgatggcgtagaagtgccatatctgacgaagtattatcgtaatacaattgtaggatattcttatagtaaatctctgtctcttccgggtgagcgtattggttaccttgtgattccggatgaggtagatgattttgaaaatgttatttgtgcagcaaatgttgcgaatcgtattttaggatttgtaaatgcaccatctttgatgcagcttgcggtatcaaaatgtctggatgcgacaacggacgttgcagcctatgatgccaaccgaaagctgctttacaatgctctgacagagtatggctttgagtgtgctaaaccggaaggggctttttatctttgggttaaggctaaggaagatgataaggcatttgttgccaaaggaaaagagttccatattttaatggttccgggaagtgcatttatgtgtcctggttatgtgcggattgcttattgtgtggatcatgcgatgatcgagcgctcgctcccggcatttaagaagctggctgagtgttatcagtaaataagtgtaacaattccaagtggacgacagaaatagacggaaaagaggtatgacatgagtagattggaagataattttcgcaaagtagagccgtatgttccgggcgaacagcctaatttgccggacatggttaagttgaatactaacgaaaatccatatccgccatcaccaaaggtggcagaagcactgcagaagtttgaactcgacagcctgagattatatccggatccggcatcgacagacttagtcaatgcgctggcagaaagatatcatgtgcaggcagatcaggtgtatacaggagtaggatccgatgatgtacttgctattgcgtttttgacattttttaattcgggtaaaccgattttgttcccggatattacatattcgttctatgatgtatgggcagaattatttcaaattccgtatgagcgtccggctttggacgatgcctttgcacttcgactggaagattatcagtgcgaaaatggcggtatcgtgatagccaatccaaatgcaccgacgggtattcgtcaaagtgaggagtttttgcgcgcagtcatcgaagctaatccgaatgttgttgtcataattgatgaggcatatgcagattttagtggttatacagcacttccgctggtggacgagtatgaaaatgttgtggtagtacaaacgttttcaaaatctcgctctatggcaggaatgcgtattggtcatgcaatcggtaatgcgaaattgatcaaggcaatgaacgacgttcgatattcatttaacagctatccgatgactcgtttatccgtagcacttggcgttgctgcgttatcagatcaggattattttgaggagactacagcgaagattgttgcaacacgagagcgcaccaaacaggcacttacggagcttggttttacgtttggagattcgatgacaaattttatttttgcgacacataaaactgttccagctacacatttgtttgaagaattgcgcaagcagcacatttttgtcaggtatttttccaatccgcgcattgacaattatctgcgaatatccattggaacggatgcggaaatggatcgttttttggctgcggtacaggaaattattgctcagtgggataaataaagagcatgaggttttttgctcggtatactgttgggaagcataagttagcattgacagcataatgctgggaaatataagttagtgctaggaagcataagttggcgttgacagaagcagaggatagtgatattctcatatatataaaaagatagaggtcgcactcttcatgagtaggatttcggatgcgtcaggcgcagtagatgagatcagaaagggaacagtgccgaaagaaagcttgtcctgcagcaagatttcttgggcatggcgtgaataacgacatgactgtcatcaagaggatggagagctatcggtttgaagagatacttcaaagaggtgatacatcccgtgtatcacctctttttgttagctgggtaactcgaatttcccgtaaaatggcatttgcaaaaggtaactgtgagtgcatgggtgggaaaatgctcaaacgacaaccaatatctaaaaatcagaaccccgatttgggaatagcgaaagcagaatggaggaaattatgtcaatttttacaggagcaggcgtggctttggtcacaccaatgaaagagaacttggaggtaaactacgacaaattagatgagattttggagtggcagattacagagggaacggatgcgattattatttgtggaacgaccggagagtctgcaactttatctgaagaagagcatgcaaatgtgattcgttttgcgattgagcgtgtaaatcaccgtattccggtcattgccggcaccggttctaattgcacggcaacagcagtacagcttagcaaagaagcttctgaggcaggagcagagggtgtgcttgttgtaactccgtattacaacaaggcaacacagaatggtttgattgcacattataaaaagattgcgtcagagatcacggcaccgatcattttatacaatgtaccaagccgtaccggttgcggaatgacaccacagaccatcgctacacttattaaagatgtagacaatattgcaggtgtgaaagaagcttccggtaacatcagcgctgtagcgcaaattctgcacctgtgcgatggtaatgtggatctgtattccggaaatgacgaccagacaattccgatgctttctttgggagcaaaaggcgtgatttctgtgttgtcaaatgttgcgccgaagtatacacatgagatggttatgaattatttgaatggaaatgtgaagcagagtgccaagatgcagcttgatgcacttccgttatgtgatgcattgttctgtgaagtaaatccgatcccggtaaaagctgctatgaatatgatgggtaaaaacgttggttcattacgtgcacctctgacagagatggaagatgctaacaaggagatcttaaagagagaaatggcagcgatgcacttgatttaaggtgtctcgctcgaattactttagaatgatctggggtttaaaaaggagtcggcctgtggcagagggagctaccacaggcccaatgaaaaaaatgaaaaagaatctatctcaaacataagtcagtcggctagtttggtagaaatcaaatgcttcttttgatttcactgcttttcttgaaatctgttctctttgatttctatgtatacataatagcatgcaaatgtggacagaatttgtccatattctaaaaaaaatcttaattttcaaaacgatttgtaaaaaaaacgctcaaaccttgcggtctaagcgttttaaggaaacttgttgttgcttttctcgattttatgctttaattagcgctgtccatatttttccaaaatggcattaatacgttctgcagggtttaataaaccgctaatggattgatcgtggtttaaggtgtcgatcaataaggcgatatacttgctcatgtctacgctgacataatagtctctagacaaaacttcttccggctgatatacaaggtttgttgtgagaaccttatcgatcaagcctttttcgtgtgcttcatcaaatttggacatgccgtttgtaaacagaccaaacgttgcagcaacaaaaatacgatttgctttgcgctgctttaactgtgttgcaacatcgatcatgctttcacccgaggaaatcatatcatcgacgatgataacatctttgccctgcaggtcagagccgaggaactcgtgggcaatgatcggattgcgtccgtcaacaatgcggctgtaatcgcgacgtttatagaacatacccatatcgatgccaagaacgtttgcgtaatatacagcacgtcccatagcaccttcatccgggctgattaccatcaaatgatctgcatcaaccttaaggtccggcacgttcttcagaagtgctttgatgaattgatacgtaggctgaacggtttcgaaactattcaaaggaattgcgttttgaacgcgaggatcatgtgcatcaaaggtgataatactttcaacacccatttgtgttaattcgtgcaatgccattgcgcagtccaaggattcgcgtgcactgcgtcgatgctgtctgctttcatataagaaaggcatgatcacagtgatgcggcgtgccttgccaccaactgcagcaatgatacgcttaagatcctgataatgatcatccggcgacatgtgattcgtgtgtccgcaaacggtataagttaagctgtaattgcagacatcaactaataaatacaaatcatctccacgcacagattcgttgatgatgcctttcgcctcgccggaaccaaaacgcgggcaggcggaatcaatcaagaaagaatcacggttgtatcctgcaaaggtagatgcggtagcattttgtgcagcgcgatcctttcgccagtcaacgatataatcgtttactcgtttgcccatgtcgtggctgctctccagcgccaagataccaagggtaccaacaggaagtgtgtctgctaacttgtcatgtcgtttcatagtaaaatgtcctccgtatgaatttatataattgttatcatgttatttggcagttaatctagccttctgacgtatatcatctccaattattaagaagaaatgataaaaaccgataaaacgtgagaaaatacgctcgctgtatcggtcacgtaattcctgaaacgataaattggtcgagatgatggttgacttatggttgatatggcgctcctcaataaaataatacagctgagaagacgtaaagccattgaccaattctgccccaagatcatctataatgagcaaatcactttgcaacatatatgcaatttgttcgtttgaagtggaaatatcctcatgacggaacttattcctctctaaaatatcaaaaagctgcaatgaagtcaagtaaagcaccgtgtgagatgtatccaaaagtttcttggcgatacagtgcgtcagaaaggttttgccgacgcctgtagaaccatagaatatcaggttgtcataggaatcatcaaagtgcttgatatagtctagacagaccgtttttaccttgcgaatattttggcgggctgttagagaaagattttcattgacgatggtgtcatcgtagtaactatcatcaaaggtgtcaaaattctcatgattcagaatgtccataagatttgaactttcataaagagccttgatctcagcgtttttaaggcagtgacaaggttcgttgttctgatagccggtgtctttgcagtccggacaggtataaatgctttgcagataatcttccggatagccgtgatgtaacagcagtgcctttttgcgggacagcaatgcttcgcgttttgcactgtattcagcttcgctctttgggtccggttcggtctgaaacaattctttgcgcgcctgcgtcagtgataagtccataatatcgtgttggatctgttctaattccggaatttcagcaaaaagtgtttcgtaccgcttatccagtatgcgctgattgttcattcgcgtctgatcatattgaaacatgatatcgcgatattgtgtgttggatattcccat

SEQ ID NO: 350 - DNA, 11315 bp, unidentified
  source 1..11315: mol_type = unassigned DNA
ttataattttttaggttttgtacatgagttgcgaacttttattggacaaggcagatagacacgcataggagaataataatcggtgcttttagatttcatcatattcaaaataaatctaatgccgtaaatacccattgcatatacaggtgcgtttaccgtagtgagcggagggtttgtatatcccgaaagctccgtgttatcaaatcccataacagaaatatcctcaggaattttgtaaccgttttcttgcagagctctcattgcaccgattgcaataggatcgcttgccgcaaaaatagctgtggggagatttcctttgctgatcatttctgacatcattttataacctgatgatgttgaaaatttgtcctgcataataaacccatcatatttaatgtttagtgcatcgcaaatgtctgtgaaagtgttgagtcgtttatcaggaaatatcgttccgtcctcaagctgttcaatgcctccgataaagccaactgttctatggcctaaatcatatagatatttaattgcatcggacactgcctgacgaaagtcgagcgatacggatgtgatttcaatattctcaacggtcatatcaagaaaaacaattttattattcaatgaatgcagtaattttatttcttgtttactaaacttcccgaggcagattatgccatcaacatcgcagagtacattctgatagtcattgtctgttttaaatgttcgtacaatacttatattattttttgaacagtagtcctcgataccctgtctcatcaaaaagtaataattatcttcaatttcctgtttggaagagaaccattgtagaattccaatgcgacatgaaggtgctgatgtaaccctttttttctttacataattaagttctttagctactgcaaatattttttgcttcgtttcaagcgaggtgcttagggtagtgtcgttattaagcactcttgaaacagtagctactgatacatttgcctttttggcaacatctctgattgtagccaattgaatcacctcactaccattatagtgaaatattactaaaaaatcaagtcttgtttagtaaaaaacggagaaagcaaaaatgtttaccaaaaactattgacagtttacgaaacaaaccgtataatttagttaacataaaagcaaaagaaacattattattaaataatgacgaaatcttttgtgcaggttgtcacggcgtttcatttaaaattaaaaggaggaaaaattatgaaacagacatcatcacaaccaagacttgatggcaaaatcccaggtagaatcaaatacacctttgctttaggtgccctcggcaaagatatgatttatggtatgattgccacattttcaatgatttatttcacagacatcatcaaggtcaacccggtatttatcggcataatgttctttgttgcaaagttatgggatgcctttaatgatttgtttatgggtatgattgttgataacacacgcagcagatggggtaaatttattccatggcttgtaataggtacgctggttaattcaattgtatttgttgttttattcacagacttccacctcgatggcgttggactttgcgtatttgcaacagcagcttacatactctggggtatgacttacacaattatggatattccttattggtcaattattcctaaccttacttcaaatcctgaggagagagaaaaagtttcggtacttccgagaatctttgcaagtatcggtcagtcacttgttattgcaggctttggtgttcaaattattgaggctctcagcggcggcacaacaaatcaggcaggttatcacagatttgcaatcataattgcaattgtatttattcttacaatcggtattacagtaatcaatcttccgaaaaagagagatgattctgttccggaaaagaaagttaagtttaaagatattttctcaatcatcggcaagaatgatcaacttcgttgggcggtaactcttatcttcctttacaacatcggcattcagtgcattatgggtgttgctacatattatttcaaatatgtttgcggcaacgcaggaatgatgtcatcatttatgatcagcgcatcaatcgcagaggttgtaggtcttatcgtattccctaaggttgcaaaatttctttcaagaaaaacttcgttccttcttgcgtgtattttacctgcatttggtcttataatgcttttgctcgtaggtatttttgctccgcacaatgttgtgctcacatcaatttcaggtgttattgtaaaacttggtacaggtcttgaacttggttgtgcaacagtattccttgcagatgttgttgattacggtgaatttaagcttggaacaagaaatgaaggcgttgtattctcactccagacgcttatcgtaaaattcacagcagctcttacagcactcggtattggcgcagcacttggaagcacacagtatattcctggacaggaacagtcatttgcaacagtagcatcaatcagtacacttatgtgcattgttcctgcggtttgtatgcttattgcttatgttgtttacagaaagaaatataaactcaatgacggtatgatgaagaaggttataaacacaatcagtgcaagaagagaaggcaagattgatatgacacaacagcttgatgaaagcggtaacacagagccttctatgttccttcctacagttgcggaaaaggcaggtaaataaaatgattgatactaaaacagcaattgaaaaaattacaaacggcgaatttgataatcttttcactgatatatatatagattcatcaatgattgattatcagaaaaaaagatatgttcatgcaattgagcagtatgaaacaattttttgccctgataaagtagcaatattcagtgctcccggcagaagtgaggtttgcggtaatcatacagatcaccagcatggaatggtgcttgcaacatccattaatcttgatactattgctgtgtcggccaagaataacaatgatgttgtaagatttgtttctgacggttatgatatgattactctcaatataaatgacctcgaagttaataatgatgaggtaggcacaacggtcagcctcatcagaggtgttcttcgtggacttaaggatcatggatacaaaattggtggattcaatgcttatgcaacaagtgatgtacttgttggtgcaggactttcatcgtcagcagcttttgaggtagttgtcggaactattatttctggcttatataatgatatgaaaataaattcagttgagattgctcagatttctcagtatgctgaaaatgtatttttcaaaaagccgtgcggacttatggatcaaatggcttgttcagtcggaggaatggttaacattgattttaaagatccgacaaagccaattgttaagaaagtacctaccgaatttgaaaaatatgattacagtctttgtattgttgacacaaagggcgatcatgttgatcttacagatgattatgctatgattccctcggaaatgaaaaaggttgcaaattttctcggagaagattatctgagagattgtgattcaaacgaattttatattcgccttgacgaaattcgtgaggctgttggcgacagaccggtacttcgtgcaattcatttctttaatgaggagcataacgttaaaaatgccgtttcgtcacttgaaaacggtaagtttgatgaattccttgacgcaatcagaaaatccggtaattcatcgtttaagtatcttcagaatgtatatacaacaagagatattcaacatcagaacatctcggtagcccttgcactcagcgaaagccttcttcgcaattacggcgtgtgccgtgttcacggcggtggatttgcaggtacaattcaggcgtttgtcaaaaatgattttgtaagtaattacaaagaatttataaataaaattttcggagaaaactcatgccatgttctcaaagtgagaaaatacggcggaataaaagtaatgtaattatgtagtttttgtttttattaaggaggacaaaatgaaaattcttgttttaggcggtgccggatatatcggttcgcatacagtttacagacttattgaaagcggtaatgaggttgttgtattcgataaccttgaaacaggtcatatcgaggcggttcatcccaaagcaaaattttataaaggtgatctcagaaacagaagtgaaattgacagcgtttttgataaagaaaaaggtattgatgctgtaattcattttgcagccaattcacttgtcggtgaaagtatgaccaaccccctcaaatattatgataataacctcaacggcacaaaggttttgcttcagtcaatggttgctcacggaattgataagattgtattttcatcaacagcggcaacatacggtgagcctgagagaactcctattcttgaaaccgatccgacaaatccgacaaactgctacggagaaacaaaaaaatccatggagagaatgttctattgggttgaaaaagcacatggtttaagatatgtttctctcagatatttcaatgcatgcggagcacatatcagcggaaaaatcggtgaggcacataatcctgaaacccaccttattccgattattcttcaagcggcacagggtacccgtgaccacataagtatttttggtactgattatcccacttctgacggaacttgtattcgtgattatatccatgtcactgaccttgcacaggctcatattcttgcagttgaatatcttatgaagggcggtaaaagtgatatattcaatcttggcaacggtgtaggtttttctgtccgtgaggtaattgaaaaagcaaaggaggttacacagaaagatattaaggttgttgaagaaagcagaagaagcggcgatcctgctgtattgattgcatcaagcgataaggcgaaaactgtacttggctggaaacctgagtatgatgatctgaaaacaattattaaaacagcgtggaaatggcattcaacacatcccaacggctatagtaagtgaggcggtatttatgaagaacagcgtttacggcttaatattaagacttgtttcatacggaatcaatacagggcttattgaaaaagaggatataatctacacgcaaaataggcttttgtcgttgttccatatggatgaacccgatgacagttgtacttgccttacagcagataacgaggatactcttgaagaaattttgtcgggacttcttgattatgcatacgaaaaaggaatcattcccgaaaatacagtaacatatcgcgacttatttgatgtgaaacttatggcttcacttgttaagcgaccgtcagaagtaataagagaattttggcagaattatagcttttctcctaaacttgcaaccgatagctactataaattcagctgcgataccgattatataagaagatatcgtattaaaaaagacttaaagtggaaaacatcaaccgaatacggtgatattgatatcacggtaaatctttcaaagcctgaaaaggatccgaaagctattgcagcggcaaaacttcaaaaacaatcgggctatccgaaatgtttactttgtaaggaaaatgaaggatatgccggaagagtaaatcatcctgcaagagataatcacagaattattccgctcaccattgacggagataactggtttatgcaatattctccgtatgtttattacaatgaacattgtattgtgtttaacggtaagcatacaccaatggtaatcaatgattctacattcagaaaactgtttgattttatttcacagtttccgcattatataataggttcgaatgctgatttgccgattgtaggcggttcaatacttacacatgaacattttcagggtggcagatacagctttgcacttaatagggcagaggttgaaagaaagtttattgttaacggctttgatgatgtggagtgcggaattgtaaagtggcctatgtcagttgtaagattgacaggtaaaaacaaggacagcattatttcattatcttcttatattctaaagagttggagagcgtacacggacgcagatgttggcatttttgccgaaacagatggtgaaattcacaacactatcactccgattgcttttacaaaggatggaaaatttgttattgacctcgttctcagaaataatattacaagtgaagagcatcctctgggagtatttcatcctcatgcaaatttgcatcatattaaaaaagaaaatatcggccttattgaagttatgggacttgcagtattgccctcaaggcttaaagatgaaatggctattttaaagaatgctattcttaatcacaaggatgtaagtgaaattccgaaaatcagcaaacattccgagtgggtaaatgaatttgtttcgcagtatgatgaaatcaatgaaaataatattgattcaataattcaaaatgagataggaaaggtgtttcttaatgttcttttggatgcaggtgtattcaaaagaactcctgaaggacaaaaagcttttgataaatttataaatacgctgtagtaaaggaagtgctaaaatgtcaaagttaagggtagtgaattttgaacctacatccaaaggtgaaaacactcatctttatataatagaaaataacagcggagcaagcgtgacattatgtgatttaggcgcaagtgtcgtttcgataaaagttcccgacaaaaacggtagtattagagatgtagttctcggctatgagcacattgacggttatgaatttgacggaacatacttcggtgctactgtcggaagatgttgcggaagaattgcttacggcaaatttactcttaacggagaagattatcagctctctgtaaacaatgggagtaaccatctacacggcggatttaacaactttagccgcaaagtgtggcttgcggtagttgatgataaagttccaaatacagttctatttatgcttgatagtcccgacggtgatgagggctatcccggaaatatgaaggtctttgtacgctacacctttgatgatgaaaatgtacttacgataaaatggtcggcagtttctgacaaagacacaatatgcaatctgaccaatcattcatattttaatcttaacggacataaaagcggtaaagttacagaaaatcacaagctgaaaataaatgcaaatttcttcataccgataaattcaaacctcaatcccacaggagagataactcccgttaagaatacatcgtttgattttaccgaacccaagttaattggaaatggtattgacagaaaaaacgagcagattggttttgcaaacggtattgatcatatgtttgagctgaatcattctgatgaagaatttgtgcttgcagccgaagctgagggcattgatagcggaatcacattaaaatgctatacttctcaaaaaggtgttcatgtatatacagcaaattatgtcgatgttttgtccaatatgggaaaggattcagcgacatacggagaaaattcagcgttttgtcttgaaacccagggctttcccgatgctgtaaatcacaagacttttcctacaacaatattaaaagcaaacgaaaactatacacaaactacaaaatatatttttggtataaacaaataaaatgagctgatttctaactcctttaaaaataaaatctctctaaaatcaaggaccacctatttttcttgggtggtccttgatttttaatctatgaggatgtttcatgttttacagtattacaccgtcttaaaaatattctgttttagcggttatgtgccgagctgtggaataaaagcagtgcggataagctgtgaaagtgtgtcagaaatattatcataaagaatactgagtgcgtcataatttccgcattttacaagacttcgtgcaccgccaaatcactcatgtggttttgcggtaaattttgtaactgtacaattctgactgaaaatcgacctgttctgtttgcaccgtaaagccgggatattccccttgtacggctgtttttacaaactacatttttcattgccgtatatttcttagcgctgtttttgcttttatattaaaatacgcttaggatagatttctttaccttccgcatcaaattcataattttcattaccccactttttaaaaaataatcacttttccctaatataatattttataatctttcaaggattagtgtgtctttgtatctgtcatcagtaaacacctgtgggaatggctgcccctttgtggtatctttatatgcgtttacccacgcatacttaacgacctcattaacgctttgattgattgcttcaaagtgttttgtagcacactttattttaatacgttcatcatcattaagcccctcagcttccttatcccattttgtttctgcgataaaatacatagcaaagttctcgtttaataagattttcagggagaagaatagcagctccaagtgtgttcgcctgccattcttcccagtctgaaatcggtttgtcccgctcggagtttgccttgtaataatgtactccggcggatttctgtgttattccgtaatcatttgggaacaacatcttaaaaatctgatgactgccctcgtgcataagggtaaagttctttctgcccttcagcttgctgtcatagttcaattccttctcaacaagaacggttttaccgtccaaaaagaaaaaagcttcgctgtcgttatcttcaaatacttgaacacccagttccgtaaaagaggtcattccaagaatacttccgtcataggacaggtgctggtattcaacatttaaaccgagaaccttctccaagagaagttccgggtcaattctgtaaatttgtgtgttacggacatcggggagagccatatatgcctgaacatattttccggcgatggctttgatgtcatatctcgataaatgcttcaagttacaaaacctcctaccattaggattttgcttctacaaaccattttccattttcttcgtcgaacagaaatgtgggcttgccgcaaatctgcaccgtgtaacggataccggttcctccaactttggtggaagcagcacggcatttctgcataacacggtctatctcatatttctcgtcattttcaaacttgatgaagttcgggcgagccgttccatcaggtctgtgcgttacattaacttctacatatacttttattctttcggattccatttctatacctcgtaatttcgtaaagtcaaaaccaatcttccaaaatgctcataaccgtcaatgtccttgtccgacactttgtacttgggtcggtcatcgccggtagtattggtgtaacaggaaagtctgcctttcttgaagttctttttcctatcaaagataaggaacattccctcatatatcccgtagtcggtaaaatggtttccgccgtccgcacggaagataactatatcttcgctgcacccctgcataaagcagtcgggtattgtaacgtaagccgtaacctctttttcgttaatcacattaagccctccttagccgaccattcctgtcggcatcgtgatttcagctttttacggtggtagccgcaggttctgacacagaaccccattccttatgctgtcctttccgaaacgccgtctgatttcttcaacacacttttccattcgctccagcttgtcctgttttgcggcatccataaacaaatccaactgacggggcgtgtcttgcggaacaagatttatggcttgtagcgttacagaacgaatagggttataccatccatacctttgttcaaacaattgaaaaacggtcttggcaatcatcatcgaagactgtgtaggaagtgcaatcttcgtctgccattgtcttgtattgagtgtattgtctctgatatgtattgcgacaccctctgcactaagtccgtgaacacggagcttgtgtccgatgtcttgggtcaattcgagaaacacgggccacacctgctccgggttctctaagtcctcaactgttgttattccgtgtcctacgcttttaattggagaaacaaagtctttctttgcaacaacagaaatgtcgttgccattggcatagttccataagactactccgttctttcctaatgttctgcgtaagaactcagggtcagtatttgctaaatccccgatagtacggatacaatagctgtcgagcgtgcgctgtgttgcccgtcctacaccgagcaggtcagtggcaggaagcccccaaatcttctccttgaatgtatcctttggtattacggttactgcgtccggtttcttcatatccgaaccgagcttcgcaaatatcttattaaaggaaacacctacggaaattgtcaagccgagttcaaacttcatcgtttcacgaatttcatttgccaccttttccggcgaaccgaaaaggctttctgtcccgctaatatccagccaacactcgtccataccatacggttcaacttggtcggtatatcgctcataaacgcttctcgcaagctttgagtatttgatatactcctcataatggggcggcactacaaccaagtccttgcacttctgtttagcctgccatactgcgtccccggttttcacatcaaaagcctttgctttgtagttctttgcaagcacgataccgtgtcgttcctccacagagccgcagacagcaatcggatatttcttcaatgcggggtcgatcatacattcgacgctggcatagaaattgttcatatcgcaatgaagtatgcttctcaacatttttttgaacccccttgacttttatagaagtttaatgtaaactatatgtagttcaacttcctgtttcttattatacgcagtttaagtacagatgtcaatagcaagcaagaagtttaactacaataattcggtaaggagtgaaatctaagatgacattcggtgagaaagtcaaagcagagagaaccaaacttggtattactcaggaagaactggctgcaaaaatcggagtaacagttcgagtaatttgttcttatgaaaatgataaatcaagaccgagaggaacggaaagatacaaaaagttagcagaagcactagatgtaaatgttaattatctgctgtccgaggacgacgcattcatcgcagaggtagaagatgaatacggttgcagaggtgcaaggcaggctcaggaattgcttgcggaagtaaccgggctttttgccggcggcgagatggctgacgaggatatgcgtgaaatggttgacgctattcaggaagcttatcttatcgcaaagaaaaacaataaaaaatacactccgaagaaatatcgaaaagacgaataa

SEQ ID NO: 351 - DNA, 7466 bp, unidentified
  source 1..7466: mol_type = unassigned DNA
ttactttactacgtgtttagtatgcagtaattcatgtgccttttctgataatggttcttcaaagtaatctttatagcactggataacctctggattctcatgagaaaatcttaagttattcaccttatcaagtccataaagtaccttcgttcttgccgcaaccttatcataatcatcttttataggctgtccgcctccattaatacaaccgccaggacacgccatcacttcaacaaaatcatactttacctttcctgctgctattgtatccataagctttcttgcattagaaagactgcttgcaactgctaccttaagtatattgccatttatagtgaactttgcctctttccagccttcaagtcctcttacacactggaaagcatctggttcaggattagtcttattgacaagataataagcacttcttaatgcagcctccataactccaccggtagcaccaaatataacgcctgcaccacttcccatgccaagtggattatcaaactcttcttcctgaagctcctctgtcttaataaagaatgacttaagcattctttctacttctctggtagtaagtaccgcatctacatcgcctctgccatcccacgtaatctcatccttctttgcaagacatggcataattgatacacagaatatcttttcaggctccacgccaagcttttcagcataatatgacttcgtaactgcgccaaacatctgctgtggtgacttcgctgttgaaagtctttcaagatactgcggatattccttcttcacaaaattaacccatcccggacaacatgatgtaaacataggaagtcctgattctttaatctccggaagtctgtgaagcagctcacttccttcctccatgatagtaagatctgctgaaaatgttgtatcaaatatataatcaaagccgacctttcttaaggctgatacaagtcttttagctgttgcgaattccttgcttaatccaaagccttcaccccatgctgttctgacagccggcgcaatctgtacaactgttatgatatcttcattctctactgcatcaagaacatatccaacatcatctctttcccttaatgcacctaccggacaattaacaacacattgtccacacagcgtacatttagtttcctgtattgtcttattcttagctatattaacagtagttcttgaacctgtattaacaacatcccatacatgcattccctgtatgttatcacatatctgaacgcatctcatacacttaatacatttgtcattggcccttagaagtggaaaattcttatcccacttattcttttcaagtattgaatcataaggcatctctgatatgttaagttcattagcaagtgactgtaatgtacaatttccacttcttacacatgaagcacattcgtagtcatgctgcgaaagtataagcttaacattggtctttcttgtagtacgcacctttcttgtattggtttttataaccatgccctcctgtactacattattacatgctgtaacacatctgtcctggccttcaacttcaactacgcatactcgacacgcacctatctcattcacttccttcagatagcacagagtaggcacatcaactccaactttacgtgcagccgcaaggatagttgttccgtcttcgacggttatatctattccgttaattgttgcatttaccattgttcttctctgcctcctctaaaagcaccgaatccgaaatgatcacatcttaaacagcgtccagcctcctggcacgcttcttcacaagaaaaaccatattcaatcggttcaaaatcattctttctttcagctgcctccctgagtgcaacttcaactcttccgcaggctactttatcttcattacttgcatatggtatctcaacatcgcatgtaatctcatggttaaagccaagatactcatctatgttagctgccgcaaccttacctgctgcaatagcctttataactgtagccggacctgttacacagtcacctcctgcaaacactccctccgacatttcaccatcctgtggcgtaatattacctgtattaagtgctgagataacacctctctgaaccttgattccatgttcctcaaagctcttagtttctataccctggcctatggcaactactatcagatcactttctaagagcatttcatccttagatgctgccttaggtgctggtctgccatgtgaaacctttgatatcatctgtggctttactacaagtcctatggcattgccctcttcatcctgctttatacgtactggtgacataagctcaagaacatcgcagccttcagcctctgcgcctacaacttcctcttcaagtgctgtcatatcagccttacgtcttctgtatacaatacttaccttgcttgcgccaagtcttatagacgaacgtgcaacgtccattgcaacattaccaccgccgataacgataactctctttcctgtataatcaggcatatctccatcgcctattgcacgaagcatctcaactgcagatatgataccacttctggcatcttcaccttcaatccccatcttcttatctgcatgggcaccgatagatatatatgtagcatcgtactcatcagttatatcatcaaatgatatatcctttcctacacttatattcttcttaacctctattccagttgaaaggatagaatctatctcttcatcaagcttctttcttggaaatctgtagttaggaataccatatcttaacattccaccaagctgttttctttgttcaaatatagttaccttatgtcccataagggcaagataataggcagcactaagaccacctggtccaccaccgattatggcaaccttctttcctgtatctggttcacactctggtactggaactatgcctgcattatctaccgccatcttcttgagtcctcgtatattaacaggtgcatctattatagttctcttacatctgttctcacatggatgctcacatatgtaagcacacgttgtaggcattggattatctcttcttataagccttactgcatcagcatatcgcttctgctgcacaagtgctatataccccggaatgtcaacaccagcagggcatgacttaacacacgataccggctggttactgttacatgaacaaaaaccgttatgtatatgcgactcaaagtcatctatacagccatctactgacttaagtgcaagctttgctgcctcataacctatggcacaatctgctgaataatatataccttctgctgtaagctttatattctcaactgtttcctctgttgcctcaccatcaagcacattatcaaaaagtcttgcaagctgtcttaaaccaacacgacatggaacacacttgccacaagactgtgcaaggcacatttttataaatgatcttgtaagatcaaccggacataatcctggtggagatgccactattcgtctttcaagatcctgatacattgactccattgtaacctgagccttatccttagttaatatagttaatctactcactaaaaaaagacctctctttcctgaatttaatatgttattttaatatgttattgtctgtaataccaaatttatatcaaaaacattaaagccgtccgctcctgatgccatataacatatccagcacaataaccctaaaagttaagcaaaatattaatataaccaaaccattatagtgtaacattaccgataataattgacaataaaggttatttctttaacaaacaagcacaaatatcagaattcacacacaaatcactaatatgccgtattactatacaaactccagattataagcttaccaattactgctattaatatatattatatcttaatcctccatccctttcaacatttcacactaattatgaccgtttaactataaataagtaaatagtaaaaacatacgaaaacaagaacaaaaagcaggtgcggatataattccacacctgccaaaatataattatataacatttattattcttaattatccagaataaattgtcactactataatcctgtgattacttaacaactcttaccttaataacgccatctatagctgaaagcttagctgctacatcctctgtgatagctgctcctgtatcaagaacagaatatgcataatctcctcttgacttgttatccatagaatcaatattaatacctgcatcgcccataacacttgtaagcttgcttatgattgctggtacattcttatgacatactgtaactcttcctgctgatgtacacactccacaatcacagttaggataattaacagaattaacaatattaccgttctctatgtagtttcttaattccttaactgccataacagcacagttatcctcagcttcttcagttgaagcaccaagatgtggaagtacgataacgccttcctgacctgctgttgttgtgttagggaaatctgtaacatacttagcaaccttgccagacttgatagcatcaagaatagctggctcatcaacaagtacatcccttgcacagttaataactactgttcccttcttcatcatatcaaatgctgccttattaatcatgcccttagtactgtcaagtgcaggtacatggattgtgatataatcgcattccttatatatatcctccacattaacaatatgcttaacttcacttgaaagattccaggctgcattaactgaaagatatgggtcatatccatatacttccattccaaggcttatagctgcattagcaactaactgtccgatagcaccaagtccgataacaccaagcttcttgcccttgatttctttaccagcaaatgctttcttagccttttctgccgacttagcaatatccgcatcatctttattatcttctacccacttgataccaccaagtaaatctcttgaagctaaaagtaaagctgcaagaacgtgttccttaactgcattggcattagcacctggtgtattaaatacaacaatacccttatctgcacatttatcaagtggaatattattaacaccagcaccagctcttgctatagcaagaagattatctggcaattccatatcatgcatcttagcacttcttacaagtactgcatctgcttcttcaaatgctgcattagcattataatcgcttgagaaaaggtcaagacctacagaagctatattattaagacaatttacgttaatcattaggcattctccttttcgaacttcttcataaattcaactaacttctcaacaccttcgattggcattgcattgtagatagaagctctcataccgccaactgttctgtgtcccttaagatttacaaatccggctgcttctgcttctttaacaaacttagcatcaagttccttatcacctgttacgaatggaacattcataagtgaacggtcttccttaacaactgttcccttgaacatcttagattcatcaaggaaatcataaagaattttagctttcttttcattgtgttctttcatagctgaaagtccacccattttcttaatccacttaaataccttgccgcagatatagatattgtagcaaggaggtgtattataaagagaatctgcatctgcctgtgtcttccactttaacatagttggtgttccaggaagtacatcatctgttataaggtcttctctgataattgcgataacaactccagcaggtccgatattcttctgaactccaccatatacaactccgtactttgttacatctataggctctgataaaaagcatgatgaaacatctgatacaagaatatgtccctttgtattagggagtgtcttatacttagtaccataaattgtgttattctcacagatatatacataatctgcgtcctctggaatatcaagatctgaacaatctggaatatatgaatatgtcttatcctctgaggaagcaacagcaacagcctcaccatatattttagcttcgttaaatgctttcttagcccactgaccagtaataatataagctgcttttttgttcttcataaggttcataggaacttctgcaaagaactgcgatgctccaccctgaaggaataataccttataattatctggtatattcataagctctcttaagtctttttcagcttccttgatgatattgtcataaaccttggaacgatggctcatctccataaccgactgaccacaaccctggtaatctaacatttcatctgctgcttcccttaatacctcttcaggcaaaactgctggacctgcactaaagttataaactcttgccactttttcttcctcctaatccattcgaattctattaaatatatgataaatctttaatcctaagtacaaataattaacttttttaagcaagctgtatatatttgtcgcaaaatgtcttaagtattaaaaatttattaaactatattttatgcttgtatatttactatgtcaagttaatattttaacatattaaagttatatatgtattttttttaatactctgaacgtccgctaatgtataagcgttgctttattaatgtgcaaaccacgtggaaatatacttataatatacttatattatacttataccacgcctataatatacctatggcatacttataatgcgcttataatatatttataatatgattatatataaatttccaacctataaaaatcatataaaacaattacgatttttcttttcatataggataaacgcaagtcacaaaaaacctgacttgcgtttatcctacatccaatcactttcaacttcttccaacttcttcacaagtgtatccttaagaacactaaaagcaggaataaaactatcccttattaacataatcatttcgtcaacttcatcttcattatatatatgaacagaagtatttctcttttttaacataagcagccatacttcggaatcattgatgaatccaattttataacccaactgtaaaatttcacgtggggaccctgtagaagctccatccacaccatgcattctcattatttcctgtaatgctttccatgcaagctcaaaagtaagattaaattgtcctataattcctgttcgatatatatcattcgtttcggcaagctgaaattctgcgtctgctaatatagccagacaattggtaaagttatcaagttttttcataaattgtaacaccgtccttttctatttcttgtttcaattcatccgaaattgctacatctgcctgtacaatatcaaacatcaatagagaatgggtcttctctttaacatcccaataaaaatgctcaaaatctccaccatatacggcgatgtctatgtcgcttctttctgtatgggtgcctcgtgcacgagaaccaaataatatgatctttgtaatagcatatttttttgcgaaagtagaaagctcccttagtattcgatccggtaaattatacttcat

SEQ ID NO: 352 - DNA, 8144 bp, unidentified
  source 1..8144: mol_type = unassigned DNA
ctattgtacaattttctccagaggctttaacatgtaggcaccctcttgcttcaagaaagagaatcctcctgtagcagatattctttttaatgctgcttctatgccacactccaagtctattttacctgctatctttatagttgaaatatcatctgtacaatcaatatcaactccataatatcgacccagtttggctaaaattacattcaacggatcattattcagagacaatattccttcagtccaaagtacatattcttctgcatttactgaagactcttcaatcagaccatcagacaatattgtagctttattatcaggtgaaagaaccagttccttacccgatttgctcttcacatttactttaccacgtactaagacaacttctgcattttcaaatgtgccgctataagcctttatatcaaaagcagtccctaatacttgtacttcaaattgtgccgttttcacaataaaaggagctgattcatctcgtttcacatcaataaaaatttctccatctacaaagatttcacgtctgtttttctcaaaacgtttaggataaatcactttcgtacccgcatttatatgcaaactagaaccatcagcaagaatcaaacgggtatatttacctttaggaacaataatctggtcgtataaatcttttgtagtattcttagataccttttcttcatctacactcacaattccctcttgtgaataagctactgtagctcctttctttacatgatgaacttctttctcagagacaattaaacgaatatcctctccttctatagattcattagacatttgtgctgctattacggatatatccgatttattattaaaagaatgccattcaattcccaaccatatacaccctatgaaagcagctgcagaagtaattgccacaagtatatatcgctctttccttctttgttttttcttttcaaccccttcttttattttactccatacttcaactatttccttttgagaaggaacttcgttttgcatcttgaaataatctataagattgcgtacagtattcctgatatctattttactatatttcatttttatcctcttttataattagaatggaattaaaagaaaaacctactcacttttacagcattttttttgcagaaaaaaacagtagagtcagaaaaaggatatatctatataataatcaacaaattacaaagaaaatatttttcccctttcaaagagataatattattttaagaaaaaacaattgccatacacccaaaaagtattcatcttgagttactagagtgcgcagtttagttaaagcccggctagacaaattcatagacgattgtatgttcatatccataacatccgctatttccttatatgagagttcctgcacataacgtaaataaagaactgttttttgattcggagataactgtgagattgcctccaaaagacgacgagccagttgcagatcatgatcattcttaggaaataactgttcaaatagatcttcattgagcggaatatgaaaaactgagtcatctaatgaatccgcttctttattagttgctaatttataggtgagattatttcttaaagcttttaatagataagaacggactgttatgtttgtcacattaatgtgagtattctgatataagtttataaaaagatcctggatacaatctttgaccaattctttatctgtactgcatctcaaaccataattcaacagaagagaatagtatctttgataaagtatttccaatgctttttgatcgccttttatcaaaaggccccacaaaacaatatcatccatttcactagaggcagccatgcttttcattttctatagacataacacaaatatactttaaatattcaaagattaaaaaaaaatcctatttttttatgagaaaaattactcgttaaaatactcaaaaaccttccaataagtgggatagaagtgcatcgtgtccgataacagtgaaaatcagtgaaagaatttaaaagagaaacaaatgcaacagaattatttggaagaaatacaatgaaggcttacatttgtcatgtgatttttttcatagtattagatttaaggttaacaaaggttggagcaaagcgttgctcctttttttatgtttatgataaactaagctaataattgatacattcctcccaccaatacacgaattacacctttcatttcaagttcgaaaagaattgcattcattttctgtacaggaatatctgcttcaacaactaatgtattaatctgtaaatctccttgtttctccagaatatcaaccaccttttgctcgtcctcggataagtcaaggaaaagactgcgttgcacattttccactttcgccggatgagcagcaatatcccaacccattgccgatacaaaatcttctgccgaaagaagtaaagaagccttattatcccgaatcagttggttacagcctttggaatattcatcattcaggcgtcccgggaaagcaaagcagtcccggtgatagccttcggcaagttcggcagtgattaacgaaccacccttctcggcagactcaataacaattgtagcgtcacacataccggcaacgatacggttgcggctgacaaagttatggcggtcgggattcgttccggtcaggaattcagttaacagcccaccattatcaagcatatcaatagctgtctttcgatgcacatagggatagatgcgatccaagccatgggcaagaactcctaccgtagaaagctgattggctaatgctgcacgatgagcgtttatatcgattccataagccaagccactgactaccaagacatcagggcacagtactttcagatcgtgcaaaaaagaagcacagatacgggttccataatcagtggcatgacgagtacctaccatattaacgacacggagggcattcaaatctgtatttcctttgaagaaaagaacaacgggagcatcctcacactctctcaatcgggaaggatactcctcgtcggttatggtcaggcaacgaatattattcttctgaacaaaatcaaattcctgcttcgcacggtcaatggcttgcgggcaatccaacgcattcactacacgccgacttattcccgaaacacattcaagaagtgcctcgcgattatggaatatgaacccagcacttcccgcctcgtccatcaaatgtttcgctccaatatgcccgataccaggcaccattgtcaaagcaatactataaatttgttcttcttcggagctattcatttcaggtaaggtgcaaagacgttatcaaacaattcgctgtcactcaaacgtccatttactacacataccgtttcaacagtggatttcactactactttattatcacttttccggaaaatatcctgatagaacacatacttaatgccttctttcttcatatatagcttggatacaaattcatctccactcttcaacggagttttgaaagccatattgatacgtgctactacgggatcgactccctgctcatgaagcgctgcaaagctaacgccgaccgaggtcagaaattcatgccgagtatgttccagataatgctgatagttggcattattgacaataccttgaaggtcgcattcataatcacgcaccttcatttccaattcatagatatagttcatttatcgtgaattaaagattagagaataatgaccggagctagcctcttttctgttcgatatccagccctttaaactttttcagttcttcggtagataccagtttatacagtttgtcgctcggacgtatcttatccgacttcatagagaaatgctgccctttctttacggtctgcaccggttccagatcaacacgcgcttcatccaatgtcataaaaacagcgccggtagtcggtcctgtaatcaacagtttgtcgcctacgctaacctcggcagcttcaaccaaaaactcggagactccgatgttagaaaagtatttgatcccttttcccacgtaaatcttacgttccgttgccgccgatccataattgcgggtccattctcccaaacgctgtccgagatagtagccgtcccagaaaccacggttgaaaacggtcttcaggcgttcatcccatgctgcaatcttttcatcagtaaaggtatcttccagataggctttgatagcttctttgtagcattccaccactgtgcgcacatactcaggtccacgggcacgaccttcaatcttgaacacacgcacacctgcatccaacatcttattcataaaatgaatagttttcaggtctttcggcgacatgatatattcgttatcaatatccaattccacatccgtttccttatcacgaacggtataagaacgacgacacacctgcatacaagcaccccggttggcagaatggttcatctcatgcaaagaaagatagcatttacccgaaacagccatacagagcgcaccatgacagaacatttcaatacgaagctgttcgccactcggaccgcagatatgttcttcctgtatctgccggtaaatctccgctacctgttccagattcaattcacgggccagtaccactacatcagcaaaccgggcatagaatttcaacgcttctgcattggagatattcagctgggtggaaagatgcacctcctgccctatccggcgggcatagtccatcactgcaacatcagccgcaatcacagccgaaattcccgcttccttagccgcatcgacaatcgtatgcattaaaggaatatctttatcatagataatggtgttcaccgtcaggtagcttttcatcccgtgctcatcgcacgtgcgggctatttcccgcaagtcatcaatcgtgaacgtattagccgaacgggcacgcatattcaagttttctataccgaaatagatagaatcggcacctgcctgaatggccgcagctagagattcgcgcgaacctacaggagccataatttcaaaatctttcaaactaagactcatagaatatatacttatttgtatcagttaagcaaatgaatgcgtacaaaggtaggcttttttccgtatttttgcagcgaaaagaagaagttacttcaatcataaacagcaaataacaaaatcgtatatgaagattaaccatatagacttgggaaaacatcctatcctgcttgctcccatggaagacgtgaccgacccggctttccgcctgatgtgcaaaaagttcggagcggacatggtatatactgaatttgtatcgagtgacgcactgatacgtgctgtcagcaagacagcgcagaagttaaacatcagtgatgaagaacgtcccgtcgccattcagatatacggcaaagatacggaaaccatggtggaagccgcaaagattgtggaacaggcacagcctgatattttggatattaacttcggatgcccggtgaaaagagtggccggaaagggtgccggagcaggaatgttgcagaatatccctcaaatgctggaaattacccgtgctgtagtggatgcggtaaaaatccccgtaacggtgaaaacccgtctggggtgggacgccaacaacaaaattatcgtagagctggcagaacagttacaggattgcggtattgccgcattaaccatacacggtcgtacccgtgcacaaatgtacaccggagaagcggactggacgctgataggagaagtaaaaaataatccgcggatgcatatcccgatcatcggcaacggggatgtgacaacgcctcaacgctgcaaggagtgtttcgaccgttatggagtggacgctgttatgataggccgtgccagcttcggccgtccatggatatttaaagagatgaagcattatctggagacaggcgaggaactgccgccactaagttttgaatggtgcatggaagtcctccgccaggaagtgattgacagtgtaaacttactcgacgaacgcaaaggtatcttgcacgtgcgccgtcacttggctgcaagcccgttattcaaaggaatccctaatttccgtgacacccgcatcgctatgttacgtgccgagaccaaagaggagctgtttcagatatttaatgaaatactcaccaacagagaaagtagcccgaaaaattaaatacgatatttatagcattgcatccttgaagatagtattatggagcaatgctattttatttgaacatcggttgcgcaaaccactttttaaacatccaagttaccaccacgtacaacaggaatgcggagaaaaagcctacaatagcatcaatgacataatgagcctgaatatatacagtagctccacaaagcagcatatagaaaggtatcaggcaagcaaacagcttcttactgccccgccatgccataatcatcagaatggtagaaatgccgacatgcgaacttggaaatgcggccgtaggccgttcgcccacttgttgggagccttccactaaactataaaagaacccatgctgatagcccggaccgggaagcaattcctgatgatgattgaaataatcaccgatagccggaaaaattcctttagaaacgttatcaaatccaatggcaggaaaatagaattgaggtcctgcaacaggtacgaatatatatatcagataatagataaagaaggaagtgacaagcacaaaagacatcttttcaaaccactcgaacctataaatgaaatagaataacgccacaatcaacatcatcggataatagaagaaatatcccatattgaacgcctcactgaccagaagatgcgggaacgtatgacagaaccagatagcaggttgcccattaaaaataaactgttcggtgatagcgaagacatgatccagattcggaaagaaccggttgaactcgaaagtatccggataccagtaagaaagcaggctcatctgaatgacgatgcgtacaaacgccgaaaacttacagggagcaagccggtagagatacatcaacagaaaagtcattgcagcaatcatagccctatccagcaacatgtgccatggatgatccattcgctgaaacaggaatagaatcaaaatggaggtcaacagattataaatcaatgtaatcttctccacagcaaacaaccctttccgggtttctactcgcttaaataagtctaaagccatccttcgtttttataccaggcaatggtttcatggactcccttttccaaatcatattcgggcgcatatcccagttcattaattgtcgggatgatgtcacattgccaattgcgttgtttcattatcttatatttatccgaatttagtgtactgctctttccggaacgtgtagcaataaattcagcgagcaaagatataacttttagcacaattaacggacatttcagatgaagaacaaacggattacccaattctttttgtatcaggtccgaaaacgcacgactcttatacacattcccgtctgtcaggaaatacgttctacgggtaacatttttctctattcccaggaaaatagcttgcacaatgtctttcacataaacaaaagtaaggtcttgacgccggaaacccaccgagaaatcaacatgcttctgaatagatttcgccataaggaaataatctgtttcacgaggtccgtaaactcccgtaggacgataaatgacataaggaaaaccgggaatactctgaatatacagttccgctttcagtttactgaacccataagccgtattggggaccggagtatcatccgcctcaatcggagtataatccttctcacgtacaggaccgaatacactcaacgtgctgatatatataaactgcttcggaaccatattcaacgctttcagcgtgtctataaaatatttagtctggagataattgacataatcaaaagtctttttgtcagagcatttggtgacaccggcacaatgaatgatataatcaaacttgttataagtacctttatgcccggagagttgggcgcgaagttcattaggatgcgcaaagtccagttccagaaaatgaatcttccggtttttcaaatatttcttactgctcgtagaacgaatccctgcccacacaccaaaccttcgtttcaacgcttcctctacgatgaaacttcctataaaaccgcttgcgcccgtaattaaaacactctccat

SEQ ID NO: 353 - DNA, 11307 bp, unidentified
  source 1..11307: mol_type = unassigned DNA
  misc_difference 5318: note = a, c, g, or t
  misc_difference 5319: note = a, c, g, or t
  misc_difference 5320: note = a, c, g, or t
  misc_difference 5321: note = a, c, g, or t
  misc_difference 5322: note = a, c, g, or t
  misc_difference 5323: note = a, c, g, or t
  misc_difference 5324: note = a, c, g, or t
  misc_difference 5325: note = a, c, g, or t
  misc_difference 5326: note = a, c, g, or t
  misc_difference 5327: note = a, c, g, or t
atgaaagaaaataagataaaaaaagcaaacacatccccggaagggcaggctggttctgagaacatgagtacagcagatgtagatgcagtaatgaagaaatacgaccgcgaatccaatattcgtgtgtggaccggcaaatataagctggctgtacgcggcctgctggttgccttttctctgtggtgtatctatgttaccttatttgcaaccttcctggaggaaatccgactgacttcttttctggggctgatcattcttatcggatttcttacctatccggcgaaaaaaggagatatcagagaaaactacatgccgattggtgatattatttttatgatcgcaggcgcaggtgcttttctgtattttactttttctgcaaatcagatcatcaatcagggtaccagatttgccccttatcagattgtgatcggtattatcggtattgctgcactgatcgagcttaccagacgatgcgtgggcctgccgatcctgtttgtggcaggttttttcctgatctatgcactggctgtagggcttaccaatccggcatttttgggaagagtgaaattcctggtgcggaatcttttctacacaaaagagggtattttctccacacctgtaaatgtatgctctaaatatattgtggtatttattattttcggtgcgtttctggagagaacaggaatctccaacttctttattcagctggctaactgtattgcaggaaaatatgcaggtggaccggcaaaggtagcggttatcagttctgcactctgtggaatggtatccggttcctctgtaggtaacacagtaacaaccggttctgttacaatcccgatgatgaaggacacaggctacaaaccggaatttgccggagcagtagaagctgcttcttccacaggtggacagatcatgcctccgatcatgggagctgccgcattccttatggcagattttgtgggtgtaccgtactccaacattattgtcagggcgattctgccggcattgttgtactttacaggaatctttatttctgtacatctggaagcaaagaaattagggctttccggaattccgaaggaaaaacttccggtatttaagcttctgatccgtaaaatctatctgttattacctctggtcatgctggtaatctgggtgtccggaaactatatgaccatgcagaaggctgccagctatgcaatcgttctttctgttatcgtaagtctttttgacaaagaaaacagaatcagtgttaccaaatgtattgatgcgctggaagcaggaggaagaggtgttatctccgtagcagtagcctgcggtgttgcaggaatcatttccggttccatcaccatgacaggacttgccaatgacctgatcaacggaatcatcagtgttgcaaacggaaaactgatcattgcactgcttctgactatgctgtgctgtatcgtacttggtatgggtgtacctaccactgccaattactgtatcatggcagcaacctgtgctccaatcctggtacgtatgggagtacctacactggcagctcatttctttgtattttactttggtattgttgcagatatcacaccgccggtagcgctggctgcctacgcaggttcagccatagcgaaggccaatccgatgaagactgcatttacagcctccaggctggctatcgcagtatttatcgtaccttatgtattctgcttcaatccggcaatgctgctgatcgataccacaccgcttaaggttgttcagatctttatcacctcactgatcggtgtgtttggattgtcctcctcactggaaggcttcctgtcagtgaaaatgtctgtaccggttcgtgtcttaatggcagcaggcggactgatgctgatcgatccgtcactgatgactgatgttgtgggaatacttctgatcgtgggatgctgcgtatggcagacagcgcagaagaagaaaactgcatagagaagaataaaaaaaccggcaaaacacctgtcatttgggtgtcctgccggatttttttatttagaaatccagttctttcagataccgtccaagtgcatcctgccaggtggggagtggtgtgaaaccattggctgtcagtttgctcttatccaggcggctgttaaacggtctggctgctttggaagcgccatactctgcagttgtgacggagttgactgtcatgttttccgggagatattccgggtgtcccatggcagcggcctgacggaagatttcttttgtgaaatcataccagctgatatatccgccctcattggttgcatgataataaccgtatttttcagtttcgatcatatctaccagaagtcttgccaggtcataggtataagtaggtgtaccgatctggtcattgactacggagagagtatcatgagtttttccgaggttgatcatggttttgataaagttcttgccgtttttgccgaatacccatgcaatacggacgataaagaacttatcaactgtgccggatacggcaagttcaccgtccagctttgtctgtccatagacatttaatggtttatagtccttgcagtcaggctcccatggagtggttccctggccatcgaatacataatcagtggacagatacagcatcttgatgtcaagctctttgcacacatcagcaatattctgagttccggttacatttaccagacgaaccttcggctggttctcttcatcttcggcagcatctacagctgtccatgcagcacagtggatcacagcatcaacatttgcttctttaatgactttttctacagaagctttgtcagtgatatccatctgaacataaggcattgtggtaactgcagtgccatcagcgattccgctgtaggaaggagcaatgtcgcttcccacaccttcatagccgcgtttcgcaagttcgttcataacatcatgtccaagctgaccgcctacacctgttacaaaaattctcataaattatgcctccccgcggtttgcgtacattttttcatagtagttctggtattcaccggagatgatcgtttcccaccattctttgttatccagataccatttgatggtcttcttgataccgtctgcgaattttgtttccggtaaccagccaagttcgttgtgaatcttagtcgggtcgattgcataacgcatgtcatgacctttacggtctgctacgtaggtgatcaggctttctggtttgccaagttctttgcagatgatcttaacgatatcaatgtttgtcatttcattgtgtccgccgacgttgtaaacttctccaacacgtcctttgtggatgatcaggtcgattgcgcggcaatgatcttctacatagagccagtcacgaacgttttcgcctgttccgtataccggaagtggtttgtcatttaatgcattggcgatcattaacggaatcagtttctccgggaaatgatatggtccgtagttattggagcagcggctgatagatacaggcagtccgtaggttctgtggtaagccagtaccagaaggtctgcagaagccttggaagagctgtaagggctgcttgtgtggatcggagtttcctctgtgaagaacaggtcaggtctgtctaatggaagatctccgtaaacttcatcagtggatacctgatgataacgcttgataccgtatttgcggcatgcatccataagaacagcagtaccgatgatatttgtggtaaggaaaacttccgggttttcgatggagcggtcaacgtgactctctgctgcgaagtttacaaccatatcagggtgttcttcttcaaaaagtttgtaaactgcttcgcggtcggtgatgctttcttttacgaaacggaaatttgggttgtccatgacaggtgcaagagtggaaaggtttcctgcataggtcagacagtccagacagatgatgcggtaatccgggtatttttttaacatgtgaaaaataaagttgcttccgataaatccggcaccgccggttacgataatgttcatagtgattctccttaaaaaatatataatatgaatatctgtaagattctgttatagagtcaggcagataaaattatccgccttgctgcatggcgggtgatatatcaaataactgtttgaaaatttgatatatcactcacttgactgcgaattcgcttgtacaggtctaaaagcttcggttagtgcaatacatccagatatttaccgtccagaacgtcttttaagtactgaccatactgatttttcttcagtatttcataaaccttcagcacatcttcctttgtaatccagccattgagatatgcaatctcttccaggcaacctattttgcggtgctggtggctttccattgtttttacgaaattggtagcttctacaagactttcatgtgtgccggtatccagccatgtgaatccctgtccgagaagttctacgtttaattcgcccttttccagatagatgcggttcagatctgtgatctcaagttcgcctctggcgcttggtttcagattttttgcatactctacgacgcgattgtcatagaagtataaacctgtgacacagtagttgctcttcgggtgctcaggtttctcttcaattgagatagccttgccttcatggtcaaattctacaataccgaatctctccggatcatctacatagtatccgaaaacagttgcaccctcgccggattctgcgttctttacagcagctttcagtcttttcttcagtccatgtcctgcgaagatattatcgccgagaaccatggcaactgtatcattaccgataaattcttcaccgatgataaatgcctgtgcaagtccgtccggacttggctgtactgcataggtgagatggacaccgaactgatgtccgtcaccaagaagttcctcaaaacgaggagtatcctgcggagtagagatgatcaggatatcgcgtatccctgcattcatcagtacagacatgggatagtagatcattggtttatcatagattggcagaagctgtttggatgttaccattgtaagcggataaaggcgtgtgccggaaccgcctgctaaaataatacctttcatgtgtattctcctttgttattggcagtatgcggtcggagcgatattctgtcagttatctgtgtaaatgataagcaaaatatcaggcgactgcggtactaatcaacgggtttctggattgtcagtctgagttacgatatcatcctgactctggtgattgtattataaaaggtgaccttaggtcaccttcaagcatttttttataattttggtaaaattgttggtttttacttataggacagagannnnnnnnnncttaggtcaccttcaagtactttttacaaaaaagttaaattttggttatttttcacaaagaaaaatgccggcatccttggtaataaagaacccatcctttgtctttcgcgatacaaatccacggaaatctttgtatttgtccagaagatactgattctgatttccatggcaggagaggatataggaaatcagcggttctgcatcggggacaagaagagagtccttatagctttcccagaaaatacgggaaaaatacggtgccaggatatctgctccgttttctctgccaaaacgctcatagagtctgtctgcggagagaacgatccggtcgtcaaaatcccggaccagtctgctgacttcctgcatgtgtttttttccataggtactgcagatcagttttccgcctggagtgagcactcgttgaatttcgctgcatacagcagagatatcttcacagtaaaaaagcacatggtttgcaatgaccagatcaaagcttctgtcttcatgaggaattcttgcacagtcaaatgcctcgaaggaaaaacggctgtctttgcgtccgatagcacgtctggcatcacgaagcattccggatgaaaggtcagaaagagtaacggaaactttaccggggaggctggaaatattctgtgtccacagaacaccgtcgccgcatccaagttcaaggatacgcatccccggatgaatctgacactgctcataaatccatggaaaccatccctgtttattctgggaataaaggctgtgcagattaatgcgtgaggaaatgttggaggcgttctggtattgatttttcatgcttttctccatgcctgtcaggtggatcaggtcaagcatctgattccagtctatggcatgatgggagcggatcgcatctgtggtatcctggattgccttttccaccagctgcatttgttcgatacggtcacgtaccagctttagctggatgttcagggaattttccataaaatgatagtctgagtcgtcaatggtcatttcccgtatgtcatccagggagaaacccagatatttcagaagcaggatctgggaaagtcttgcaaaatcctcatctgtataaaaacgtgcgccggattctgttacataggagggtttgaggatattctgtttgtcataatagcggatagtgcggagtgttacatgtgccatccgtgcaaattctccggaagagtagtagccgtcttttttcattgtaaaaccttctttaagaaaaatagtcttgcccgcaaatgcggatagaaacagttgttcagcctgcatttgcgtattgctgatatgtgtagagtataacacagctgaccggcaggctacaagcatcaggtattaccggatggataatactatactggctgaatggtaagtcagatggtgatttttgacattttttggaggatgctaatccttgtcttttgacagaaattatggtatgttaaataataacaatcaaaactgattttcatacaaatcataatctggcagttctgccatattttttccaaaatacaataaatattaagagagaacagtaatgacaatatgaaaggtgcagggacaggaggagcctgatgattaatttatttgattttacttactgcggagactataatcggcagattcagaatctggcaaggatggtgccggagaagtggagcttttcggatacagatgataacggaattctgaaaggatacctggaacatacatttaaacgcctttatgaagaacagaaggtgtgggagaaaaagaattatgccatatttaatacaggactctttaattactattatcagccgatatatgcgtattttattcccaatctggtcccggacaggcagccctggtttctggatggcttttatacagaatactatttgttaaaagaaggaatcacctgtctgccggaaaaggcatgctatgtggaaaatccgtcagatcttgtgtttgatacaaaacttccggtaatcccacagtacgagcatattttcggggatgaggaaaatgctgcccgtcttccaaaggaagtacgtgacagcagcatgaaaatgcagctgtttgacggcgcgctgaaacagacaaaaagaatgcttgaggcagattacaggacggcaattccacagtattataatcactcaatccagctgctgctcccaatctgtctccgtcatccgggaaaacccgaccttgcactggcgtgtatgaaaacttcggacggaagcaaatatctggggcgtacctgcctgactctcagaatggcctatcataatgccaggctccttgcaagggtggaccgaagctggctgatgacttctgtatctgcctgaggtttgacatgtgtggttcgctttgatatattatagcagcgaagcggatgattttatctgtctgactgaaatgatgtcaggttagatatttttacggattattctgctgctatagatgaaacaacagaaaaaggtgggtgagaaatcaaatgcgaaataaaagtctggatgctgtaaaggccattgctgcgtgcctggtggtatgcatccatgtaagctttccgggacaggccgggcagcttgtaaaagtactggcaagatgtgcggtgccgtttttctttatggtatccgggtatttctgttattatcaaaattgcaatgcctcaaaaagaatattgtctaaaatcctgcatatcatgaagctttttgcagtttcagttgtgttttattttatctgggaatgttttatgaaagcctggaatggggagagagtatggacatggataaaagggcttgtgagtacagagcatctgaaggaatttttcgtgtacaacagtacttctccggtaagagcacatttatggtttcttcctgcattaatttactgttatctgcttgctctcctgattgaaaaatggagaatgcgtaaggctgcatattgtatggcacctgtattgctggcaatacttttatggagagcggagttttgtgtcttttttgacagattttatcacactatggaatacagaaactttctgtttacaggaatgagctttttccttacaggtcagatgatccatgaatatcaggataagatagtatgcaaacgtctggagcaatggatgcaatggggattgaaagcagggatgagtttcggtgtggcactcagcatgatggaatatgctttccggggggctggagaaatttacacaggaaattgtgttgcagtgatctgtctgtttctgtggcttattttatatggaagggaaataaattttccctctgtactggtggaaaccggaagaaaatatgcgttcctgatctatcttcttcatccggcgatgtcagaccttctgaaaaaatgttcagaaggtctgggagtcagcaactgtcagatttatttttggctgcgtccggttttggtatatatgctgacagtggtgacagtttctggcatatctgcggtctctgcgtatgcaaggcaaaatattttgcagaatgatcatgtatagtcagggtatgaaaatccggaatgaattttggctgcgttactgagaatggaatgaacagtaacatagtaacgttatcttcaggaaccgcgggaattataactgttcacataatggaaaatgtgatatagtaatcagtaaatcttatgaacgtaaccgtccggtgtttcgcagaatggcggactgctgaacagttaccggaaatcattatgcagaaaatacaaaggagagagaatggcagaaaaaaatcagaacatgaaccagagcaagaacagagcagaagagcacgatgaaagtgtgctgaatccggagattaagaatgaatcggatctgtcaaagaaggaaagacgtctgattgagaaagaaaaattaaagggaatggggccaaagaaaaagctggaatatatctggatgtattataaaccggctattttcggagtgatcgcagtgattgctcttatattcggaataaaggattactatgaacagtccaaaataaaaacagttctgtccatgacagtggtaaattcaatggcaaatgatacggaaactcctgagcagaaaatcaaagaaacacttgggtacaaagatgatccctatagtaaagtagagataggcgtgaatcttactacggactctgaaatggcagaatttgattataatgcacagatggcttatgtggcacagatccaggcaggttccattgatattatggttatgccggagaagctttatcagactttgaagaagaatgagccatttgcagatttgaaggaattgatgggtgaggaagcttttgagaagtttggaatgcagacagatactacgcacatttccattactgacagtgagcttgaacaggaattaggtgtaatctacgatcctgtatgcattgcagtgccgtattcagcaccgaatcaggagaacgcagtaaaatggataaaaagtcttgacagcaggaaataaattgtgatatgtttatcacaccaaaactggtgtggatttttcagtcttgtgacaaacatgaactcttttcgccgcacgattatcatacagcaatgtagagataattgtgtggcgttttttgttgcaatgaaacagagaaaggaaaaaagaatgaacaatacttttatgaagaaaaaaccgattctgccgcttctggcatctatggcaatgcctatggtactgtctatgctggtgaattcactgtacaacatcgtagacagcttttttgtggcaaagatcagtgagcaggcgatgacagctctgtctctggtatttcctgtacagaactttattaatgcagttgccattggtttcggtgtgggaatcaatgcacagatttcttttcaactgggagcaaaaaatattaaaaatgcgaatatagcagctacccatggtatgctctttaatattatccatggaattatttttacagtaatctgtattccgtttatgcctgtatttctcagtatgtttacaaaagagcaggaagtgatctcatctggtgtgcagtattcaaccattgcatttgcattttccacagtgatcatgatcagcctgtccttcgaaaagatttttcaggctgtgggcagaatgaaactgacaatgatcagcctgatgatcggttgtatttccaatattatcctggatccgctgctgattttcggagtggggatttttccggaaatggggatcagaggtgcagcactggcaactggtcttggccaggtatttacagttattgtatatctgatcgcatataagaagtgtagtattccggtggagatcagcaggaaatatctggaacttaacaggaacctggacgggaagctgtatatggtagggattcccgcaatcctgaatattgccctgccgtcagttctgatctctttcctgaatcagatattatcggctttttccggaagctatgtagtggttctgggaatctattataagcttcagacttttttgtatctgcctgcaagcggcattgtccagggaatgcgcccgttgataggatataattacggagcaggagaaataaagagggtaaagaaactttttgggatttctgtgcttctgaatggtatgatcatgctggtaggaacgatcatctgctttacagcatcagagacattgatgggaatgtttactgagaacccggaaactgtaagatttggcactgcagcattacagattatcagtatcgggtttatcccatctgccatctctgttacagcttccggtgcattagaaggactgagcaaaggtgctcagtccctggtgatttcgttattaagatatattatagtgatcattccggcagcatacctgctgtgccattttgccggggcagatgctgtgtggaatgcgttctggatctgtgaatttataacagcagtagtagtaggtatcgggataaagtattactggaaccgtctgctgcagtag

SEQ ID NO: 354 - DNA, 11749 bp, unidentified
  source 1..11749: mol_type = unassigned DNA
ctaatagcttccattttccgtttcccctttcctgataaactgttctacaacttcctgcgtaagcagccattcctcacatttttcctgatagtaagcacgccctttgccggtgatccggtagtaggtacggcgtttgccggttgcagtgttctgatcctgaaaagatgtgatatagccatttttctccatacgtgtaaacgcagaatagagcgtggtctccttgataatatatttttcatgggagagcgttttgatctgtctggagatttcataaccataggatggctgatccagcagaagataaagaatcatggtgtcattgtaaccacggataacatcactgctgattgccatatgcatacctccttactgtatctgtcgtatttcgtctgtcgttgctacgatagatgtactacgtctgatgaagtaaatataacagaatagaggaaacgcgtcaagtgaaaaataaaaaaaccccatgaataaatcatggggaaggtgattacggttatgctattttttcccggcagcaagttttctgcggaattcctgcgttaattgtcggagtttttcatccggtacaaattgctttagggtttcttcatccatggcaacacggttatccatggttttcatgatgtcggtcacctgcatttcctgataaacgtttttgtcgctcaggtcgtagatctgattgtcagaaaggcgcaggacaaccggacgcataaaatcacgggtgttttctataagaacaatgcctttatcacctgtggaaagatcaacactggcggcctttggaacaatatgaatacactctgcaagtgctgtgacaagcaccggaagaaacttctttgggtattttttgaaatactgcatggcggcaatttccgacatcggttcatgtccgctgttcatggcagtcatccggtcaaaccagtcggcgatgcgcagaatggatgccatttcctgtaattcctgatccggagcggttgcgagtttttccaggtggtcttcatatacataggtctgcatcagagccagtgcgcgtggaaaaaagtcaaaatcattccggtacatggaaagcggaacgagtcctttttccagagaaagctggatgacatcctgatcggatgaggacaggtcgttcattcctttttccagaatattccgcggaacattccggtatccattgtcataaagaagggcagccgtggtcagtatacggagtttttccttcggtagtctcagatgggcgcccatcatggttacaagtattgcggtgctgatcgcatgcttgtacatgaaatcatcactgctgcgcagattctggttaaaattcacacggtgttttaaagacccgtagtgggaaaggatatcttccagaaataccgggtatttttcgagttttctgcgctcggtaatgcagtttaacacttcccggagacggaaaatgtataccgtctgtaactgctcaaactccagatcttcacgggaaagcggaggaagcggttcggccggctcgagaatgtagacaccgatcagaccgaaattttttgcactggcaattcccggcgcggtgagtgcggaattgcgctcataaagcagcacaccttttttattgtaaattggtttggcaagacgcatgcctgcctttaagtcttctgttcttacaaatttcatatcacatgatcccccgtttggattcccctcagtattgcttgaaatataccataaatataccatgaaacagagccggttgcaataaatgaagaattttttatgaacaacgtaggttttcattgattttgtgcggaaaatgtggtattatagacattgttaaaaaattaacagcatcattgggtgcgagtttgatttaaaggagaacgaagaatggcaaagaaagttgtattagcaggtgcttgccgtacagcaatcggcaagatgggtggagcattaagcaatactccagcagcagatttaggtgcaattgtaattaaagaagctttaaacagagcaggtgttaagccggagatggttgacgaagttaagatgggttgtgtaatccaggcagctcagggacagaacgtagctcgtcaggcttccatcaaggctggtttaccgatcgaagttccggcaatcacaatcaacgttgtttgtggatccggtcttaaatgtgtaaacgatgctgcaacaatgatcatggccggtgaggctgatatcgttgtagcaggtggtatggagaacatgtctatggctccttacgctatgacaaaggctcgtttcggatacagaatgaacaatgcaacaatcattgatacaatggttaacgatgcattaacagatgcattcaaccactaccatatgatgatcactgctgagaacgtatgtgacaagtacggtattacaagagaagaacttgatgagttctctgcaaacagccagcagaagtgcgaggcagctgtcgcagcaggcaagtttgatgacgagatcgttccggtacctgtaaaggttaagaaggaaatggttgatttcgtaaaggatgagggacctcgtccaggaacaacagtcgagactctttccaagttacgttgctgctcaggtaaggaaggcggactggttacagctggtaatgcttccggaatcaacgatggtgcagcagcaatcgttgttatgagtgaagagaaggctaaggaacttggtgttaagcctatggctacatgggtggctggagcactcggtggagttgatcctgcaatcatgggtgttggtcctgttgcttctacaaagaaagttcttgcaaagaccggtctttctatcgatgatttcgatctgatcgaggctaacgaggcatttgctgcccagtctatcgcagttgcaagagacttaaagttcgatatgagcaaggtaaacgtaaacggtggtgcaattgcacttggtcatccggtaggagcttctggatgccgtatccttgttacactgcttcatgagatgcagaagcgtggatctaacagaggtcttgctacactttgcatcggtggtggaatgggatgttctacaatcgttgagaaatactaatttttttgccagataagatacatagagggggtgcgctgcatccccttgaaatgtgaatatatttattatttaggaggaactaaaatgaaggttggagttatcggtgctggtacaatgggccagggaatcgctaaggcattcgcacaggttgacggatatgaagtagcactctgcgatatcaagcaggagtgggctgaaggcggaaaagacaagattgcaaaaggatatgcaagacttgttgcaaaagagaaaatgacacaggagaaggttgacggcattcttgccaagatcactccaggcttaaaagaagacctttgcaaagactgcgacctgatcgttgaggctgctttcgaggatatgaatgtaaagaagactacatttgctgagttagacaagattgctaagccagagtgtatcttcgcttccaatacttcttccctttctatcacagagatcggaaacggacttacccgtccaatgatcggtatgcatttcttcaatcctgctgaccgtatgaagttagtagaagttatcgctggtgtaaatactcctgctgagactgttgaagcaatcaagaagatcgctgtagagatcggaaagactccggtacaggtaaatgaggctgctggtttcgtagtaaaccgtatcttaatcccaatgatcaacgaagctgctttcatcaagatggaaggtgtttccgatatcgctggtattgatgcagctatgaagctgggtgcgaaccatccaatgggacctttagagttaggtgatttcattggtcttgatatctgccttgcaatcatggatgtactttacaacgagacaggtgacagcaagtaccgtgcatgcccactcatccgtaagatggttcgcggtggtaaccttggtgcaaagtctggtaagggattctacatctacaatgcagaccgcacaaagacacctgtagacgcacagtagaaaagtataaataaaaataaatcataattaaggagtgttaaaatcatggattttactttagacaagaaacatgagatggctcgcggtcttttcagagacttcgctgagacagaagtaaaacctcttgcacaggagacagatgagacagagcagttcccggctgaaactgttgcaaagatggcaaaatacggattcatgggaattccggttccaaaggagtacggcggacagggatgtgatcctctgacatacgttacatgtgttgaggagttatccaaagtttgtgcaactaccggtgttatcgtatctgcacatacttctctttgtatcgatccaatcatgacattcggtaccgaagagcagaagaagaaatatgtagtaccgcttgcaaagggcgagaagctcggtgcttttggtcttactgagccaggcgctggtacagacgcacagggctgccagacaaaggctgtattagatggtgatgagtgggttttaaacggatctaagtgtttcatcacaaacggtaaggttgcagatgtttacatcgtaatcgcaatcacaagcattaccgaggacaagagaggaagaaagaagaaaaacttctccgcatttatcgtagagaagggtgctcctggattctccttcggtacaaaggaaaagaagatgggtatccgtggatcttctacatacgagctgatcttcgaggactgcagaattccaaaggatgcattactcggtcaggaaggaagaggtttcccaatcgcaatgcacacactcgatggtggacgtatcggtatcgctgctcaggcacttggtattgcagaaggtgctttggatcgttgtatcgagtacacaaaggaaagaaagcagtttggccgttctatcgcacagcagcagaatacacagttcaagcttgctgatatggctgcaagaatcgaagctgctcagcttcttgtttacaaggctgccatggctaaggctacacagaaggtttattctgtagaagctgccaaggctaaattattcgcagcagagaccgctatggctgttacaacagaagttgtccagttattcggtggatacggatatatccgtgagtacgacgtagagcgtatgatgcgcgatgccaagatcacagagatctacgaaggaacttccgaagttcagcgtatggttatttctgggtcattattaagataatcgtacagttgtatcacaaagattgaagaaaaggagataaataatacatgaatatcgtagtatgtattaaacaggttccggatacaaagggcggcgtaaagttcaacgcagacggaacactcgatagagctgcaatgcttgctatcatgaacccagatgacaaagctggtcttgaggcagcacttagaattaaggatcagaacggtgcaaaggttactgttcttaccatgggacttccaaaggcagatgctgttcttcgtgaggctatggctatgggagctgacgatgctattcttgttaccgacagagtattaggtggagctgatacatgggctacttccacaacaatcgccggtgcacttcgtaacttagattatgatctgattatcacaggacgtcaggctatcgatggtgataccgcacaggtaggaccacagatcgctgagcatcttggacttccggtaatctcttatgctgaggatatcaaggttgagggagattccgtaatcgttaagcgtcagtatgaggacagatatcatgaagttaaggctaaaatgccttgcctgatcactgctctttctgagttaaacgagccaagatatatgactccgggtggaattttcgatgcgtgtgacaaagaagttaccgtatggggcagagcagacttaaaggatgtagatgattctaaccttggtctgaaaggatctccaacaaagatcgctaaggcatctgataaggtaccgaagggtgcaggagagaaagtaaatctggatcctgcagagtccgttgcatacttaatcggaaaattcaaagagaaacatattatctaagattatagagaaaagtggtgaataacatgggtttagaagaatataagggcgtatttatctacgcacagcaggtagacaatgaacttagctctatcgcttttgagttaatcggaaaggcaaaggagcttgcaaaagatttaggaacagacgtaacagcagtccttcttggatcaaacgtaaagggcttaacagatgagttaggcgagtatggcgcagacaaggttatcgtagtggacaaccctgaacttgagacataccgtacagagccatatgcacaggctcttgcagcagtcatcaatgagtacaagccagagattatgttagttggtgcaacagcaatcggtcgtgaccttggtcctaccgtatctgcaagagttgcaactggacttaccgctgactgtacaaagcttgagatcggtgatttcccaatcaacgcagttcctggtaaggaagacgagcagaagcacaaccagttactgatgacccgtcctgcattcggtggaaacacaatcgcaaccatcgcctgcccggacaaccgtcctcagatggctaccgttcgtcctggtgttatgcagaagcttccaaaagaggctggacgcaaggcagaagtaatcgagttcaatcctacacttgagaagaacaaccgttacgttgacatccttaacgttgttaaggcagttggaaacgtagagaacatcatggatgcaaaggttcttgtatctggtggccgtggagttggaagcaaagagaacttcaagatgctgcaggatcttgctgatgtatttggcggaatggtaagctgttcccgtgccgctgtagaaaacggctggttagcacaggattatcaggtaggacagacaggtaagacggttcgtccacagatctattttgcaatcggtatttccggagcaatccagcacgtagctggtatggaggagtctgacctgatcatcgcaatcaacaaggatgaggatgctccaatcttctccgtagctgattacggtatcgttggagatctgaacaagatcgttccagctctgacagaagctttaaaggctgaaatgaagaataaataatttcatcttacataaagatgtgaaaagaaaacgccgcggatttccgcggcggtttttttgtgtgaggaaatacttgacaaacaggtttaaatgacttagactaaaagtagtctaagtagtttagaccaaaaataaataggtaaaataataaatacggtgatagaaatgaaaacttatttgacaaaagcagaattaaaattgatggaagtaatttgggagaagggtcaaattccttcaaataaacttgttaaagaatgtttagagcggtttaattggaaaaagtcaacaacctatactaatttgaaaaaattagttgataaaaaaatggtttgtaattcagaggcagttattactgtattaaaatcaagagcagattatgaaaatggtcagagaaaagaagttataaaggaatatttttcaaattcattaccgcaatttgtcctttcgtttatcaaagaaagaaatctgacaagagaagatattcaagaattggagaaagtaatagacgaatataaggaggaactacatgaatgatttttttaaattttatagtggttctttgagtggaacaataatagttattatactatttttgtttataagatttttattaagaaaacagtctaattacataaaaataatgttgtgggtgatacttttgatacgtttattgtttccggtatctatatatacggaatatggcattttgtattcggaaacatttgttgaaaagaatgaaaatctttctgcacaggaaatgaaaagtgataattctttgcaaatatttccaaaagatgaaaatacatcgaaaccatacatgggaaaaaagaagaatataaatattcttatgatattgtggtatataggtcttttggtttttgctgtatattatattatacagaggattgctgtttgtagaagaacaaagaatgcaaagaagatatcttcacaggatgaaatctatgagtggaaagaaagcatggcttgtgttatcggcttagttaaaccaaaaatatttttgccatttgatttgagtccagagcaacggcagatagtgttacagcatgaaaagacccatataaaacgcaaagattatctattgatgatgttgtattatatagctcttgctttaaattggtataatcccttatgttggttaatttattttggagtaaataaagatatagaaatggcctgtgatgaacagacattacaaaatacatcaatggaggaaagaaaattttatgccagaacattacttcggttatgtgataaaggtagattaaaatatgtatcagctatgcgaccttttatttgcgaaaggagtacattgaagatgcggattaaaaatattgggaaagaatatagctgccaaaaaacaatatatatagttgttgccagtggattgttattagtagtattatttggaagttttctttataaaaaaattggtttgaataatgttgattcgaaagaacttgcaaggctggcaagttacaaatcaactttaaattttgatgatacaatgcctaaaattggttatgtcggaaaggaacaattagttgtttatgacaatatgggggtgtatgtttatgatctttcctcttcagacctgacggattatgttgattttgaaaaaaatcattttaagggattacagggagatgatgcaacatttattcatgtatcgaaggatggacggtatatccagctaagtgataatgaaaaacagttgcagtatgatttgaaaacaaaacaacaaaagaatcaattagataaaaaagaaagctggaatccgaaaacagaaccgatgggggtggagaccgcagaatattacagcgtaagcgatgtgtattatataggtgaaggcgaaacgtgttttcttgccattaacaaaaatgttactccaaattatggggcattgttatgtgtagtatcaaatgtgggggcagaaaaagaatattctttatttgattgatgcatgagttgttttaaaggctgagatgtgcaaataatttcattttatataagtgtgaaaagaggggcgtgtgaaaaaacgaaagttttttcatgcgtccttttgcttatagatacaacagtagttatattttataaaaaagtgtatactccccctttccccataagaatgctattatggaatcctatgcggcagttgcgacttttttctgtttattgtgatatttataaagattgtgtccaatagaaacaagaaatacttcaagcaatacagattttatccctcttcggacaattcttttataccaacggtcgttttttatgataccaaatgtaccttcggcctgaatggatctgttcatccttagaagcgctcccttgatactttcgagattttcaatcacttcctgatgcatcgatgtaagttcatggttgagccgaacggtacggtttttatctgtctttttacattgttctgcatatggacagccggaacaatcttcacactgatatacttcttcctgtcgtccatacttgtttccctttacatttttacgatactgaagataaaagcttttcccgtttggacaacgcatgattccgtcctccccgattgggaaatttactgcacgaaatggatcttcatgatacttcttgtcagtagtttctttcttgaacatggggaacttcatatatttttccattccatgctgctcacagaagatgtaattgttgtaagaaccatatccggcatctgcgactggatactttggatagaaaccatatatattctgaaacttgttcattagtggaataaaacagtccatatcggaacggtactgatttacatcaacaacagcaatgtattcatctgcaacaccaacctgtacattataagctggaagcagctggtcatttcccatgtagtctgtcttgattcgcataaaagtagctgaatgatctgtttttgagtagctattacgatcttctccacagatcctgattttttctacatattcttccagcttggcagtatactccctgagtttctcataatgacgttgctgcgtagttttgcgatgtcccctgccatgaacaaacatcgtttcatcaatctgccagacttctgcatactgttcagcagcttctttcagatactctggcgcatactcgctattgatacaaaactttatacccgtacattccagttccttattgatttcctcaaagagtgtggtgatcttatcaaatagacggtatctggatttttctgttgattttttccatacccaggagtatttattcgcatttgcttcaaacttggagccatcaatgtataggtgttggagatccacgtgttctgtctcgaagatttttttgtttatgtcctgaaatatttcttctatggaatcaacaagtacctcgtttataaagtagccgaaggtacggtaagaaggtgtttgatgatccatgagatacatgaagcggagattgactttacactgatcctccagctcacgtaatgatatatagccatttgccataaatccaaacaaaactgtcttcagcatgctgaccgggtcatatctgagtcttcctgtatcatgttgcggaatatttttcagatatttctccagttcgatttctcccataaatctgtcaaatgtcagcaccggatcacagatgtccagataatcttgaattagtattggcaaaactgcctgttttgggttagaatagattatgttattaattttcattgcaagttaattataacagaaagaaagaccttgagttcattataaactcttggtctttcttttttcgggactattcttttttcacagccccttttactatatttgtaacgagtcttctgttttacagcctaagacacgcgcaaattttacgacatcaatgtctagatcgcgggtattggcggcaaaatcgagaatatcgctacagcgatactttttcaatggacaaatggaaggaatccggatgtcttttatttttgtctgaaaatatgtaacaatggaaccgacaggttcgttatagttagcagagacaaaacaaaagtgaggaacgcgcgtgattttactgatgatggtggacacacccgaagaaaaacgaaaatttgtgatcctgtacgaaaactatcgttatctgatgttgaaagtggcggtggatattctgcatgattaccagttggcagaagatgccgtgcaggaagcatttgtacgggtggcaaaacatatggaaaacgtcggacagccggaggagactgccacgaaacgttatctgattacgattacaaaacatgcagccattgatctttaccgcagaagaaaccggttacaaagcagggaaatctatatggatgaacttccagaagaaaccgggcagcttacttatatggcaccggaggaagaacatggagtgttagatattttaaaaaatcttccaccaaaatacagagatatatttctgttaaaatattccgcacatctggaaaaccgggagattgccagaatatgcggacttcgggaggggacgatacggcagcggattgccagaggaaaacggctaattgaaaaagaactggaaaaaatcaagaagggagataccgaatga

SEQ ID NO: 355 - DNA, 9513 bp, unidentified
  source 1..9513: mol_type = unassigned DNA
ttatttctgtgcaaaaaagtctttgaccacctgcaccacggctgcgcggtcggcttcggtcagaccatagtacagcggcaggcgggtcaggcggttgctttccttggtagtgtactcatccacaccggaaaagcggccgtattggatgcccgccggggcgctgtgcagcggcacataatggaaagacgatgccacaccgtgggctttcaaataggcaatgaacgcggtgcgctgttccaggtcccgcagcttgacatagaacaaatgcccgttatgcacacagccttccggcacggtgggcagctccaataggcctgcttcagccagcggtgccagctcctgtgcgtaataatcccagctgtgggtacggtctgtattgatggtatcggcctgttccagctgtgcccacaggtaagcggcattcagatcactgggcaggtagctggagccataagaaacccaggtatatttatctacctggccgcgcagaaaactggcacggttggtacccttttcccgcaggatttcggccttggtcacggtttcggggtcgttgatgaccagcgcgcccccctcccccattgagaagttcttcgtctcatggaaagagtagcagccaaaatcaccgatggtgcccagtgccttgcctttataactggccatcacgccctgggcggcgtcttccaccaccttcaggttatggcggcgcgcaatctgcatgatggtatccatatcgcaagccacaccggcatagtgcatcacgcagatgactttggttttttcggtaatggcgggttcaatttttgcttcatcaatgttcatggtgtccgggcggatatccacaaacaccagcttggccccagctaaaacaaaggccgttgccgtggaagaaaatgtgtagctgggcaggatcacctcatcaccgggctggatgccgcacagcagggcagccatttccagcgcggtggtaccgctggtggtcagcagcaccttgcccgcatggaaccgctgttccatccattcatcacagcggtgggtaaaagggccatcaccgcagatcttattgttggccatggcctggcgcatatagtccagctctgtaccaacctgcgggggaatattaaaaggaatcattgttttactgtcaactcgcaatctattataaccactcggtcttactgggcgcgggtagtatcactttccggcgtttcgggttcaaaattcagccgcttttcttccaccaccagggggcggtccataatacgggcgttcattgccatgatgtactcgcccaaaaatcccagaaaggtcagctgcacgccgcccacaaagaacacagcaatgatcattggggcataacccgcagcaaaggtattccagtggatcagctttgccaccaggaacacaagccccaggataaagctgaccgccgcgcagaaaaagccgaagaactccgccatccgcatcccaatcttggtgtagctggtaaagctgagcatggcggcatcaaacaggctgtaccagttgttgtgggtcttgcctgcccggcgcctgggctgggtgtattcaatctccttgcgctcggggccaagctccgccacaatcccgcgcaaaaacggggtggggtcgtgcaaatcacgcagggtctggataaagcttttatcgtacaggccaaacccggtaaactgctcgatcatttccacattgctcatctttttgatggttttgtagtaacagtcccgcaaaaagtacatgacagggttttcctggctggtggtctttttgccgattacaattttgtagcctttttcccattcagccacaaactttggaatcatctccaccgggtcctggaagtccgcgcagatggtaatggtgcagtcccctgtggtatggatcataccgtaataggggctgttgaactgaccaaagttcttgctgttaaaaatggctttgaccttggggtcctgcgcgcagatgtccgtaatgatccggcgggtacgatcctggcttttattatcaataaaaaggatctcatagtcataatccgggcagtccttccgaatctcatcccgcaccgcctcatagatggggcgggcgttctcctcctcgttataggtagggatcataacagagatgacttttttcttctcgctcatgcagatttcattcctttaagtttagtctttggcccactgccgcaatagccgggcagacccttatcactatacactattttgcaaaataggtaaagaacaatttattttcgcagttttgcgtttcaaagttcaggcttacagggcggtccgccagggtgtagggctcctcgttttccaggcagaaagtcccctctttggcaatgtggcagatgccgcggtaaatttccatggccggggtgcaggcaccgatcagcagcgttgccgccagcagaatggtcacggcatgctgtgcaagcgtaccgtcccgccatttggtgcccaccaaggcgataaagtaccgggcacagagggtcatcaggataaagatagccgggatggacacccgcatgcagaaatcgcacccctgtcccaccttaaagaacggaatgatgaagagcgacacggcgcaggtataaaacagccagctgcggcggttctgccgccagagcagcagcagatagatgccggcatccagcaggtaaaataccagcatgcctttttgcaggctggtcagaacgttttggccaaaagtctgctgcgctgcctggttcccggcgacagtttcgcccagaacgctgtagccaaaggcgttattggccaaaaaataactggccgtaatgctgagcaccacaaccagcaccagcacattggccggggagaacgccgattgcagcacgcctttttggcgctgtgccagcagaacaatgccgcgcaccaccataaaaataaccagccccacaaatgggaaggggccgcacatcaggcaggccgtgcccagcagcaggtagttgcggcagtctttctcctgcaaaaagcagacggttgccagccatgcccccactgtctggttgaacacccagaacaggcaggtcgtcagggagctgaactggaaatcattcgtccaccattccaggtgcatagcgtcataggccagcaggtccggcagtcggctgctgtacagcgcgcccagaatatccatgccgctgaagaaaatcaaaaacagcaggccgatcccctgctttttgccggtatcggcacgcaggtagaccaacaaattcagcgccgccagataggtgcccagcgccgtccacccccaaagggccatacgggcgaacatccaggcggcatccagcccaaacagggcgtataccggtttggtcagcgccgccgggaccagccagtgcccgatataatacaccagcgccgtatccttttgcgggtaatacaccggccagctgtttgtgatcagatcccggtaaatggcgttgcggtaaccccagtccgagttctggtaaaaaaagcccgtctgaccgcccaggtagccccacaacagcatcagggcaaacagcagcaccagctttggcaccgaaagcgtaatgccctgctcttcttgccccacttgcttaacctgcggcgttttgcacacggcataccaccaggcaaaggccagcacggccaggcccgcaacggcaaacggcgcgcggagataccccgcaaaaaacaccgccagcggcgcggtgagataggataaggcaaacggctttaacttttggtaggtcaactgcataaatactgtctggctcctgttcgtccatgcgggtcctgcccgcacggacggggttattccttattggcttaattggtttgcttttgcgtttttgcccacgcaatggtggcgcggatgccatcggcaaaggcggtgcgcggcgcaaagccggtatccgccgcaagctgggtgatatccgcctgcaaaaacatgacctgctgcggcccgtaagggattttgcccaggccaagcggcagggccaggtcgatggcatcacgcagggtctcaatatattcccgcagggggcgggcggtgccgctgcccaccgggtacacggcaccgctgcggccatggcaggccatgcggtacagtgcatccgcagcatcggcggagtaaagataatcccacttctgctcccctgccgtcaggtccgggcactgcccggccagcagtttttggatggtggcggagatcatcgtgttggggccgtcatgcgggccgtaaaccgaaaggatacgcgcccacacatggtccatgcccagggcggcggcctcggtacggctcatctggcctgcacacagcttggccatgccgtacccgttttcggggtttgtgggggtatcggcccgcagaacaccgtccacacggccatactctgcctggctgccagtaccaacaaacacacggcagcccattgccgccgcggtgcgcacggcatcaatggtatagcggatattctcaatctgagccggcacatcattgcgacccgcgccaatggtgtgcgcccacgccaggtggaaaaaggcatccgcctgcacgggcagcccggctgcggccatgcactgcggcaaatccgccaggttggcggcatcgcaggcaactacatacaggtttgcatccttgggcagcgctacggcccgcgggctgccggggcggcagaccgccaccacggtacacccggcctgcagcagccggctgcacaatgctgtgcccacggccccggtggggccggttacgattacggttttaatgttacgttctatcatcattcactgctccggcaccagggggataaacatctgcttttccagctcttcccgcggcaggaacggtgccaggtcctccagcggcgggctgaccagtgtgccgtccggcaggcgcttggtggcgctcttcggctcccagacctgctgggtatcggtaaagatctcgcagaaagtcgggccttctgcggcaagggcggcatccaccacctgtttcatctcagcgttggaatgtgcgcaggaatacgggtagccgaacgcttcggcaattttgcggaactccgggaaggacagatccccgctctccggcccaatgccgatcttgcaatggtctttgaacaggttgttctgggtcaggcggatggagtggtagccgttattgttgatgaggaaaatcttgatcggcagcttatttgtcaggatggtctgcaattcctgcaggttcatcatgatagagccatcatcaacaacacgccgcagacgccgaccgtggacgctctggagcagaaagcaaaggcgggcgaggttatctcccttgttgaccttgccgacgctatcaaagccgacaaggaacagggaaagacagcaaagccggaaaagaagccctctatccgggcgcaactcaaagcagataaggaaaaggcacagaagaaaccacaaaaaagcaagtcgcaggacttagaaaggagctgaccgattgggtaaattaagtaagtttgagaatgtggacgttatcgcttcccttgaagcgattatgaaacagaataccgctttctatcagagtgattttgagatagacaaacggattttgcgagaagcagcgtcaagacccgctgctgaagaaaaacggctgctatggttttcccgcccgtcggggacgtgctgcttccgggaacgcgacgttttcctaaaggacacaaggcagcataacacatggcggttttatggggagcagacccgcgataaaatccttgcctatgcggtggagctgaccgggaaagaaaatgggataatcaaaggcaatctctatgagcttgactatccgcagcacttccgggaagtagtcgaaaaatctctgcccgccgataattacacgctgctctatgagcatggggaacgggtgcagcccgccggaatgtattttgacggcaaccccgacccgcagcttgggaagtttgaacgctttgaagcgcagcctaatgacccggaagcattgcattttctcatgcgggaggaaaagcacagctatgaccgcttaaagccgggggatttcaaggcgcatattaccgcgttgcatgacagccggattgaagccgaagcacagcgcattgtagcggaaatgaagcggcaggacagccctaacagccccaacaaaacacatttcatggtggagctttcgccttactttatgcagttagcttctacaaaggacaccgaccgtctgtttgctatgctgccatacaaaacactttctttttctaagattgagggcaggcatggcacttttgcatttttagacaaaagcgaggacagaagccggaatatccgaaaagcgcgcccctctgtccgggcgcagcttaccgcagacaagaaaacaaccgccccgaaaaaggcagcggcaaaaagaaaaaatcacgatttggaggtatgagcatgaatagatttactgttgaggaaacaaaccttttgagcatttaccatgagggaagcaaggcgcagcttatagagaacatgaccgctgcgctgccttacatggacgcgggattacgggagcttgcaaagcgcaccctttccaaagtgaacgcgctgaccgacgccgagtacaaagaactttccgtttatcctgctgatgaagtatgaccgggattaagcggctgtcgccgcgacaaagccgcaaggtaaacacccttgtgaaaaaggagtgctgcaactgcgagaatggcaactgtattttactggacgacggggacacttgcgtatgcccgcagctcatttcctattccctgctctgtaagtggtttcggattgccgtacttcctcttgataagctgctctatgcggaactctatcagaccgaggacagaaagaaatgtaccgtgtgcggcgcgttctttgcgtccacctctaacagcgtcaaatactgcccggactgtcggaagcggattacccgcagacaggcagccgagcgcatgagaaaacggcgcgctcttgttacgcggtaagggcgaaaaaagccttgttttacaggcttctgacaaccgtttcctcatagggcaagggctttataccttttcccttaaaaacggcgttctactgcgtaacatttcagaactgcacccataagaaaaccggggcgcggatagtctttactgactgtctgcgtcccggtttttcctttgctatttttccatgttgatttgaggggttgcgcccttatctgtggtaagtaaacggtatatcgtaagggggatataccatgcagccacgacgagccgccatatcaaaatgaccccaccgataatgccgcccaaaatgaagttgagggcaatgatacccaccgttccggctatgtcatacccatgcggtacaagccatacgaacatacggcgaataccaaagggaataccgcagcacagccacacataaaagtaattggtctgcccgtcctctgtaaagacgttcttaaacatgaagaataaaaacaatgcgataacggcgggcaaaacggttctcttaaaaaagtctttccaaatttccccgcgtgtcatggtatcactccttttctattgggaattgtgggatagcttctaacagtttcagtatgagcgtttgccgtaaatcgtcgtcgatttcctcttttacgcttccgtccggctgacgcttttttaccattgcaaggcggttgatttcgtcaccgtaacaagcaagcactttttccaacgcccatttttcgctcacaacggcggcgcgtatcgtttcatagtccggcatttcctgttccattctctgacacttcctttgctgaaaatgtatcactttggtatgtaactactgtttttgataggaactattatatcatacaagtatgaacaaagctactccccacgttcttttcctttttcccgttccggttctcttggctgccgtaaaatgctgtctatgttctgtttgataacgtcgtactctttgacctgttttttcagtctgccatagtcggcgtaaagggcttctttctgttcctggagcttttcatattccgattgcagcgcggtgaggttcgggagcttggaaacgcccgccgcctttaatgcctttgccgctgcttcatgcaagatgatttcgcgctcatgggctgcccggtaactgtccttatttcttgctttgcggtatgcgtcataggcgggttttgtcttttggaacgtggaaacattcttgataagcaccgccatatctgcaagccgtttttccgcgctctttaatgcgtctgccgcctgttcgctctctgtctgtatctctgcgatttttgcggtcaagtcggtgtattgttcaatcttgtgttccgtaataaaattcatggtcttagctgcctgtttcagattgtggattttcgcccattgttcataaccccggctctgcgccgccttgatactgttttcaatatcaatgagcagggacacgccgcgttctgtcttgggagctttggcggtgcgggtacgcttgccctctatccgttcccggattgcttcctctgtataatctgcgccgagggttttcaaacgggtaaaccgttcctgtcccggaaccaaacaggacacatattttccccgtttgattgtgaagccttctgcctgtaaccgcgcgagcaattcttcaaagtcggacacttgggggataagggtatcgacggcaagtttcaattttgctttggcggttttctctttcttatacaccgcataattctttcccttgccgccttcctccggcacaaggacggacaagccgttttcccggcacagcctgtcgctgatgttgcgtattccgtaataggtgcgcttgttggaaacatacttgtggtagtctacaaagtttaccgcacaaaaaatgatgtggttatggatatgccctttatctatgtgagtggtaaggacgtattcatattgcccctttgttaccgcgtcggcaagctgttttccgatttcatgggctttctcataatcgacttcccccggctcaaaagattgtatcaaatggtgtgcgaggttgtttcctctgtcaagagcttgcgacaatgtaaatccgaactcaatatctgccgtttcatagctgcacccgaacgaggacaccagcattttcccgtccgtcttgtccgggttttggatatagtcaagggctttttttaacgtgcttttaataggcttaatctttgtaaccgccatatctccgcaagcacctccttgatttcttctatatcctcttggtagacgctgcccgtcgcattgacgcgctttgcaatctgattgacattgaccccgattttctgtatctccgctgtcatagcttttatgtcggcatggtctatctgaatgatatacccgtcgattgccattttccgcaagtaggcttccatgttccgggtagggacgagctgcattttctgttcaatgaacgcccgttcttcctctgttactctgaatttaatttgtactgtccgtttcctgccgttcat

SEQ ID NO: 356 - DNA, 6311 bp, unidentified
  source 1..6311: mol_type = unassigned DNA
gtcgtcgtaggggatgccgccctcgctggtggggtcgtagacatcggtgcacttatagcagaactccgccacgtcgctcagcacgaggaagccgtgggcaaagccctccgggatatagaacatcttcttgttctcctcgctcagggtcacgcccacccacttgccaaaggtggcgctgtgggggcggcagtccacggcaacatcatagacctcgcccttggtcacacgcaccagcttgccctgggtgtggttcttctggaaatgcaggccgcgcagcacgccgcgggtggagcggctctggttgtcctgcacaaactccttatcaatcccggcagcagcgaactggtctttctggtaggtctccataaaataaccgcggtcatcgccaaacacctggggctcaatgaccacaacaccggggatctcagtttccgtaaacgtaaatttacccatttttcattttcctctctgttttttcgttattgtttttgacattttgttttttatttggaaaagccggaatggcttttgcgcagtgttagaaaagacgttgcgtggattgccaaagcctctcctactaggagaggtggcattgcgaagcaatgacggagaggttggacagagcaccgccttgtcccggatgtcatacaacctctcagtcgcttacgcgacagctccccttgtaggggagcccttggcaaagagggtcagtgcctcgattttttcttcgctttcgagcggagccttaccacaacaaatgcaactcccgccgccagcaccgtgcaccccagcgagatgccgatgagcaggcccgcggtcttgccggggctgcgggggccgctgcccagttggacaccggtgttccgctccaatagctcctccagtcccgtaatcgtggccggcacccggacgctggtggactcctgcttgtcctgcccgttgacggtatacacggcgtacaccgccgggctggtgcccaagacatactgttccggcagctccagcgtcacggacacatcccctgccgtcaggccgtcagccaacagcagccgggtgccggggtcggtcaccgtgaccatgcccagcggggcaccgcctcccgccaccgtcagctcccgggtcaggccctgggccgggatgtcggtatagtttgtgtagtgggcaaaggcgtaatccagcagggtacggacatcgttgtacttgtcggtcttgatgttgctctgcatggtgacgcagatgagccggacaccgttctgctccgccaggcagacatagctgtagcgggcaatgttggtgtagccgatcttggagccttgaatggccgggatgtaataccggctggaacccacccgcattttgtcctgctggtggaaataccgctctttgggctggatgtccgtgggcttcatgggatacatctcgttgcgggtaaacagcgtctcaaaccccggctgggtcagggcccagcgcaggatctgcgccatatcatagcagctggtatagtggtcggtatcgctgatgccgtgggggttggcaaagtgggtgtgcttgaggcccagttccgccacctgggcgttcatggccgccacgccgcccgcaatggtgccatccccgaaatattcggacagcaggttggcgccatcgttggcgctggccatcatggtggcatagagggcatccgtcaggggcacatgctccccctcctgcagggcaatgtggctggaatccgtccccgcaagggaatagacatcctcgtgggtcacttccaggctcacaccgtcccactggccctgggctttctcacaggcaaggcccagcgtcatcaccttggtgatggacgccgggtgcagctcttcgtccatattctgctgggccagcacaaggccggtgtccgcgtcgatgatgcagtacgcctccgtggccgacagcgccgggcccgcggcccgcgccatgggtgcaaacaccgcgcagacccagagcagcaccgtgcaaagcacggcgatctgttttttcatctggtcatttctccattggtgatttagataatccttttcacgggcttgccctctccgtcattgcttcgcaatgccacctgttccccactttgtcacctacggtgacatttctccccgcaccggggagaatctttcccaaagtgggaggccttggcagtccacgcaaagtacatctctttgccaatggctctccctttgggagagctggacgcgaagcggcctgagagggctaggacgctatcatacattatcttgttcagtataccacacttttcccttgctgaaaagacattccgtgcccggcggcggggcaaagaacgggctgcagctgccgcccctccagcgccgcgtccagtgcggcgggcagcagggcgaaccgggctttcaggctctgcggctttgcctgcgggtcatcctggccgtagggcacaaagtaatagtgcttgcgctggtacagccgggcaatgttttctcccgaggcccccagcccgtcgttggtggagacggcgatcaccaccggccgccccacccgcagcaggctcttggccgccagcgtcaccggcgtgtccgagaggcccgccgccagccgggccagcgtgctgcccgtgcagggggcgatcaccagcgcctcggccatgttttggggccccagaggctccacggcctgcaaactgtccagcaccgggtgcccggtcagggcttccagccgctgccgccagctcccggcccggccaaaccgggtatcacaccgggcggcggtattgctcatgacgggcagcagctcccagccccgggccgtcagttcctgtgcctgttccagcgcggtctccagcgtgcagaagctgccgcagaccgcaaaggcacagcgtcgtttctcgttcatcgtgctccctccctttcgcgcagcatctcgcgcaccgtccgggccacgatctccccggctgtttccggcgcgcaggcagcgggcaggctcaatgcatggatggccttgtggccgcagcgggcggcggcatcaaaatccgtcccaccggggcgggaagccagatccacgatcaggctcccgggccgcagccgggccagcaccggagccgtgagcacctgcgccgggatggtattcaccaccgtgtcaaaggccggggccagccgggccagccgggccagctctgccccctgcattcccaggctttccgcctgtgcccgctgggccgggcggcgggctgccactgtcacatgcgcccccaatgccgccagccgggtgccaaccgcctgccccacagggccaaatcccagcagcaggaccgcgctgccccacagggtgcgtttgcgctgggccagcaaaacgccgatgcacccctccgccgtggggatggcgttgcggatggccagctcctcccgggcaaagtaatccaccagctccaccccggcttccgctgcaatgacctttgcttcttccgagagcatcccgcccagcgccagcgccccggggcgtgccgcccgcagcagctccgccagcggggtgcgggccgcgtccagcggcaacggcagcaggatatagtctgccagcgcgatctcttccggcccctccaccgcataccccgcccgggccagcgcccggcctgccgccagctgccgggcatcgctgccgatcaccgcaaagcgtttttgtcgttccatccaaaagccctcctccccaaagcctgcgccattctatgcacaggtggggaggagggtgacggacgcaaacaaaaagccccggagcggggccgtaaggcttactccggggcaaatgttttgttttatgagggttaattacttagctttctcaacaacgagaatcatgtagttgtctttctcgaccttgtcaacctcaatgccaacagaaaccttgctgctcttaacaacaggatttgcagcagcaaatgcagcatgagctttcttagcctcattcttcaggtcagagacagagttccaagtatcggacagcttcacagtgtaaatctcataagaaccattgacggttgctttcttgatgtccttgccgttctgtgcattcttcattgcagcctgtgcaatcttatccatcgcatcagtgcgctcataggtgtaagagacagccttatctgccttagcagcatcattcagtgcctcaaccatgttcttggcgctcttcttgtcagcgacgccgcagccagtcagcatggtcagagccataacgcaaacgagggcagcagccatcagtttcttaaatgctttcattgttgtatcctccgtaatcagatagttccccagcaacggcccgccttgtgcggacagtttgctatgttaaattcagcatacccctttttgtggcaattgtcaagatttcactgcgttttcatcatttttaccaatcggtacggtgagaaaacagcgatatgaccagttttgccccggggcctccacgccgttttccgcacggtcaaacgcaaaaaactcccccggcaaaacgccggaggagcctgcgattttattgggttttttatctgatctctcggggcgtccctgactgtgcgcacgccgggagattacttcaggaactttgccaccgcgcgggccacgatgccgcccagaatgccggagacgaggaactccatcacaccctgcacgccaaccagcagcaccacgaacatgaacgggttggccgcacccttggcggccacgatgttctggatgtaatcgcagccgtagaatgccagcacgatgtagcccatgaagaacagggtgttgaggccgggagcgcacatggcggaaacgatgtagctccaggtgccgggcttatccagtcgcttgaggccgttgaagacgaggcccacgcacaggcccatcagcacacgcatccccacacagaggatgaacgtgttgacagggctcacctggaacagggcgcccgtcatggccgaagcgccggtgacagcgtcatagaagctcaccgcgccaaacacgccgcccaggatggcaccagccaccgggcccatggtgatggcacccacggcgatggggagcgtcaggaagctcatgtaaagcgggcccatgggcacgctgcccaggccgacggctttcatgaccagctcaatggcgaccagcagtgccagccgggtgagagtacgaagatcgttattctttttcataaaaatatttcctcctgctgccgttccgccctagatgtcggatacggcgcaaacctgcccgcaaaaggtgcggggccgtttttctattttactttggaatgctttgtcagggaacgttccaaagggagataacttattgatcacacgggaagcggatgcctgccgagcggcgggcagcggtcagcacccggctgaccgcaatggaggtatccagcatccggctgcacagctcctggtcgccgccctcaatggcgcgggcaaaggcctcaaactccgcggccagccgggggcggccgccgttgaggttgtagtgctcctctttgccgtcgttgaggtgcagcgtcaggccgccgcagtagttggccgtggatttctgcagcagatagcccttggtgccctgaatgacataccgggccggagccccgcagtcttttgccgccatgctcacggccttgaagccgctgtaatccatggtcaggatgccgctggtgtcaatgccgtggtcgatgttggccgcgtagttcacccggttgggctccccgaacaggcccacgatgtagctgatgttgtagacattcaggtccatgagggcaccgccggcgcagttgggatcaaacgacggggccacctgccccgcgcagaacgcatcgtaccggctggaatactggctgaaattgcactgcaccagcttcaccgtgccaatgcggggcagcagctcccggatcttattatagttttccagatactgggtggtcagcgcctcaaagaggaagacccgtttgtggcgggagagagcggccagctcttcggtctgggccgccgtgggggccatgggcttttccacaatgacatgcttgcccgcttccagcgccactttggcatagcgggtgtgctgcaaattggggacggccagatagaccacatccacccactgcagcagctccaggtagttggtggtgcactggggcacatggtaccgggcgcagagctccgccgccagcggcgcgctccgctgggtgctgcacagcgcctgcacctgaaacggcgagtccgccccggccagccagggcaaaaactccttgacgatcatcccggtgcccaggatgccaagcttcatcttctgttccat

SEQ ID NO: 357 - DNA, 5149 bp, unidentified
  source 1..5149: mol_type = unassigned DNA
  misc_difference 2777: note = a, c, g, or t
  misc_difference 2778: note = a, c, g, or t
  misc_difference 2779: note = a, c, g, or t
  misc_difference 2780: note = a, c, g, or t
  misc_difference 2781: note = a, c, g, or t
  misc_difference 2782: note = a, c, g, or t
  misc_difference 2783: note = a, c, g, or t
  misc_difference 2784: note = a, c, g, or t
  misc_difference 2785: note = a, c, g, or t
  misc_difference 2786: note = a, c, g, or t
atgagaatgcgtttcaagccctatgcccgcgctgagctgctggccagcgacttccacgtccacgacccctttgtgctgggcggaaaatggcacgcccagtatgcccgcccggagcagcctttcgtgctggagctgggctgcggcaagggcggtttcctctcccagctggcctgcgcccacccggagaacaattacctgggcatcgacatcaccgacaaggtgctgatcctggccaagcggaaagtggaggccgcctatcaggcggctgaccgccccattgacaacgtgaagatcatgagcgccgacattgagcggatccacaacgtcatcttcccggaggacaccgtcagccgcgtctacatcagcttctgcaacccgtggagcaagaacggttcctcccacaagcaccgcctcacctacccccgccagctcatccagtaccgggcattccttgaggacggcggcgaaatttacttcaagaccgatgacgacgacctgttccgcgacagtctggagtacttccccgcttccggctatgagatcacctggaagacctttgacctgcacgagaacgagccggagtggaacatccgcaccgagcacgagggcatgttcaccgaaatgggcatcaagatcaaggccctgatcgcccgcaagctgcccggcgacgagagcgtgacctggatcgagcccaaggtgctcaagaagatggccgccgcagaggctgaagccgaaacgcagaactaacgggaggtgctgtccttgtcgtttttcctcaacaccacagtctgcggctttacgctgtatcagatcctggcgtatttcctcgtctactcctgcctgggctggtgcctggaggtggtgtatgccgccgccacgacaggccagatcgtcaaccggggcttcctcaacggcccggtctgccccatctacggctttggcatggtcatcgtcctgtttgtcctgacgccgtttgagcacagcacgctggcgctctacatcggcggcgtcatcctgcccagtgcgctggagctggtgggcggctgggcgctttacaagctctaccacacccgctggtgggactacagcgataagccgttcaacatcggcggctacatctgtctggagttctccctgctgtggggcgtgggcacgctggtgatgatgaaagccatccaccccacgatcgccgggttggtggagctggtgccgcctttcatcgggttcctcctgatgtgcttcctctacgccgtctacgcggcagacgttgttgtcacggccgtggccgcctctgacctggcccgggagctggacgccctggaaaatgtggccgacagcatccacgccgtcagcgacgccatgaccgagatcctgggcaccaccgccatggaggccgaccagaaactggacgagaaccgtctgcagttcaaactggccgctgccgaggcccgggacgccgctgccaagctttcgcccaaggaagcggctgaggccatgcgccgcaaggccgacgaggcccgggacgccgcccgccgggcttccgagatctcccgcctcaatgcggccgaagccgccaaggccgtcaagctggcggccaagggcacagccgagcggaccgccgagctgctgcagctggaacagctggccgaggagctggctgcccggagcgaggaactgcgggcgcgcacccgccgcacggcccactttggcaagggccgtatgctccgcgcctaccccagactgcgccatggtaccaaacagctcacgctggacgaactgcgggagcgccttaaatacgagcacaagcactctgcataagaagaaccaaaaatgggccgtccctacggggacggcccattttttttaaattagagttcgccccagaggttttccgggtagagaccctcggcggtcttctgagcgatgccggccaccaccacgggtttgtcctcccggtaggtgacaccgtaccactgatcggtgctgttcagcaccttgaccgtggccttgccctcctccagcagctcggtgaccaccagcggcaggaaatactcacacttgagcgggtccttggccagatgctcggtcagccagcccgcaaagcggcggtccgcctcttccaaaaagctcttaccaaagccccagaggttcatgctgacctgcgtttcgccgggcaggtccacccaggtagcgccctcatcctcggtgtagtggatgccgccctcgtaggtctcaatgcgggtgcgctcgatgacgctgtggagggtgccgtccgggtttgcctggcagacaccgcgggagaccttgccgttttccgagacggtgttcttgagcagatagctcaccatgcagtaatcgtacacctcgccatcctcgtgggtggaaaggtaatcgtacatcactttgaatgcctgcgggccgtagtaatcgtccgcattgatgacggcaaaggggccgttgatgaacggctttgcggccagaaccgcgtggcaggtgccccagggcttgacacggccctccgggatggagaagccctccggcagctcgtccagctgctggaacgcgtatttcacgtccatcaccttggagacacggtcgccgatggccgccttaaaggcatcctcgatctcgtgcttgatgacaaaaatgaccgtctcaaagcctgcgcggcgggcatcgtagagagagtaatccacaatgacctgcccattgcggcccaccgggtcgatctgcttcatgccgccgtaagatcggaagagcgtcgtgtagggaaagannnnnnnnnncccatgccagccgccatgaccaccaaaacgggtttattcataataaaagcctcctgtttgtgccaaagcttgatttttcatagctccattatactcgaaaagtccctggacaacaaggtaggctttaaagcaagatttaattgcttattttgtaaattaaagcttgccaatctgtgcaaaacacggtatactggagccgcacactttttcctttccaaaaccaaaaatggaggttcccttttatgaacgaagccgttaccaagcgttttctgctctatttccgcctgatgatgctggtgtggatcctgatcgccaacgcgttcttccacgtcatggaatttgattacagctggctggtgtttttgagcaacatcatgctgttcaccatggagggcgacatcaaggaccgcttcctttccgtggagctgggcggccttgtaggcatggtgctcaccgtgctggccatgctggccattgcagccctgaccccggtgctgggcggcctgccgggcctgctgctgccgctggcggtggtgctgttcatcctcatcatcctgcacccctatgcccccaaggtgctcaacaacgtcggctttgcctacctcacggtggcctgcatcgacgcggagacctttgcggccaacctgccccggttcttcttcgtgtacatcgtcggctccctcgtcttcaacggagtctgcatccttctgatgaagcctgcgaaagccttggccgccaaaaccgtaaaagcatgacccccctgcaaaagcgatgtctcggcatcgcttttgttttgcccggccctgtggtacaataagaaaaaacgcagaaagggagtatccccatgtctcacaagaccgtctggatcaccggagcctcttccggcatcggccgggagtttgcctgccggtatgccaagctcggcttccgcctcatcctcaccgcccgccgccgggagcggctggatcagctggccgccgagctgctggcaaagtacaacacgttctgccgcgtcctccccgccgaccttgcccgggagagcgagtgtacccgcctgtgtgaggagctggccgaggagcggatcgacatttttatcaacaacgcgggctttggcgtctgcggcagttttctggagaccagcactgaggccgagctctccatggccaaagtcaacgtgctggccatgcaccagctgtgcaagttcgcggtgcagaaaatgcaggcccagggctttggcacggtgctgaacgtggcctcctcggcaggcctgctgccgggtgggccctatatggctggctactacgccaccaaggcctatgtggtcagcctgacccggggcattgccgaagagctccgggagcagcacagccctgtctacgtctgcgccctctgccccggcccggtggacaccgagttcaatgaccgggcgggtgtggtgttcgccctcaagggcatttcccccgccctctgtgtggaggaagccatgcgcgggatgctgcggggcaagaccatcatcgtgccctcggccctgatgcgggctgccaccaccgcccagcactttgtgcccacgccgctgctcatgcccattatggcccgacagcagaaaaagaaactgggcggcagcacccccgcacaggaacattgacgctgccgggaaaccatgttaccctagagcacaggagaaccgcatttgattgcgcaaacagaccaaacggagggatatcgaaatgaagatcgcactcatcaacgagaacagccaggccgccaagaacggcatcattgaagccgccctgaaaaaagtggtggagcccatgggccacgaggtcgtcaactacggcatgtacgcagccgatgacaaggcccagctgacctatgtccagtgcggcattctggccgccatcctgctcaacagcggcgcggccgattacgtcatcaccggctgcggcaccggcgagggtgccatgctggctttgaacagcttccccggtgtcatctgcggccatgtggaagaccccgtggacgcctacacctttgcccatgtcaacgatggcaacgccgtggccatgccgtttgccaagggctttggctggggcggcgagctcaacctggagtactgctttgagaagctgttcggcttcggccacggccagggctaccccaaggagcgcgtggagcccgagcagcggaacaagaagatcctcgacggcgtccgcgctgccaccttcaagcccctcatcgattgcctgaagagcatcgatccggacctgctcaagggcgctgtggtcggcgagaaattcagcgagctgttctttgcctcctgcaaggacgcggagctggctgcatacgtcaagaccctgctgtaa

SEQ ID NO: 358 - DNA, 8233 bp, unidentified
  source 1..8233: mol_type = unassigned DNA
ttattctgtccctcttatttttatgcgataagctttgggagaggccccttttttcttatgaaaggtttttgaaaaatacagcccattatcaaatccgacggaatttgcaatggcggtgatcgaaagatttgagtgttccaacagatagcatgcctgtttcatgcgaaaatccgtgaggtattcttttggggactgctgcagcaccagttcaaaggaacggaacagatggctgcggcttaaaccgacgtaggcggcaatatcttccactgtgatcgggtaggagtaattggcgctgatatattcgatacttttctggacgtaggttgcggctgtcagctgcgtttctttttgggtggaagattttagaaagagcgccagcgtggtatagagccggccggtcatttcaacggcatgttcaaatccgtttcctctggcatcatagatatgcagaagctgacgtttgacttcttcgccgttgggaactgcatgaatacatggatgtttgcgggaaaaatcggttgcctgcagaattgtggcagcgtcacttccggtaaatccgacccatgcatattcccatggcgtttttgcatcggcacggtagatgatctccgtattcggatacacaagaaaggcatcttcggcagaaagaaaatgggtttcgttgttgacttcgtatgtgccttttcccgagatcacatagtgaatcaggtagtggtcgcggattccgggtccccactgatagccggcatcgcatagctggtatccgacattatagacagacagggaaacaagttcttttgcagttgctttgtaggaatttttatattgatcattcattggaaatgctccttacacgattctagtattgagtttatacgtttttttatgcacatgcaacatttttacatgttttttctacatttggttctgtacattaagagccgggagcgatagaataggggtatcagaagaaaacaaaagcacagaaagggagagtggaattatggcaattttagttactggtggagcaggctatatcggaagtcatacctgtgtggaactgcagaatgcgggatatgatgtcgttgttctggataatctgtcaaacgcttcagaaaagtcactggatcgtgtggaggcactgaccggaaagaaagtgacattctataagggagatatccttgaccgtgatatcttaaataaaatctttgcagagcagaagattgacagctgtattcattttgcaggactgaaggctgtcggagagtctgtggcaaagccttgggagtattacaataacaacattgcaggaactttaacactggttgatgttatgcgtcagaacggatgcaagaacatcattttctcttcatctgcaaccgtatacggcgatccggcagaaattccgattaccgagaactgcccgaagggacagtgtaccaatccttacggatggacaaagtccatgctggagcagattttatcagatatctacaaggcagataatgagtggaatgtgatcctgcttcgctacttcaatccaatcggagcacatccaagcggaaccatgggggagaatccaaacggcatcccgaacaacctgatgccttacattacacaggttgcagttggcaagttaaaagaactcggtgtattcggaaacgattatgatactccggatggaaccggtgtgcgcgattatatccacgttgttgatctggcaaacggacatgtaaaggcattaaagaagattgaagagaacgccggactttgcatttacaaccttggtaccggacacggctacagcgtgcttgatatcgtaaagaattttgaggaagcaaacggcattaagattccatacagcatcaagcctcgccgtcctggcgatattgcaacctgttactgtgacccgggcaaggcagaacgtgaacttggctggaaagcgcagtacggaattaaggaaatgtgtgcggattcctggagatggcagaagaacaatccaaacggttatgaggattaattaaaaaagagggaaaagtcttattttcgaatttgtttgaatatttttgaaaaatatgaaaaatatgcttgacgaagcgtggtgtgtatgataatataatacatggttcgttggtcaagcggttaagacgccgccctctcacggcggaaacacgggttcgattcccgtacggactgctgagttataaatccagtgtttatacagattcttaggaagctgttgtaggcactggattttttgttttcttatatggtcatatatgaaaccgaaacgtcgggttagaatgtcgaaacaagattacctatgagataatggggataaaagttatgcacttagtaaaattggaagagattcctggtgctaaagaagaattgaaaaaaattcgcaaacgattctacgattggatgaaagatccttctgcattttcagagtaattcacaaaatacccaagaaaccttgcaaaacagggcatttcttgtcagcaggaggtatattatgacatcaattcgtgttttattcgtatgccacggcagggctatggaaagtcagtaaaatcaaggctttagggggcattacttgggtatatcgtggcaagtgtagtagtaaaggactacggtaatactacgaatgagggaatgcaaacaagccgatgtagaagtacaaattttaatggtagtagcaatcgttagaatgtaagggctatcgttatatagtgtgcaatcgttgaaatgttcagcaatatcgtgtaaaatgaatatctaattggatatgaacatataatattaatgcagccataagctgcgatttgaacttattttgacattgacaagcggctcatttggatgtatattttaagtacagtaagagattactgcaaatgtttgttgctactcgatatgcaactcaaacaaggtcgagttcaaatgtttgtcgctactcgatatgcgacttagaaaaggtcgagttcaaatgttttgaggttccattcgagagaatggggcctctttttaacgataggagaagaaatggaaataggacatttttattatattgatgatcagtactttaaggattttccagatccttatttgatgcagaataaggaaaaagtaaatggacagttgcatgacagaccatgtttttacgcattccaggatagtaatactcagctattttggatgattccgttttcgtcacaggtttctaaatttaaggggatttataataagaaaatgcaaaagtaccataggtgcgatacaattgtttttggagaagtacttggtcatgagaaggcttttttgattcaaaatatgtgtccgattacagaaaaatatatgaaaaatgagtatttggactctgctgccaatataccagttcgtgttgatggtagattggaaaaggaattgaaggataaggcagggaaagtattagcgttgcagagaaagggcgcaaagctgatttttccagatgtccttagtatagaacaggaattattataatagatggaaatatctatgttggataaagagaggtgctgtgccagttggcaggcatctttttctttataatccgcgtggtatatttcgcacatttttattgacaagagattgttgaggtggtgtttttataacataagagcgaaatatatcacataagagcgaaatatatcacataaaggcgatggcgattatgaatgaaaaagaaccaatgagcttgtcgaaaaaatataatatcagatacacaattgatggattattcttacgaatgagaagtacaaaggtgatgccttgctgcagaagtcttatacagttgatttctttactaagaaggtcaaaaccaatgaaggggaagttccacagtattatgtagaaaacaaccacccggcaatcattgaacctgaactcttcgacttggtgcagtcagaaatacagcgaagaggcaagggaagttcaaggtacagcggtgtgacgatattttcttccaaagttcagtgtgccgagtgtggtggctggtacggcagtaaggtgtggcattccaatgacaaataccgaaggggtatctaccaatgcaataataagttcagacataagactggttgttcaacatctcatttaacagagtttgaaatcaaggattattttgtaaaagctgtaaatcagctgattatggagaaagcagagatacttgataatcttcagctaattaggactacgctttgcgataaggcagaccttatcaagcagaaagaggcattggaagaggaaatcaatgtaacagtagaaatgacacagaatattgttgcagagaatgcgaggatggctcaaaatcaagatgaatacaataaaaagtatagttccttggtggagcgatacaataagctgaaggaagaatatgatagcatttgctcaacgatatccgacaaggatgccaagtacgagcagattggcagattcatcaaggttcttaaaggtcagcaagaacttataacagaatttgatgagtcgctttggagcagccttacagagaagatagttgtgaaaagcaaggaagaagtgaccgtggtattcaaggacgggacagagataacagttgaataaatataacaatattgcactcaggcttagtggtctgagtactttttctgtttaaagaactgtaacttttgagtcattgaaaaactgttcaatatatgttagaataaattatcttaattgtgcaagaaattcataagcacaaggagagtggatatgttaaagaataatatagaagtagatgtaaaagttaagtgcatagaaaacggaattacgcaggctcagcttgctgagaaatcagaaacatccagtccgtatgttaatcgaatcatcaagaagagtgaagtgttgaataagacctttattcgcatgatggaagaactcggatatgatgttgaactcacatatgtgaaaagaacggaggaatagccatggcgtttgattttaagaaagaatataaagaattttacatgccaaagagtaagcctgcaattgtaacagtaccaaaagctaattacattgcagtacgaggaaaaggaaatcccaacgaggaagatggggcatatcagaaagcaataagtgtattatatgctatagcctatactttgaaaatgagttataagactgattataaaatcaatggtttctttgagtatgttgttccgccacttgagggattttggtggcaagaagatattaacggaatagattatggcaataaggattcttttaattggatatctgttttaaggcttcctgatttcatttccagagaaaactttgattgggctgttaatacagcggccaagaagaaaaagctagattgctcatcagcagaatttcttacaattgatgaaggcctttgtgttcagataatgcatattggaccatttgacgatgaacctgaaagcgttgcaaagatggatgcatatttatcagaaaatggatacgaaaatgatttgagcgacacaaggttacaccacgaaatttatatgtccgatgcaagaaaagttacaccagaaaagtggaaaactgtaattagacatcctattaagaaggtgtgaagatgaaacagataaccaataaggaatatgaagaattccaaaaatataaagaagataagctatatggtagagtgcttaactccgatggtctgcgtttaatctgtgcagcagaaaattatgacccagaggctattggcaagcgtatgcttgaaacattggctaaaattggccgagagaactaatagtataagtaaggagggtcaattttgaaagaacaaagtgaactagacactacaaagaatgatagtgtaaatgcccatgaaacagaaatattagaagtgtcacacgaggcgtattgcaaaaaaaagccacttgtcatatttaaaactgatgcagacatatatggcagaaatatatcagcaatgagtaatttctttgatgggtatgttcaagaaatgtctctatccattcgtgagtcagatgggtcacaagtagtaatggacttgcctatttcagatttgagcataataggtgaatcaattaaccaggctgaaatcgtaatgagaggaaatgttacattgttaccagatttcgatagtttaccatcagatgttagaagtaaattaaagaaaggtttatattctgttggcgaatcaaaacaagtagatggcaatatgagagctgtaatacttgatgagaatggagttagggtaaaagatattactttgaaaaaagttcttaatagtcctgcaaatatcgaaactatgcgtagcataggaaatcaattacagatgagacaaatttatgccaaattatctgatatagaagagtttcaaacatatcagatagaaagggatcgtgacagagatatcattgtaccatttttagatgctcgttcacttgtacttgaggctgctactaaagattctgaaactgaaagagcacaaatgcttaaagaggctgatagtaaaattcgcacagcattaaattctgtttatagagatattgagacaacatcaaacagctttgccaaaagagtcaacataccattcttaggttttggaaaacaaattaatacatatatgagctatattgctgatgacttacagattgcaacaaaatatgtaggggtaagaatgcaaattttagagtaccttggtgagagcaaaacagcaaaaacagttttacaacagtttaatcatacaatgcttgattttatagaacagcctataactagaaaaggtttatcagcagcgactctaatgcaggattacttcccttataatgaagaaaatatggactgttggtataagttttccaaagacctgaaacctgcgattgaatcaagtatgaaacaattggaacttgaaacaaaggattataacaatcaagaaatatatgtagtttccgtggaggatgagagtgatgagtgaaaatctaaaaaaatgtaaggtatgtggtagaacaataactgataaaaataatatcactggattatgtcctaagcatcaaaaagtcgcaaatacagctggagctacagtgggattagtgggtttaggaattactgtaaaaaagtttgctcctaaagcgttaaaaacagttataaaaattattaagcgataagtttgaaaggaggcctcttgatggtcacagaagttaatcgttcaataatgcaccctgtgcatatcgttcaaggggtttcaaatgcaccctgtgcatatagttcaatagtacaaaggttcagttgtatcaacgatggtgtggcaacagatccagcttgtggtacatcaggattcttggttgctgccggcgaatatctgaaggaaaataagaaggatgagattttcttcgataagcagaaaaaagatcattatatgaaccacatgttttatggatatgacatggatagaaccatgcttcgtatcggtgccatgaacatgatgacgcatggaatagacaatccttttatcgaatatagagacagtctgtctgatcaaaatcaagataaggacaagtattcgttggtactcgccaatccaccttttaagggaagtctggatgcagagtcagtttccggagatttgcttaaggtatgtaagacaaagaaaacggaattattattccttaccttgttccttcgtatcttaaagattggtggaagatgtgcttgtatcgtaccggattgagtgctttttggatcttctaaagcgcataaggatatcagaacagagattgtagagaatcagagattggaggctgttatttccatgccttccggtgtgtttaaaccatatgccggtgtatctaccgctattctggtatttactaaaacagagcatggtggaacggataatgtgtggttctatgatatgaaggctgatggcttcagtcttgatgataagagaactgttgtgtctgaaaatgatatccatgatatcatggagagatttaagaatcgtgagcaggaaattgatagaaaacgtaccgaacagtcatttatggttccgaagcaggaaatcgtggataacggatatgacttgtctatcaacaagtataaacaggtagaatatgaaaaaattgagtatcctgtaacagcagagattctggctaacattaaggctttggataaagaaatcgctaaagagatggaagaattggaggcgatgttgaatggataa

SEQ ID NO: 359 - DNA, 5713 bp, unidentified
  source 1..5713: mol_type = unassigned DNA
atggcaatgcatacatggtttgaatgtaagatccgttacgagaaaacaatggaaaatggaatgaacaagaaggtgaccgaaccgtacctggtggatgccctcagttttacggaagcggaagcacgcatcatcgaagagatgacgccgttcatttcgggagagttcaccgtatcggacatcaaacgtgccaactatagcgaattgttccccagcgaagaggaagctgccgaccgctggtttaaatgtaaactggttttcatcacactggacgagaaaagcggtgcggaaaagaaaacctctacccaggtattggtgcaggctgccgacctgcgtgatgcagtgaagaaactggatgagggcatgaaaggcacaatggccgactatcagatagcatctgtagcggaaaccgccattatggatgtatatccgtacagtgcagagcccgacgacaaaccggaagtttaatttaagtgatgagttataagttatgaattattattgcgagccataacttataactcataactcataactcaaaaaaacgatgattgcagagaatttaaaacaagtactgagcgaactgcctgaaaaggtacggctggtggctgtttccaaatttcaccccaacgaggcgatagaagaagcgtatcgtgccggccagcgtgtgttcggagaaagtaaggtgcaggaaatgactgccaaatgcgaaagtctgcccaaagacatagaatggcatttcatcgggcatctgcaaacaaacaaaataaaatatatcgttccttacgtagcgctgattcatggcatagactcctacaagctgttggccgaagtggacaagcaggctgccaaagccggaaaaaccgtcaactgcctgctgcagttgcacattgcccgggaagagaccaagtttggattcagctttgacgaatgccgggaaatgctggcggctggtgaatggagagagctcaagcatatccggatatgcggattgatgggcatggccacgaatacggacaatgacgaacaaatcaaaacagagttttgttctttaagtagcttcttcaatgaagtgaaagccaagtggtttgccgatgcagagtcattccgggaactgtccatgggaatgtctcacgattaccacgaagccattgcagccgggagcaccttgatacgtgtaggaagcaagatttttggagaaagaaactattaaccataaaaaatcattatcatggcaacattagaaactacttttgcagggctgaaactcagaaaccccattatcgtcagcagctccggactgacagacagcgctgccaagaatcagaaactatctgaggccggcgcaggtgccattgtgctaaaatcactctttgaagagcaaatcatgatggaggctgactggatgggagacccgaacatgtaccccgaaggcagtgactaccttgtaggatatatccgcgaacataagctgggtgaatatctgaacctgattaaggaaagcaaaaaggtttgcaatatccccatcatagccagcatcaactgctatcagaatgccgactgggtggaatttgccaccaaaatagaagaagccggtgcagacgcactggaaatcaatatccttgcactgcagacggatgtacagtatacatatggaaccttcgagcaacgccacatcgacattctgagccacatcaagaagacggtcaagatacccgtcatcatgaagctgggtgacaacctgaccaatccgatagctctgatagaccagctgtatgccaacggtgccgccgcagtagtgctgttcaaccgcttctaccagccggacatcaacattgagaaaatgatacaagtatccggcaacgtattcagcaatgaagccgatttgtccaaagccctgcgctggataggcatcgcttcggcagccgtaaacaaactcgattatgctgcttccggtggtatccactcgcccgaaggcgttgtcaaggcaatattggcaggtgcttcggccgtagagatatgcagtgtgctttatcagaattcagctaccatcattgaagaatacatccgcttcctcaacttgtggatggaccgcaaaggtatggaaaccatcagccagttcaaaggtattctgaacgtaaacgacccgaagggagtcaataccttcgaacgtacacagttcttgaaatacttctcttcacatgaatgagacaaaagggtgacaagaagacaataaaaatgaaagggtgataacatcattgctgtgttatcaccctttcattttatacttaccctatctttttatttcttcttatccagcgcctcaaagcaggaattcttgctcacgaactccggaacaatatccttcatggcagcaacaattttcatctggtcataagtgtaacttacatcaatcagcttctggatacgctccttcacctcgtcatagtcatactcacgcaccgtggcaatcataatcttctcatgataggtgggctttgtaagctccttcacattcaagagttcctcgtagagcttctcgccatgacggagaccggtaaattcaatcttcacatccgtacgtccggaaaggctgatcatacgcttggcaaggtccacaatcttcaccggcttacccatgtcgaagatatagatttcaccgccgttgcccatactgccggcctcaagaacaaggcggcaagcttcgggaatggtcatgaagtaacggattatctcaggatgggtcaccgtcaccggaccgccacgctgaatctggtcacggaaacggggaatgacagaaccgttggaacccagcacattgccgaaacgcgtagtgatgaactgagtggcatggcctccctccttctgcaacttcttcgcaagagactgcacataaatctcgcaaatacgcttggaacagcccatcacgtttgtagggttaacagccttgtccgtagaaatcatcacaaacttctcggcaccgtatttcacggctagatcggcaacggtgcgcgtaccgaatacgttcacctggatggactcggaaacgttgtcctccatcatcggcacatgcttgtaggcggccgcatggaaaatatactggggcttgaactccctgaagatatcctccatgcgcgtggcattggagatgtcggctatgatggtctcagcatcgatgtcgcgccaacggtcctgaagttccagacggatgtcgtgcagaggggtctcggcctggtccactaaaataagcttatagggattgaacgaagccacctggcgcatgatttcactgccgatggagccggcggcgcccgtaatcatcacacgcttgccctccagatgagaggcaaccttatggatatctatctcgataggattgcgctgaagcaggtcctcaatctgaatttccttcaactgtgtgcggctcagcgcctgaccgttccactcgctcaaaggaggcgtggtcatcagtttgatgttgtgcaccagcaggcggtcagccatgccggacttcttcagttcctccatcttggcaggagaaatgatgatggtctgcacatcgcggtcgttcagcacatcaatcagcgtatcatcgttggggaacaccctgacacccatcatcaccttgttgataagctcaggttcgtccgcaatgaatccgcgcagacggtagtggttgcgcagattgacacgcaatgccttggcaatgttgaccccggcttccttggcaccgtaaatgaacacattggcactatgggtgccgtcgaagttcagcgcctcgaagaaagtcttgacaatcacacgggagcatgccatcatggcaaagctgatgatataggacatgaacagcacgctgaccggagccaggttaaactccaaatagctttccgtcaggacgctcgttatcatcagcagtgcatacgacaccgtcaatgacacaaaaatgcgcatgatatccacaaaggaggaaaagcgcagtacattggaatacgtacggaaaacacggaagaaaatcaggttgacagcaaccgtccataaaatggtcttgtcaatggtagatgattccagaaaaatgcttctgaaatcatatcggagagcataggccaacagactggatatgacgatgataaatacatcaattaacagaatagtccatatcggaagcactttcgcggaaagataccgatgaaaaaaatttcgcttcatttcgcttgacagttttgttttaggcgaggcaaagatacactattttagtcaaaacagacaataaatcgataaaaaaatgttataacaattatttatcgtctataaagaaaccatcccacctcccccgttttaacagtcagaaagcgggatagaaatagttttgccccggaaaatgcggtatccgctacatcagattacttgccaactcgctcaactggctgcgctcccctttcaccagattgacatgggcaaacaaattctggtctctcatgcggtctatcatatagacaagcccgttggactgactgtccagatagggttggtctatctgctgaatatcaccggtaaacaccatttttgtaccttcgccggcacgggtgatgatggtcttaatctcatgtggggtcaggttctgggcttcatcgataatacagtaggtttcgctcaagctgcgcccacggataaaggctaatgcctcgatgaccaattgttcacttttttgcatatcctccaagcgtttcacttcagaggaattggcagcgaactgatgcttgattacattcaaattatcgaacaaaggctgcatgtaaggagccactttctcattggcatcaccaggaaggaatccaaggtctttattggataaggccacgatgggacgtgccagaagaatctgcttgtagtcggtaagttttcccaatgcggcggccagtgccagcagggtcttaccggttcccgccttaccggtcagggcaaccagcttgatattcgggtcgttcagcacctcaaaagcaaagctctgctcggcattacgcggttcaatgccataattccttgtcttgttgacccgacaaatcgaatgggcaaagggattataacgcgcaagcacactgctgcggtcactcttcagcacaaaacattcgttgggacgaatgatgtccttaaaatcgaactcgttgatgtccagtccttctttggaagaataaatgcggtctatcagcgcagggtcaataccctcgaacacttcattcgacttttcgaatatatccacattgattaccttatcattgatgtagtcttcgcacagcagaccgatggaacgcgccttcatgcgcagattcacgtctttcgtgacaaggatggttttcattttaggctttttggtggaaagccagtccactaccgacagaatctgatggtcggggatgcgttcgggaaaggaatcacgtacccggggagagtccaccatgcctgccaccacaaacagacggcccaagccctctcccaatggcgcccctttggtgaacagattgtcatcggtaatcaaatctagctcacggacaaactcacgcgcattgaaattaatctgctcattacctttcttgaatttgtccagttcttcaaggactacgatgggaagataaatgtcattctcttgaaaattcttcaaacagttataatcgtgaagaatcacattcgtatcaatcacaaaatttttcttagctcccat

SEQ ID NO: 360 - DNA, 13118 bp, unidentified
  source 1..13118: mol_type = unassigned DNA
ttgagatctaaatatcattttattataatcggttcaggctggcgggccttatattatgtacgcgtagcaaaggctctgcctgaaatattctgtattgatgcgatgtattgcaggacgcaggagaaagcggacttaattgccggtcagtatcagatacatacaactacatctatagaagaatgcgtggcatataaaccggattttgcagttgtggctgttaagaaggacgccatatgtgatgtttcaatggaatggcttgaccgtggaataactgttttatcagagactccggcggcacttgatacggattcgctcaataaactgtattcttattacaaatgtggtaaaaaacaggtggttgctgaacagtacagggagtatcctaatattaaagcatcattaaagcttattaatgaaggaattattggtgatgtcagctgtgtaaatgtgtcactggcgcatgaatatcatggaataagtcttataagagcatttcttggagttaatccgggagagaagtatacagtttcagctaagacatatgagtttcctacaacacagactcttacaagatatgataagttcactgatggcaggattgcaggaaagaaaagatgcgtcgccacatttgaattcgaaagcgggaaagtggcatggtatgattttgattcggagcagtacaggtcaccaatcaggaagaatacgcttaaagttcagggtgtaagaggtgagcttgttgatgactgtgtatattatcttgatgagaataatgaaggtcaggttggcagaatcataacggattcccatgtgattaatacaggaaattctaatcctaattttgagaagattcgtgaaattaagaaaatttcatttgataataagattatatatgagccggaatttggattgtatggtctgtcagaagatgaaacagcaatcgcagtgatgatgaagaatacggcagagtatagcagaggaaatgcgtctgcaccatatagtatggaggatgcccttgcagatgcgtatgccgccatcttactgaagaaggctgtggaaacaggagaagtggtgcatagttaatataatgaaacggggtacatggtatgcagaaagaattgttaaaggtggcacttataggtgtaggaagtgttggaaagaaatatgccagaatgataacagcgggagaagttccgcatatgaaattatcagctgtggttataagaagagatgaacttattgaatggggcgaatcacttgttaatactgatggtgataatgcaaggatattcaggagtgcagaagaattatttgagacaggagaatcatgttatgatgcagttattatagcaactcctcataaaactcataaagaactggctttgaaagcatttgcaaagggaaaagcagtgttatgtgataagcctgcagcggcagatgtaggtgaagcacttgcaatgcagaaggctgccagtgaaagtggcagaatatatggaatgatatttcatcagaggctttaccctaaatacatcaggattaagcagatgatagataatggtgaattaggagatataaagagagtatgtcttattaattcacgatatttaagaacctcatactatcataaatctggctcatggagaagcagctttgcaggtgaaggcggtggagcacttatcaatcagggacagcatattcttgatatgtatcagtacctgtttggaatgccacagaaactttttgcagcgattccatttggaaaatacaacgactttatagtagatgatgaggctactatcgttatggaatacgacaatggaaagacaggcacatttatactatccacaggcgaagcctgtcacgaagagcgacttgagattataggaacgaaggcaagaattcttctggaagacgacacgctcaccattacaagacacagagatgtatgtgagtatatcaagaacgaagaagtcaactcaaggcagaatatgacatttacagaggaaactatacagttcgagaaggcatctgagccatatgcacagctatttgaaaactttgcaaatgcggtgcttaaaggtgatgagtcttatctgaccgttaagggtagtgagggaattaattcactcatgttgtgtgccagtgcctattattcagcatgcaaaggcataaaagtagaacttccgcttgaagcctcagattataaagagcttatggatgaattgattaagaaagaagagggagaatagattcagtctattcttcctcttcttcgtcgttaaagccgtggagcagaaaatcgttccacctggcattagtttcttcaagctcttttttctgcatgatacggtttctgtcgcttagaatggaaatcatttcatcagctatctcctcaacaggagggtggtcgtaatgatagagataaccaatcatgcggctggcagtgaaatcagtattgagattcttagtgacaatatcacagaaatttttctcataacctctttgcagcattaattcatataattgtctgcttaaatctgatttgggtttcataaaatgtgactccttgtttgtggtgcgtaatatgtctgtttattatagcataaatatttgaaaaacataatgtattgtgatatattacatttgtaatgatgtagcattaaaatagtgtgctatatgaatatggaggtattttttatgtcaagtacaattcaagtaagagtggatgacgatttgaagattaaatcagataatttatttaaagaattaggaacagatactacaacggctataagaatgtttttaacacaggcagttgctaataatggatttccatttgagataaagaaagtggcagctaatccttacattgttatttcggaaaaggaagttcttgacagattagcaaagtcaagagatcagtcaaagaatggagaatattcagaagcaggtgattttgttgcagatatgaggacaaagtatggcatataaagtggttgttactaatgatgctaaagaaaatatgcaagagtatattgaatacatattatatgaaaaaaagaatcatcaggtagcaggaagtctccttgatgattttgaatatactaaagatatattagcagaggtcgcaggaagtttaaaattatgtgataacgaaaaattgagaagtttaggatatagaaggataggctttaaattccatagatattttatgttgtatagagtggaagatacaactgtttatatagatgggatttttcatgagttacaggattttgagaataagattaactgagggataataaatatagcaagatataattttagtaaaacaattgtacataatgggttgaataaaacaaaaacaatatatggaaccagatgttattatgtaaagaaggggaataataacttaatctgaccatataaatttaactcaaaatgacaatgtacacatgtcactttatctgttattcttatgtgcaattaaagtatgttgatataggaggcagataaaatggaagcacaacagacacagttagtacagcaggggattaagaaagaaggatttcatattactgtaacacagatgtgtgtaacagcagtatttatggcacttacatgtgttgcaacaatggtggtgcagattcctattcctttgggatatgcacatttgggagacagcgtaatacttatatgtgcatttttcttcggaccagttgttggcgcactcgcaggaggaattggttctgcgatggcagatatattaactggatttgcagtatgggcagttccaacacttataataaagacaatcatgccaataatagcatgtgcaatatttggcaatatgaaaagcaagtttgacagatgtaaggttatttcagtgaaaggaattgctggtgcagttgttacattacttttcatgacattaggatatgttgtatttggtgcaataatagcaggcagctttgcagcaggattagcttcggcaccaggacttcttcttaaatcagtagttaatatggttgtatatctttttgtggcaacaggaatgtctaagattcttggcagaaataataattgattacaagtagaggagaatagatatatagtctgtagggtggtacttttgggtatcaccctttttcgtggttgatacacgaggaagttttacttcctctagaagatatttatcgtggaggtaactcaaagtcaaggaatcctcatatgcagacaatgttaagattagtaggatttggagataatgctggttctggcttcccaacaattcttgaggtatggaaatcagaagggtggattgaacctctattaatagaggatacaaatcttaatcaagtgacacttgtgatgaagatggaaaaggaatctgatgaagaattagcagaaaaatcagcagattcaaaaaacatgaataggtcagatttatcagcaagacacaaacagattttaacaaatatggatataggtgttgaatatagtacggaacagatagcagagaagattggattaaaaggtcctagaacaagacaactattaaatgaattagtgaataaggagttattagcttgtgttggaacaacaaaaagaagaagatatattaagactgttgattgaaaatcacatgatacctatcagtagtcgcaaatctaaagactttataggtcaaaaatcacatcaactactatattagttgcaaattacacctataaagtaactataatcatgaaccttataggaaatttaacttcaaaaccacattttagacagcgtaagagggaaaatcagcctataagatgcaatatatttattttcttataggaagccatgactcaaaaagccaagatttaccaccacatcccccaaaaaatgagaaaaaagccgccagcagttaagctggcggcttaaattaacacttacatgaggtatagccacaatcaccgacggtggaagagctgtttgtcagcgtacattgctgagtcagcattttttactatttcaataatatcgcttccgttgccggatgcaacaccgacagcacttttaaaaataatccgttaaatatacgaatgaacgcacaatttatatcttaacatttagttatatcgttttccagcttttttaattcttttaattctcttatagtaaagtatccgcatacgatagcagcggcagcgtctgctataggtccggcatacataacaccgtcaattcccatgaatataggaaatataatgataagtggcagcaggaaaataatctgccttgtaagcgacataaatacaccaagctgtgatttgccaattgagttaaagaaattggaagttacaggctggatgccattaacaattgtcagaaacatatatattctgaaatatctttcagagaatttaaagtacaggtcacttccgttaccaaatatgctgataatctgtcttgggaatatctggaagcatgcaaatgcgattaaagacagggcagaagctgcaccaagtgcaagaagataagtttttcctacacgggcgtacttctttgcaccatagttaaaacctataactggctgagttccctgagatattccaataacaaatgacatgaaaatcatattaaccttagttataattccggcgcaggcaagaggaatgtctccaccgtatattgactgtgcgccgtagtgtgacagcgtattgttcataacaatctgtacaacagtcattgcaatctggttaaagcaggcacttgctccaagaataaatattttcttacagtggtcaaatgatacaacaaagctttctctgtcaagtttgattgtcttaaaatgaaacatataacgcaggctgattgaaaatgaaattatctggcctgtaattgttgcaagtgccgcacctgtcattcccatgttgaaaacaaatataaataatgggtcaagaatagtgttcacaatagcaccgacaagcattgaagtcattgaatatcgcgggcttccgtctgcaagaataagcttgctcataccagtgttggcaattaagaagggaaagccaaacgcagtgattcttgtatatgcctttgcatatggaagtacatctttagttgcaccaaagaatttaagcattggtgttaagaatatagtggttacaaggaacagaaatattccaaacaatgccataagtacaataccgttaccggcatatttttcagattcgtgtttttcaccggcgccaagatgcagtgagaaattagtcgcacttcctataccaagaagaagcgaaatagccgtacatgttgttgacagtggaaatgcaatgttagtagcagcatttccaagcataccgattccctggccgataaatatctgatcgacaatattgtaaagtgctgtcacaagcatcgaaataatgcatgggattgcaaaaccgacaagcagagtggattccttcttgtaaccgagcggattatcttttgtgttcatagtcgctgactgattattcataataaaacctcataatattattaaaaactgataatagcataattgatatcataacacattatgttaataaatgtgtagcctgattttgtagcctgattattaaaatgtgctgttatatgctttgcgtttgtgatataattcatgtcatgtaaacatataaagccggagggaaatatggataattattcaattaacacaaaatgcgtccaggcaggctatactcctggaaatggtgaaccaagacagattcctataatccagtctactacatttaagtatgatacaagtgaggatatgggaaaactttttgaccttgaagcaagtggatatttctacacaagacttcagaatccaactaatgattatgtggcagctaagattgcagcccttgaaggtggaagtgcagcaatgcttacttcatcaggacaggcagctaatttcttcgctttatttaatatttgcgaagctggaagccatatagtagcatcatcttctatatatggaggaacatttaaccttattgatgttactttgaagaagatgggaattgaagcaacatttgttgaccctgactgcacagaggaagaacttaatgcagcgttcaaggacaacacaagagcagtatttggtgagacaattgccaatcctgcacttacagtattagatattgagaagtttgcaaatgcagcacatgcacacggtgtaccacttatcgtcgataatacattcccaacaccagttaattgcagaccaattgaatggggagcagatattgtaacacattcaacaactaaatatatggacggacatggagcagcagtcggtggagctattgtagacagcggaaagtttgactggatggcacatgcagacaagttccctggactctgcacacctgatgaatcatatcatggaattacatatgccgagaagttcggtaaagaaggcgcatttataacaaaatgtacttcacagcttatgagagatttaggctgcatacagtctccacagaatgcatttatcttaaatctcggtcttgaatcacttcatgtgcgtatgccaagacatgttgaaaacggacaggctgttgcagaatttcttgagaagcaggataaggttgaatttgttaattatccgggacttccttctaacaagtactatgagacagctaagaagtacatgccagatggcggctgcggagtagtttcattcgagttaaagggtggaagagaggttgcagagaagtttatgaagaatctgaagcttgcagctatcgaaactcatgtagcagatgcgagaacatgctgccttaaccctgcaacatcaacacacagacagatgaatgatgagcagcttaaagccgctggaattccagcaggacttatacgtatctcatgtggtcttgaggataagaaggatctgattgcggatattgcacaggctttggaagctatttgatttaagtaagaaatatttttatatgaataaagtcgttaaaatgatgaaatttttatggataaaagtcatcattttgacgactttttatttacaatgaggggataaagtaataaattatttataaatgttaatttaaggagcaattattatggtaaagcatgttattttatggaaattaaaggacgagcttgcaggagaagaaaaagagcaggttaaggcaggtattaaggaaggacttgaaggtcttgcaggacagattccggggcttatagaggtaaaagtaagaacagagtgtcttccaagttctacagcagatgtaatgttagacacaacatttgacagcgtggaaagtttaaagggttatgccgtacatcctaagcatgtggcagttgcagacagcaaggtaagaccttacacagcaatcagatcatgcatggattacaaaatttaaagatttatcatatacagcaatagtggaggacataatgatggaatacatttcaagaaacgatgcatttgaattacttaagaagtacaataaagacccatttcacattcagcatgcattaacggttgaggctgttatgaagtggtatgccaacgaattaggctacggtgatgatgcagaatattggggaatcgtaggacttcttcatgatattgattttgaactttatccagagcagcattgtatcaaagcaccagaacttttaagagagggcggcgtatcagaggatataattcatggagtagtttctcatggctatggaattacagttgatgttgcacctgagcatgagatggaaaaagtgctttttgcagcggacgagcttacaggacttatatgggcagcagcacttatgcgtccatcaaagagtactaaggacatggagcttaagtcattaaagaagaaatataagagcaagggctttgctgcgggatgttcaagagaggtaattgagcgtggagcagagcagcttggctggggacttgatgaacttctgacgaagactcttgcagcaatggcagcctcagaagacactattaatgaagagatggagaaggaaaatgtttaatactccaacagattgttacaattatataattgagaatgaccttgaaatgtcagtgcttggtgcaatgatgaatcatgttggcggatattcaatagcagagattgcagatggaagattccataacagagacggagcagtctcattttcatcaccaggttataagataaacattcctgttactgatgatgaaatagttacggcagtgcttaatgggctgtatgtaagtgcatttatatcaagaaatcaggataagtaccagatacattttcttgtatcgggatatcctgtcaatatgaaatgccgctacgaggagcatattgcaaaaggtgtggtaaaatacatgataatgtctactattgttgcgtgcagattagatagtgagaaaaaactgaaagaatatatagcagattaaataagagagccaggatatacggactgacaatggggttgaagttcgtatatcccggctctctttatgagggggaaaaatgtttttcaaacatccgatgactgctgtattgggagattagacagccatcttttttatgaaaaagtttgtctgttgtctttcgacattgttaatattaaatgggaaatgtgaaaatgagttggaaagtttgtgagaattttgtgaacagtgatattatttgataaaaataataaaaattgtaaaaaacaagttgataattttccaaactctgagtataataatagtaccaagagagaaatctcttcctgatgacaggacatgaagcataaggtgtttgcttccgttgcactggcaacgtaaaaactttgcatttactcttaagcatagaggataatcaagccagacgggtgagaagcctgtgattttggtggcaaagcaccataatgaaaccagtttttaaagatttgagttaatgaggaaccttcgatgggaaggttcctcttttacattaaggagaattatgaagtataaaatacagaatacaagaatgctgagtccaacagaattattaacgatattgtgtaaaagtgcaaaattgtattcagagtatgcagatactactttattatttatatttagagaaaaaaagtcagatgtatatgattattatgaagtaagatatggaaaaaataattttatgcatctggcaggaattaaaagcgaaacattgagtgcgacagcattttatgaggcttgtgaaaagcaaataataaaaagagaagattgtaaaccaagaagagattcaaatactatgtatgcaaaagcagctgttatggaacagatgttgaatttgcgaaacagcaagtgttataagataggcgcaaaagatttggtgacgcgggataatgattttgaaatggctacaggtaatgaatgtggagtaatcgggtatgattcaaggataaagaaaaaaggaacgcagattgtggacaataccaaggccccgattccaactacattattgaataatcctattacagattattgtacaagaccacagaaaataatgtttattctgcagaaatatgagggagagagtacatataataaattattttatgaaataaagaaagaattgtttcaaacagagaaagagttcttttcagatgaattaaaaaaattaataacaatgtagtatcaactacaattaaaatatcgtatagaataaggaggacacatttacatgaaagagttaagtaacagatcagcaaattttacagactctgtcatcagaagaatgacaagagttgctaataaatatggtgcagttaatttatcgcagggatttcctgattttgacccaccaaaggctataacagacaggcttgcaagagttgcaggcgaaggacctcatcagtatgcattgacatggggagctaagaatttcagagatgcagttgctaagaaatatgaacatttttcaggtgttaagattgaccctgagacagagattgttgtcacatgcggaagtactgaggcaatgatggctacaatgctcagtattactaatccgggagagaaagtcgtaatattctcgcctttctatgagaattatggcgcagatacaattctttcaggtgcagagccgatatatgttccattagttccaccggaatttcattttgataaggaaaagttagaagatgcattcagacagggcgctaaggcattaattctgtgcaatccttccaacccatgcggtaaggtgttcacaatggaggaaatgcagacaattgctgaacttgcaaagaaatatgacgcatatgttgttacagatgaagtgtatgagcatattgtatatgcacctaataagcatatttatatgcaggcgcttgagggcatgagagaaagaacaattgtgtgcaattcactgtctaagacatactcaataacaggatggagattaggttatgttattgctaacccacagataatcgacagagttaaaaaggtacatgatttccttacagttggtgcagccgcaccattgatggaggcagcagttgtgggattagagtttggtgatggatattatgatgaacttgccgcacattatgcacatatgaaagaggtatttgtaggcggtcttaagaagctgcgattaaaatacacagacccacagggggcatattatgtgcttgttgatgtgagtgaattcggagttaaagatgatgtgaaattttgcgaatggatgacacagttcgttggtgtggcggcagttccggggtcaagctttttcagggaagatgtgcataatcttgtgagatttcatttcgcaaagcaggacgatacacttaatgaagcaataaagagactggcaacacttaaagaaaaagcgatgaatgccaagaatgtggactggagataattcatggaaatatacttaaaaccgataatttcagcgtgttatgtgttcccggttcttgccgtgcttttcacactgccgtacataatatatgaatatcataaatatggctcgatacttgtaataagaacaggggttgtgtacacatttatattctacatgattacctcatattttatgacagtgctgccgctgcctccgattgattcagtgacaccggattcagcatgtatgctgttagtgccatttgatgcggtaagaagagtcattgctactgcgaatgttactttatcgaatccggcaacatatattaatctgttcaaatgtggtgacttctggcagattgctttcaatattctgctgttagtgccatttggtgtgtatctgagatactattttaagagaaaatggtggcaggtgcttataatgtcattctgctacagcctgttttttgagcttacgcagttgtcaggcttgtatggaatatatccttatccatacagattctttgaagtggacgacctgatatgtaacacacttggaggaatggtgggcttctgggttatgccggcggttgttttcatgcttccaaagcgtgacagaatggatgaagttgcttacaacagaggacagattgtgtcggaattcagaagaataatagcatgggcgttggatatgcttgtgataatggctccggttgccatattttttgcaatagataaagaaaagtttatgaatgctgtgtacgatgtaagatatctggttgccatagcggtatatatagttacagcatttacaatagttacagtaattaccaagggaagaactataggcaaggcacttgttaatataagactagtgagggcagagagtaagaaagctgataacaagactgctgattacgaagctgagaatattaaggctgatactcacagaagagtgaatgtttttaggcttatgggaagatattttattctgtatgttttaagcctgccttctcctgtatatgcatataatctttatcatgtggcacttaaggctgatggttggagattctctgtcagtatagcagtatgtctattgtgccttatggttacggcatattttgcgatagatttcatattatgtctgttcagcagtacacggcagatgttttatgacagggtgatgggaattacgcatgtcaatatggtgaagcagaaggaaaagatatcaaaataa

SEQ ID NO: 361 - DNA, 17105 bp, unidentified
  source 1..17105: mol_type = unassigned DNA
gtgttattggtatatgaaaataaaaatacgggattatcatccgagtggaaagaaccagtacatgtgccgccgcatctgcatgaagcaatagaagttgtgtatgtaacggatggagaagtagagcttggagtgggacctgaattgttccatatggatgaaggggattttgcaataatatttcctaatgtaatacatcattatcaagtttttgggaaaaagaagaataaggtaatatacttatatcttgatccaaaactatttccctcatactataaagaacttcagaattacagtcctgaaaatccagttgtgaaaaaaagaaaagtgcatccggatgtagtaaatgctataaaatatttggcagaagtaacagatggcaatccaatgctgataaaggcatatgcacagatgattttagcacatgttttcacaacaatgccattgattaataaaagtgcagtaggaagagatgatcttatttacaatgcggtggaatatgtagccaaaaattttagagaaaacatcagccttgaaaaaatggcatatgaattgtgtgtaagcaaatatgtattatcaagaatgtttgcgaagacatttcattgtaattttagtaaatatgtgaatggagtccggttaaattatgcagttgcagaacttgaaaacacgatggattctataacaaacatatgtcttgattgcggatttgaaagtcaaagaacttttaaccgtgtatttaaggatagatataaaattacacctagagaatatagaaaaaggatggaacatgataaataatattttatatgttgatggccaaattccccacaaataatatgcatattattagaaaaagcagagaacctatattctctgcttttagttatatgttttttctgtattcagatggtgataaaccttttaacttttgaaatattcggctgaaatacagagggttttcatagcccacaatcctggcaatttcgttaatgttatattgaggattctgcagaagtgcttctgcattgtatattcttttacgcataataaattgtttaggtgtaataccagtatataagcggaaattacgaatgaaccagcttgtacttatattattttgctctgcatagctatcaatattaattggttcattataatgttcactaaagtatgaaacagcattgtctatttcatcagctttatgtgtattatcatgagatacagaagataaaaaattccgatgtagtcttataaaaatttgtcgtagatacatttctagcatttcaggatatccattctgacacatctgcagttctttgatcatttcacgaaacagaatctgatattcagatccagaaccacagtagaaaactcttttgtcatcagttaatccataggaacgaagaagattggtaacattattcccagtgaaatgtacccagtaaacttctacattatcttttgcataatattcatatttttgaggttctttaggtctgtataataccatatgaccagcatgaacgatggtttcatctgaatcattattaaaatggaagtgggcttttccagatgcgataaaaagtaattggaaatccagtctgccacgcgggcgccatgtagggagttttggtttagtatatagcttataggtaccacacatggttataattagttcctttgatttatctttcctgtcaatagtggaattgttcaagtatgcgttattggtatacatataaagccccctttacgtgtaattaaaaaataatatgcatatatactgttgtaaatataggaaatcattaaatacacaatgttattttatcattttatgcatataatgtctatttactttaataaaacaagtcataaatgaaacaaactaatgtaatgttataaattatttgaattataggctttgaatgaaaaatcataatggattaggaaaataaaaattatgcttaactaggatgactaataatattgttttgtgcataatctgtacaatttatgatatggattttttgggctattttttgtatattatgtataacaagaatgcaaggtgattttacggataataaagaataacaataggattaatttctattagtaagtataattagatatgatcggctgataaaaattattcgttattatatattatccgataaatgttgatttaagtggggtgattgagatgcagacagatatattgatacaaagtttcctagatggcgtgtatgatgagagactttttgatgtgtatgctgatgagacgaaaatttattatcaaagagaacgctatatcaatgcaataaagaaattcgagcagtgctataagccgggagatgtggaaatattcagtgctccgggaagaactgagatttgtggtaaccatacagatcatcagaacggagaggttttggcagcctcagttaatcttgatactattgggatcgttaaaaagacgtatgataatgtaatcagattggtttctgataactatgatgaaatcattatccggcttgatgatatatctgtaaaggaaaaagaaaaggaaacaacaaaggctttgataaaaggtgtggtttctggatttcttgagagaaaatatgcagttggaggttttcaggcatatataacaagtgatgtgctgattggtgcgggactttcatcttcggcagcatttgaaactttgattgggacaattttatcaggactttataattgtggaacagtttcagcaacagagatagccattattggacagtatgctgaaaatgtttatttcggaaagccttgtggtctgatggatcagatggcaagttcaattggtaatcttgtacatattgattttgccaacccagaatacccatatgtagaaaaaattgattttgatatggaaaagtatggttataggttatgtattacagatacaaaaggttcacatgctgatttaacagacgaatatgcagcaattccaaaggaaatgaaactggttgcaaaatattttggaaaagaagtgttgcgcgacatatctataaatgatgtattggataatattactgatttaagaaaaaaatttggagacagatgtgtccttagggcattgcattttatctatgaaaataaaagagtacaaaaagaagtaagtgcattgaaagcaggaaatataggagcatttctagatgatgtgaaagcgtcaggcaattcttcttttaaatatctgcagaatgtttactcaaatcaggatataaaaaatcagaatgtatctttggcattatttgtaagcgaaatgtttttgggacaaaatggtgtatgcagggtacatggaggaggttttgctggaaccatacaggcgtttgtgaagaatggatatgtggagaattacaaatacgaaatggataaaatatttggtaaagattcttgtaaagatttgagaataagaaaatatggtggcataaaagtgttatgaattagaaagaaggtattattatgagaatcttggttttaggcggggctggttatattggttcacacacagtatatgagctggttgatgcaggttatgaagtaattgtagttgataatttgcttacagggtttaaagaggcagtacatcctcaggcaaagttttatgaaggagacataagggacaagatattccttgataatattttatcaaaagaaaagatagatggtgttattcatttcgctgccagctcacaagttggagagagtatgaaaaatccactgaaatactataataataatttatgtggaacagaagtgttgcttgaaagtatggttgagcatggcattgataagattgtattttcatcaaccgcagctacatatggagagccagaaagtatacctattttggaaacggatcgtacacttccaacaaactgttatggtgaaacaaagttgtcaatggaaaaaatgtttaaatggacatctaaggcgtataacttacgatatgtttcacttcggtattttaacgcttgtggagcacacccgaatggaaaaatcggagaggcacataatccagaaacacatttgataccgcttgttttgcaggttccgaacggaaagagagaatacatatctgtatttggaaatgattatgacacaaaggatggaacctgtgtaagagattatatccatgtaaatgatttagctcaggcacatatccttgcaatggaatacctctcaaaaggcggagaaagcaatatttttaatcttggtaatggggtaggttttacagtaaaagaagttattgagacagcaagaaaggtaacaaatcatacaattcctataagagaagaagaaagaagaactggtgatccttcagtgttgatagcatccagtgaaaaggcaaggaaagtgcttgggtggaaaccgcagtatgcagatctagagacgattatttcaacagcatggaaatggcatgtaaatcatccggacggatactaggaggtataacatgaatgaacttatttcagaattagtaggttacggtattgaaaaaggattggttgaggaagacgataaaatttatgtgattaacagacttttagagttgtttagacttgacagttatactcagacggataaagcaatcagacagttatcagaaattctatctgatatgactgattatgcagcggagcatggattgatacctgaaaatacaaatgtatacagggatttatttgatactaaaattatggggattttaacacctgcaccctctgtggtcagagcaaaatttacagatttgtatgtcaaaaatccaaaaaaagcaaccgatttctattatcaattcagtcaggatacaaattatatacgtaaggacagagttgcaagagataaaaaatggaaagcagacacacagtatggcaagatagatattacaattaatctttcaaaaccagaaaaagatccacgggacatagcgagagcagcaactcaagcaaagaatgattatcctaaatgtttgttatgtgcagaaaatgagggatatgcaggaacactctcacatccggcaaggcaaaatcatagaattattccactaaagctagatggacaagattattatatgcagtattcgccttatgtgtattataacgagcactgtattgtgtttaatgcaaaacatacaccgatgaagattgatgaagctgtttttgtaaagctattggattttgtaagacagtttccacattatacactaggctcaaatgcggatttgccgatagtaggaggttcaattcttagccatgatcattttcagggtggagcatatacttttgctatggcagaagctccatatgagtatatgtttgagattgcaggatttgaagatgtgacagcgggatgtgttaagtggccactgtcagtcataagattgcagggaagcagcattggaagacttgcaaaagtgtctgactatattttgcaaaagtggcgtgggtatacggatgaagaggcatttatttttagcaaaacagatggagtaccacataatacaattacgccaattgcacgtatgaatgggaatttatatgaaatggatttggttctcagaaataatattacgacagaggacaggccatggggtgtgtatcatccagaggaaaaactgcatcacattaaaaaagaaaatattggattgatagaagtgatggggcttgcagtacttccttccaggctgaaaaaagaaatggatatacttgcaaaagctattattgaagggaaaaatattcatgatatagaggaaataaaaattcatgctgactgggtagatgaatggctggactcttatgatattacaacagaaaatatagagagtattattcagaaagaaattgcagattgttttgtgcaagttctggaatgtgcaggtgtatataaacgcacagaaaagggatttgctgcatttaaacggtttttgtcagtactataaaaatcttcacagtggttttaatagatcacatcatagactttacagtgtaagaaattcgtaaaagtaagcagacacaaagctgaggaaagttgtaaaactgtattcagattttatttaggtactacggatataaacatttattgtaattaaagaagttccggcatcaacagaattaactgttacacatactgtatgtaaaaataaaaatgatgacagttattttaaagataatacgatagctgctgtaataaaaaccaatggagttacatttgaaatcaccaatactgccacacctgattttataaaaaatattatagagaaatttagtacaaatataaacagaaatgaacacaacctccagaaatggaggtttatgtttaacaaggtgttcacgaaaagaaagataagaaaaatcatgaaagaaaggaaatagaaaataatgaacaaacaagaaagcgatatcttgaatacgcttttattggaaccatttatcaatcaaaggattctagcagaagtatcaggtcattcattaggagtagtaaaccgttcactaaaggaacttatcaaagctgattatttagatgaatctatacgtccaacagtgaaagcaattacagaattcaaacagaaaactccacagcgtgcagttatcctggcagcgggattcggtatgcggatggttcccattaatacggaaatgccaaaaggtcttttgaaagtcaatggtgagccattaattgaacgtattatcaagcagcttcatgaagttgggattaaagaaatttatgtggttgtaggtttcatgaaagaaaaatatgagtacttgattgatgaatatggtgtagaactcgtggttaatgctgattatgcggcaaagaacaatttacattcgatcaaacttgtaaaagaacatttggagaatgcttacattattccttgtgacatttggtgtaatcgaaatccgtttcatcgccatgaattgtattcctggtatatggttagtgacatggtggtcaatgaaagcaatgttcgcgttaatcgtaaaatggaactggtaactgtgccagaaagttctggtggcaatgcaatgattggtatctgctatctggtaaaagaggatgcagatacagttgcgaaatgtattgaagagttatgtaaaaatcagcggtatgatggagcattctgggaggaagctctttataacaaggatcggatgatagtactagctcgcgtggttcattcagcagatgtagtggaaatcaatacttatgagcaactacgggaaatcgacagcaattctaatcagttgaaaacagatgcaattcaggcgatttgcaatgttctaaaagcaaagccggaagcggttacgaatattactgttttgaaaaaaggtatgacaaatcggtcttttctgtttacttgcaaaggaaaaaaatatatcatgcgtattccgggtgagggaactgaccagcttatcaatcgtcgtcaggaggcagcagtttatcaagttattgaaggaaagcacatctgcgatgatattgcgtatatcaacccacaaaatggctataaaatcacggaattcttggaaggcgcaagagtatgtaatccattgaactacgaagacgttaagaaatgtatgatgcggctacatgcgttccatgacttgaaattaaaagtaaatcatgagtttgatattttttggcagacggagttctacgaaacactgtgggatggaatgccttctatttataaggattatgagaaaacaaaagcaaatgttttgtcactaaagccttatattgatgcacatgtgggagaaaaagttctgactcatattgatgcagtaccggataatttcctttttgtggagaaggacggaaaagaagaaatcagactgattgactgggagtatgcaggaatgcaggatcctcatgtggacgttgcaatgttctgtatttattctctttataataaacgtcaggttgatcaattaattgcagcctactttactgaaggctgtagtgatgagattagaatcaagatttattgttatattgcagcttgcggacttttatggagcaactggtgtgagtataagagaaatctcggtgtggagtttggtgagtattcgcttcgacagtaccgatatgcaaaggattactatcgaatcgttcaagaagaattgaaaaagcaaggggaggaagagtaaatgccaaaagtagaaagagctattattatggcagctggtttaggaaatcgaatgcacccagtgacactgtcaacaccgaaaccgatggttaaagtgaatggggtgcggatgatcgacacagtcattgatggtctgcatgaaaatgaaatttatgaaatttatgttgttgtcggttatcttaaagaacagtttgtgacacttgaaaaggagtattctggtgtcaggttgattgaaaatccatactatgatacttgcaacaatatatcttccctttatgtagcacgagagcatattgaaaatgcaattattctggatggtgatcagattatttataatcctgaaattcttgcaccagaatttgaacgctctggttataacagtgtttggacagatggtgaaacggatgagtggcttcagactgttgagaatggcattgttacggcatgcagtcggacaggtggaaaaggcggatggcagctgtacagtatttcccgctggactgcagaggatggaaaaaaactaaaacgtcatctcgaaattgagtttgaacaaaagaagaatcaacaaatctactgggatgatgtggcgatgttctgctacccaaaggagtatcaattgggtatctgtcctatgaatagagacgatattatagaggtggataatctgagtgagctaattgctctagatgccagctataaaaaatatgtggaggaaaagtaaatgaatactaaaaaagaacatgcaaaaatagactggatgataacactggtgcccttggcaatcgtaattgcattatgtgttctattctttttggcaccagaacaatcgaatgcagtactgagccagattcgtttttttttaggtgatacttttggaacatattacttagtaattggattgggaattttcattctttctctgtatattgctggctctaagtacggtaacatagtttttggcgagcaaaatgagaagccgaagtattctttttttgtgtggggttcaatgatgttcacctgcggtcttgcagcagatattctgttctattcgttttcggaatgggtgttgtatgcaactgatccgcatctgacagagatgggaagtattcaggattgggcaggcgtatatccactgttccattggggcttcattccgtggggattctatctggtactggctgttgcctttggctttatgctccatgtaagaaaaagaaaccgtcagaaatattcagaggcttgccgtccgattcttggaaagcataccgatggctgggcaggtcgcattattgacctgttagctgtatttgcactcctggctggtactgctaccacatttagcgtggcaacaccgctgatggcaactattattggcgaactgttccatgttgccgttagtcgtactgtaatcaacattattattcttctgattatctgcgctgtatatacatattctttactgcatggatttaagggaatcagcaagctggcaaacatttgtatttatatgttctttggtctgattgcctttgtgcttctgtttggtggagaaacacggtacattattgaaactggtttttcttcacttggtcgaatgatacagaactttgttgatctgtctacatttactgacccactccgtacatcgaactttccgcagaattggacgatttactattgggcttattggatggtttggtgtgtggctgctccgttctttatcggaagcatttctcgtggcagaacagtgcgtcagacaattcttggtggctatatatttggtgttggttccacattgacgagctttattgtactgggtaactactctatgggaatgcaggtgaccggaaaagctgactttattgcacagtatctggagagcggtgacctgtacgggatgatcgtatctatcattaagacgatgccgagtgcgcctgttattatggtagttgttttgttgacaatgattgctttttatgcgacgtcttttgactcaattgcattgacagcatcctgctacagctatcacacattgagagatggtgagcaaccgaataaggtcattcagttgatgtggtgtattttgctgattttgcttccgattgcattgttgtttgcagaaagttctatgaacaatcttcagtcggtgagtattgtggcggcattcccgattggagtggtaattgtgatgattgcggttagctttatgaaggatgccaaaaaatatatgggaaatatggaagaaaaaggtcagcaagaggttgataatgttgacaacgaaaaataaatttgacaggagagcatgttgaattttaaaagtacaatataaaaatgtgttgatagtaatcagaatctttgcagttggatataaaagggtcaggttttataataatttttctcccgctaatttcagaaaatgtctattcaggtttatgtttttagaaaataaactgcctttgcaagatatacttgtaaccatgaatattcctatatgtaatattgtaaattatatttcggatgacgagatgattgctgggtgtacggataggattgggaatgggtggattaatgataatgaatgggatgaaatatataacataaatttataataagattgaagtcagcaaaggcaattgcgtcatggtaaaagccggtacgattcatgctatcggagctggcatcctgatatgctaaatccagcagaattcaaattgtacttacagaatgtatgattgtgaccgcagggacaagttcggaaataagcgcgagctgcatgtagataaggctcttgatgttgtggatactaaaagatatgtgccatatgaaagcagcattaatgcatatgatgaagctacgaatgaagccgcagcaactattgaggcggactcatcagaaggtcagttattagtaagctgcaaatattttgaatgttataaatatgatatatccgattcagtatctattaatgttgatacagcttctttccgctctgtgatatttacggaaggatgtggaactatacgcgtaggagaagatgttaaggcatataaagtgggtgatagtttctatataactgcaggtaataaaactgtggaaatagagggaaactgtgttgctattgttacgaaggtctgattgagatgcaggtatgtatttgtctagttctagttttgttatggacacaaaataatgcatgaatttttaattaaatatatgtgaaattgacctccgttggtgaagcatttgctttgctggcggagtttttttgatattctggaatgtggtttgtgattggagcagataattcaggtagagaattgcaatattgattgataaacggattataatatgttaatatttaggcaagtcggattgtgaaaataattgtttggattaattcaaagatacatagggtaaggagtaatgtactatgggtaaggttgggttaattcaagttgtaaaacgaagtccccttggggactgggatatttgatgggagagaggttgatgaggcctctcttgaagtgttgctattattaaatataaaattattgaaagagtaaaaaaattatatattaaatatgattatataaaaaggagaatttatggcttttaagacacgaaaaaaagaagagttttcatattcatcacctcaagagatgtatcaagataataaactaaaaaaaataatgggaccattagattatcaagcagtaatgctggataagtatatagaaaattatgatgaaaagacgttggcattagaattaccgacgggaagtggtaaaactttagtgggattattaataggcgaatacagaagacgtaaaaataaagaaaaggtggtgtttttatgtcctaccaatcaattagttaatcaagtggttgaacaatcaaatttaaaatatggattaaaagcaattgctttctgtggaaaacaaaaggaatattcgccaaaagataagagtagttttctaatggcagaagctattggggttacaacatatagttcgttttttgcattacattctttttttgaggatgtagatgtcataataatggatgatgtgcattcttgtgaagattatattatgtcaaattggactattcagattgatggtcaaggtacaacttttattgaaatagctgaattattaaaaccatttattagcgaaacagattataagtatttattagaggatgaatatattccagaagttgcatcatggtgtaatatgttgcctatgcctttaatattaaataaactagatgaacttcaatcaattttgcaacaaggcatagaaggtggttcttcaaattattatgcatatttgagaatgtctgaaaacttgaaagagtgtaatatatatattgcaaatagaaaaattcttatacgtccttggatagcaccaactatgtcctttaaaccatttgtagatgcaaaacaaagaatattgatgtctgcaacactaggaagaagtggtgaattagaaagaattacaggtattgaaaaaatctttcgtttgccaatagtaaatgattgggacaaaaaaggattgggaagaaaattttttgtttttccggatttatcattgggaaaagatgaacagtagaatataattgcagcacttcaaaatttgtgtaaaaaaagtgtctttctggttcccgattctcaatcggtagatgctattaaacaattttatgaagataatttaaacgacacaaaagtttttgatgcaaaggatatagaagaatctaaacaatcatttgtagatagccctgctgcaacagttattttagcaaatcgttttgatggtatagatttttctgatgatgagagtagattgctatttatttggaatttacctaaaacgactaatttacaggaaaagtttttaattactagaatgggagcttcaaaactatatgcagaaagaatacgaacgaggataattcaggctgtgggtagatgctcaagaaatcctagtgattattctattgtttgtgtaataggggatacaattcagaatgatttaactaaaaaggaaaaaattaagcaatttgcgccagaactgagagcagaaattcaatttggtttggaaaattctatggattattcaaatgtgaatgatgtgttggaacaagctgaagattttttgaatagaactgcagtgtggcaaagagcggaagaggatatagtacaattaagaaatgaatattggaacgaagaaaataatgcagaagagcagataaatcaaaagctacatcaatcggcaattcttgaattgaaatttcaatattcgttatggaaaaaagattataaatcagcatatgaatatgctaataatattgttcaaaatttaaatgcacctgcgctaaatggatataaatgtttttggaattatatgacgggatgtatggcgtattacttatttaaagatggacaagcagagtataagacatcaggcatacagtgtttatcggatgcagtaaaagaaaatatgggaataagatggttgcctggcttatcgggaaaattgttttttgctaaaagtgaagatgttaaagatacagattttttcgttgattgcattgaaaagatagaaagtatttttacattattgccaacattgcaaaaaacagagaaaaaaattgaaagtattttaagggatttaaattcgtccaatggaaatgaatttgaaagaggtcataaaggattaggagaattgttgggatttatctcagaaaatcctaatagtacaggtgcccctgatccatattggataattaatgaaaataatttagtcgtttcagaagataaaatttatgaggaaaaagaacaggtaaaaaaagtaccgatatctgatgttagcgaggctggaagacataaagcatggattgttgaacacgagaaaagaataacgaaaggcgctaatgtatatacaattctaattactaactcggatgggattgatgatgaggctcgtatatatgctgatgatatatattatgtgaatagaaaagaatatgttgactgggcagttaaagcacttacagtcattcgaagcgtatggaacacgttttcaggtgaaggggagagcgaatggagagaagcggttcacaaagaatttataatagcaggaataactcctaaagattatttgaattttgtatgtaataagaagcttaaagacatataaatatttgtcgcttattgttttatttggaacttggctgagttgcataaagttaaaatttgaaaccaaaggatttgttaaaaacattgagcttgatggaggcgctgtgatgaacagtctgattgtaacttatatgtgggttcagatggaatgtcctacgggtgtatgtggggttcgtagccagatgcttatatgaaatcaaacagacgagagaataataaaacgtaaataaacgaaaatacacctagagttttaacctctgaaccccaccaatagattattataaaaagtccgagacatatcccggactttttgtcgactagtgtatgatcttgtggctggcgaaccatttcgatgagtctttagattccagagccggtaatgagtccttatagggctagaacaaaccaccggttaagccgttggttctgattgttctttgggagattttatggctaaggtattgaagatttatgatgaacaaatagcacttttgaattgaaactaatattaaaaatctatgaaactctaataaattaataactaatttaatatttgatattcaatgtcagataagaagtcgggtttcagattcatgcatatctcattatttaaaggcacatgaatatattccattatggggcttaatattatattaacattaggaacaatcagcaatttttataaagttatgaatcaaaaagaaaaacaggagacatcaaaaatatttaaaatacaagataatgaacttgaaaatattttgatgaaatatatattgcaaagtaaacacaaaggagtcatatacgtctaaacaaaaagataaaaagatagttttttcggaagaaatagatagcagcattaatggtattgcattgggaacagcatttgttatgctatctatatttgttgtttattttaagatatttaatactacaatatagcagaaaaatttatagcagttattcttttgggattgggaatagctggaactttaactgaaatagggcggataaagaaggcagatatgaaagggctggatgatttaattgtagggttattattaacagttgtttctgttgttgttattttaaagtttcgaaatgtagcattaaatattggtttatttatagtactgttactaggttcgtatggaatgattagaggaatattagaaattctctattcattaaagcttcaaagaagaaagagtaataatgttaaaatagaaattatgaagattgttgtagctgtaactgaattcatttcattaatagttgtgattttacaacttgtaaaggaattagtatagataaacaagttaatctgtatttacaatttgtcaagaatttattatgaagatgctgaatatataaatactgatgatattgttttgttagagaggttctattttaaataaattattattttgagtacatgtaattaggaaaatgatgaatttttatattgaaaataaaaacacaaaatacgttgataaataaaaaaaacaatgatatattatatttgtatgagaaataaaaacgagtaatgtgtttataaatttggaggtagacatgaaacttcttcgtattacagcggaaggattgccgttatttaaagaaaaactggacttatcattttacgcacagcagagagtgtctgaagagcaaaagaatattctatatccattattttcaaatatttatgtaaattctgcaacaggctttattggcattaatgcgtctggaaagacctctgtcttaaaggttattttacttgcattggaaatactcaataatgagccaattaatcatattgaatctcgagatatattgggaaactcaagccagattaaattaaatatgtttttttattcaagtaatacaaaagaagtatgccgattggaaacaataattattgctcagaagaataaatcagaaggaataaggtatagcatcggttcagagtcattgtggacaaaatctgcggatgaggttattacccgtaaggcaatgcttaattttgaaggaagagagcctataatggttagaagcagccaggaggattttttatcagatgatgtaagtattatgattgcgaggaataaaaagactaaggataatatgcgtattgttaatcttctgaaatacacaaatgaaaacgttttgcggatttctgaagatattccagttgaagttatcacttttttggatccgacaattgaaaaattacactttgatgaaaatgacaataagatattaattcatttgcaattcagaggcaaagaggaaattcttttaaataatccggcagagcttaacaattatctttcatcaggcactgtgaaaggaatgattatttttacattggcaaaagaagtactacagagcggtggttatattgtagtggatgaagtagaaaatcattttaataaagaaattgtaacaacattgttgcgtttttttatggatagcaagctgaatagaaatggtggaactcttattttctctacacattatcctgaattattggatgaatacgagcgcaatgatggtatatttattaccagaaatagaaatggcattacagtagagaatctttcaaacatactgaaaagaaatgatatcaagaagagtgatgcataccagagtggatttcttgagggaacaactccgacatatgaggcttatatgcagttaaagaagagtattgcctcaacacttgggtag

SEQ ID NO: 362 - DNA, 17683 bp, unidentified
  source 1..17683: mol_type = unassigned DNA
atgaaagtagtaatcctggctggcggccttggcacgcgcatcagcgaagaaagcatctataaacccaagccgatgatcgagatcggcaacatgcccattctgtggcatatcatgaaggaatattcctactacggtttccacgactttgtcatctgcgcgggctacaagcagcacatgatcaaggagtggttcgcggattacttcctgcataccagcgatattacgtttgatttcacccgcggccagaacgagatgatcgtccacaaccaccacaccgagccgtggaaggtcactgttgtggacaccggcctcaacacgatgaccggcgggcgcatcaaacgcatccgtccctatatcggcaatgagaccttcatgatgacctacggcgacggcgtctgtgatgtggacattgccaagctggtggcgttccaccgtgaaaacggcaaggtcgccacgctgaccgccgtccagcaggagcagcagaagggcgttctggatattgccgaggataattccgtctgttctttccgtgaaaagaaggccagcgacggcgcgctcatcaacgcgggctatatggtgctggagccgcagatcttcgactatctggacggcgacgcctgcgtctttgagcagaagccgctgcagaagctggctgaggagggtcagctgatgagctatatccacaagggcttctggcagtgcatggacaccgcccgcgagaagcaggtcctggagaaaatgcttgccaccggcaacgcgccctggaagaagtgggaggattgatgatggtacattacgatcctgaattttaccgcggcaagcgggtgttcgtcaccggtcacaccggcttcaagggcagctggctctgcaagatgctgctgatggccggggccgaggtcacgggctacagcctgcagccgccgacgcagccgaaccttttctccatcgccggcgtcgaggacaagatgcacagcgtcatcggcgacatccgcgactttgacgcgctgaaggccgcttttgacgcggcgcagcccgacattgtgctgcacctggccgcgcagcccatcgtgcgcgacagctacaaggacccgcgctacacctatgagacgaacgttatgggtacggtcaacctgctggaatgtgtgcggctggcccagcagcagggcagagcgccccgctcggtgttgaacgtcaccaccgacaaggtctaccacaacaacgagtgggcctggggctaccgcgagaacgagccgctggacggtttcgacccctactccaacagcaagagctgctcggagttggcgacgcactcctacatcaacagcttttttgccgataagaccgtggctgtctcgacggcccgcgcgggcaatgtcattggcggcggcgactttgccaatgaccgcatcatccccgactgcgtccgcgccatggccgcgggccgtaagatcggcgtgcgcaacccctactcgacccgcccgtaccagcatgtgctggagccgctggcggcctacctgctgatcgcccagcgccagtacgaggacaaccgctttgcgggctactataatgtaggccccgacgactgcgactgcgtcaccaccggcacgctggtggatctgttctgccgggcctggggcggcgacgccgcctgggagaatcaggccgaggccaatgccccgcacgaggccaacttcctgaagctggactgcagcaagctgaaaacaaccttcggctggacgccgcgctggcacatggccgagtgcatggaaaagaccgtcgccttcagcaagatctggcttgccaacggcgacgtcccggcggagatggaaaaggaaatcaatatttttttggaggagcaataattatgtggaagaacgaggcagaagcccgcgagcagatcaaggcgatggtcgccgagtattatcacgacttcaaggagaaaaagaccccctatcaggaggggaatcgcatcacctacgcagcccgcgtctttgacgagaaggagatgtgcgctctgaccgatgccacactggacttctggctgacaacaggccgctttgccgaccagttcgagaaggagttcgctaagtggatcggcgttaagttcgcccatctggtcaacagcggttcctccgccaacctgatcgccttcatggcgctgaccgcccccgagttgggtgaccgccagatcaggaagggcgacgagatcatcaccgtggcctgcggcttccccaccaccgtgaccccggccatccagtacggcgctgtgcccgtgtttgtggacgtgaccgtgccccagtacaacatcgacgtcaccaagctcgaggccgccctctcccccaagacgaaggctgtcatgatcgcccacacgctgggcaacccgtttgacctgtccgccgtcaaggcgttctgtgacgcccacaacctgtggttggtcgaggacaactgcgacgcgctgggcacccagtacaccatcaacggcgagacccgttttaccggtacctggggcgacatcggcacgtccagcttctacccgccgcaccacatgacaatgggcgagggcggctgcgtttacaccaacaacccgctgctgaaccgcctgatcctctccttccgcgactggggccgcgactgcatctgcccctccggccaggataacttctgcggccaccgctttgacggtcagttcggcgagctgcccaagggctacgaccacaagtacgtctacagccactttggctataacctcaaggtcaccgacatgcaggccgccatcggctgcgagcagctgaagaagttcccctcttttattgagcgccgccgccacaactggaaccgtctgcgcgccgcgctggagcccgccgccgacaagctgatcctgccggaaccggctgccaacagccgcccgtcctggttcggcttcctgatctctgtcaagccggagagcggtctggaccgcaacgccgtgacccgctatgtggagagccacaacgtgcagacccgtctgctgttcagcggcaacctcatcaagcacccctgctttgaccagatccgcggcaccgacgcctaccgcgtggcgggcgagctgaccaacaccgactttatcatgaacaacaccttctgggtcggcgtttaccccggcatgaccgacgagatgatcgactacatggccaagacgattatcgaggctgtgaatcagtaaaattttgacaacgaggtacagacccctatgatgcagcaaaaggtgaaaacgacccgcgcacccagactgcggttggacaaaaacaggcggctgacgcctatgcagatctactgctgggcaacggtggcctgtctggcggtgctgctgcttgccctgctggccagccgcggtacgctgctgcatcgattcttcttttatgatgtcaccgataccggtatggactttttccatagtattgagtatatgcgtggacgtatgccctacggacagttcgatacgctgtacccgccgcttgcaaatttgtttttctatgtgttgtatttgcttgtgccaaagacacaatcagctacgtggacggaatcgtttatctcgtctctcaacatgaagggaacagaacgggatttgcgtttgcagcaagcgacgatgatgctgtttatcgtctttgttatcgtggtggtcttaggaattgtatcgatgacagaacgcctgacgcgcagctgcggggggcggaaaaagctgctggcattctgtgcagtgttcagctatggggtactgtacggcttggaacgcggcaatattctgctgctgtgctggccgttaatggcattttttatcctgtaccgcaattcagaaaaaccacttttgcgggagttggcctgtctggcactggcgattgccgccggtttcaagctgtacccggcgtttctgggcgtgctgctgctgcgcgataaaaactatctggccgcggtgcgcacggtgctgtacggtgttgtctgcctgtgcttcccgctgttcttcttcaatgaaggattgtttggcctcacactgtggttccgtgtactgtttgattttagcggcagcagaggtgaaccgtggatcggcaacggtttctccaacattttggcagaggccggacatgcggtggacaagctgctgggcacgcagctgggctatggcagctacgcactgctgggcattgtgctggcagcggtgctgctggtgtgcagcttttttatggataaggagtggaaacgcatcacagcaatcattctggcgatgctgatgttccagtcccagtatgattatgtatggtgcctgtttttgattccgctgttcctgtttatggagcaggagcgtgagctgcgcagtgacaacgtgctgccctatctggccttgatggtgccggtgctgccgctgccgctgttccggcgggaccagatggagccgtcctttgtaccgcgcaacacgatttgtcatgtcatgctgctgctgctcattgtctggtgctttgtccaggcagtgcagggggtgcgtgtacgctgtgcggaaaagccggtcaagccggcacacggacacccggcggccacggtgctgctggccgtttgtgtggcggtggccggcgtgggaggccagcagctgtggcagcgcacccacaactggggctttgactatggctacaacggccgactggatgccgaggacatccagcagaaggacgtacaggatagcgacggcaacccgatagaggcaacatggagcggccgcggtgcgtatattatgatttacaaccacgcgccatttacgcaaaggatggtggtcacgttccagacaggctacggcatggatttgaagcgcgcctatacgatgacgtttgaagcaccgaatctggaagatgctgatggtacaaccgggaagcagaagcagacggatattaagattgaccatgaggggcagaccgtgtgctacacggtagatgtggttcccggccagacccaaatcgatgtgagctatgacggcccgatggcagtctatgatgcttcttcgcgcaaaaacggcaccttcacggtgacaaacctggcggtcaccagtgagggcgctgtggaggaaaccgaataacggaaggaaacatatactatgcagaaattgctggccctgctgggcgcaaaaaataaagaggaatttgtggagctgttcaagcagttcatcaagttcggcctggtgggcgtaagcaacacggctgtgtccatggcggtctactatatcttcctgtggatcagcccggacctgtatatggtcggcagcatcctgggcacgattctgagcattgccaacgcctttttctggaatgacaagtttgtctttaccggcaacgccaatgactggcgcagcaagctcaagcggctgggcaagacctatgtcagttacggcggcacatcgattttgtccaacgtgctgctctggattgaagtaactttctttgcagtcagcaaatctattgcaccgattgtaaacctgttggtgacaattccattgaattttatcatcaataagctgtggacatttaaggaaaagtaagaaagatgcgactttcagtttgaaaaggatgaaaaatgataaaacgcttgaattgtacgggtaaaagatattatatatttatggttctgactattgcagttgcaatattttatgttgcgctgatgtgtaacaaaacaatgcctttcgcggagggatggtatacatattatgcgcaacttataaacgaaaaaggtttgctgccttacaaagattttgaatatcttttttcgccgctctacatttattttattgcgtttgtcacgcgctttttcggatatgatattttgacactgcggtgtgttggcatcctaatgtttgcaataatcgccttaggggtatatttgtttattacagaaattgttggaagaaaaaaggcgtggattgctgcaattacttccgttacagcggttatgtatctacagtcagaagcagttcagattttttatgactacatccgacttatggatatttttgctgtttttaccgttttattcttgattcgcgctgtcaaagcaatgcagcacagcgaaaatcaaggcgtaaaagtaaatctttttctttgtggccttttcaattccctcttcataaatgtaaaacaaaatgttggattgattttttgggcatatacaatagttctaattatttacttaggcgtgtattttcaacagtccataaaagcaattgtaaaaaatttaatgcaatttttattgcctattgtagcagtaacaggtgcaatttatttgttgctggccgtaactgggggattgaaaggatatttgtccatgacgggcggaggcgcaattagcgcaaaaggcggtatgattgcaattctctttaactgggtgcccaataactggaacttattccaaaatgcgatgccggaggccagtgttgttttacttgttgtagtggctttgatggtggcccttgccatagcagaacataaaaacaaggtggcacgacatgatgcaaatggcgcatggagtaagattgcggatatacacggggggggtacctgctggcaataggattgctattggttatggctgttcgccacaaagacatggcagtggcaatttcggattggaagtcagtaacaccgtatttcttttttgagattgtatttccggcttttttgttgtttggtttttggtttctctataatatcattaaaaaacagcaaaacgcagagacatttttgctgtggtttacactggcaggctcttatgtggcaatatcttggggctgtggaaattccggtggattagcagagggacaggcaacaacaggagtggcatttgttgttgcatttattctgtatggactaagctatcagtggcttcagatattacaggtggtagcggtagtcgcttgcatcgtcttaacgattcaatcttgcaccaaaaagatggtgaatacctataattggtggggagcagatgaagcagatttttgggcaagtgagaacaatataggagatgttccgctgctgagcaaaattcgggcatctacagatacaaaggctgtgtatgaggaaatctgcaaggaaataacagagggagtgcaggaagatgaaactatctactgcttcccgcaaattcccatattttatagtttatgtgaccgctgggatccgggggtacgctctaaagtagaatggtttgatgtgtctacggatgaagcagtagaagcagacattgatattctaaaagaatcaccacccaaggcaatccttatgtacaatgtgggtgatgatgtctatgaggcccatgaaagcgcatttcgcaaggggcaagcatccggaaccagaaagatgagagactttttgtatgattttgcgtatgctaatgggtatgaatttatcggcaattacactacaggaaataatgaacttacactttggattcagaaagacaatcgtaatgtgaatctgattgatgcgtttgatggtggtgatggcacaattgataacccctataaattacatactgctgaacaattgcgcttgtttagtaagatggtaaatgaggggagaacttttggcggtcaatatatcgaacaaacagcggacatagacctcgccaatcaagattttacgccaatcggtgaatattccggtaacaactatttctgtggcacatacaatgctgccggccatgtgattcgcaatctaaagattgaaacgaatgataatgcagccttatttggacgacttggcggtaaagtatataatctgggaatagaaggtggaaatatcacaggcgcttatatcggtggaattgcaagccatgccgttaaagatacagcagcaataattaactgctatacagatatttctatggatggaatacgtgcaggcggtatcgccgataattttgtaggaactgtcggaaattgctttagcgtagggttgatacatggtacggatagtgcagatgtattgagctttaaccaatataaagaggtacaaagcgtttattccgttaaggaaaaaaatagtcaggacttcgatacacaaagtacagatgatgtcagaattacatattgtacggaagaaacaatgaaaaatggaatgttggcacaacgattgaatgattctatttattcgataggtacagaactacaaaagagcgatggtactgaagataatgaccaagaaacaacaattgagttggtacggtggaaacagggaacggatggacatccggttttcgatgtgccatcgtaattgaagcagacaaataagaaaggcagacaatcaaatgaaacagcgtttagcggattatgtggcggactttctggcggcgcgcggtgtgacggatgttttctccgtcgtgggcggcggcgctatgcacctgaacgatgcgctgggccataacccccggctgcatgtgacctacaaccaccatgagcaggcctgcgccattgcggcggaagcctacgcccggctggaaaataagatcgcggcggtctgcgtgaccaccggccccggcggcaccaacgcgctgaccggcgtcgtgggcggctggctggactccatcccaatgttcatcgtctccggccaggtgcgctatgacaccacggcccggtacgccttgcagtacaccggcacgccgctgcgcgccatgggcgaccaggagtacgacatcaccaagtccgtccagtacatgacgaagttcgccgccatgctggaggaccccaaggacattcgctacctgctggaaaaggcgtggcatctggctacaacgggccgccccggcccggtctggctggacatcccggtcaacttccagggcggctacatcgagactgacgagctgcgcggctatgaccccgccgaggatgacgcccagctgcccccgtcggtggacgacgccacgatccggacgattctggaaaaaatcaagaacgccaaacggccagtgttccacgcgggctatggcatccgcctgtccggcgggtatgcggcgttccgctccgtggcggaaaagctcaacatccccatcgtcacctactggaacgccgtggacctcatcgaggatgacaatccgctgtactgcgggcgcgccggcaacatgggtgaccgcccgggcaactgggctatccaaaacgcagacttgattctggccgtaggcacgcgcatttctattcgccaggtcggctacaactggaagacctgggcccgcgcggcagaggtcatcatggtggacattgaccaggccgagctgaaaaagccgaccctgcacgtcgaaatgccggtctgggccgacgcgaaggactttttgaccaagctggataaggtcgccgcggcccccgtgaacgcgggcggcgagtggctggccacctgccagcgctggaaacgcgactaccccgccgtgttgccccgccagtgggaggaaaacggcgagaccgccaacgtctacgcctttgtgcgctatttaagcagtcgcctgccggagaacagcctgaccgcggtctccaacggtgcgtgctgtgtcgtcggtaaccaggcgtatgtcatccagaagggcagccggatggcaaacaacagcgccattgccagcatgggctacggtctgcccgcagccattggcacctgcatcggcggcggacgccgccagacgatctgcctcgagggcgacggctccatcatgatgaacctgcaggaactgcagaccattctgacgaacaagctgcctatcaaaatcttcctcatcaacaacaacggttaccactctatccgcctgacgcagaacaaccttttcaaggagcactgcaaggtcggcatcggccccgagagcggtgacctgtccttcccggagtttgaaaagattgcaaaggcgtttggctacccctactacagcgcccacagcaacgccgagatgaagcaggctgtggacacggtgctggcactggacggcccggctttctgcgagattttcaccgacaccaagcaggtctgggagcccaagagcagcaccaagcgcctgcccgacggcacgctggtcagccccccgctggaggacctggcccccttcctgccgcgtgaggagctggaaaagcagatgttcatcccgctgatgccggaagtgtaagggagtgcgtgattcaaaaatggcaagcattcaaagacaaatccacaccgccatcatcaccggccctacgggggcaatcggaatggcgctgtgtgcaaagctgctggcggagggcgtgacggtttacgcggtcacccacccgggcagtgcgcgggcggcgctgctgccgcaggacgcgcggctgcatgtggtgccctgcgatgcggcggagttggccgcgctgccggagctgatcccggaaaaggccgatgcgttcttccactttgcgtgggcgcatacgatcggcccgggccgcaacgacatgccggcgcagatcgagaacatccgctacaccattgcggcctgccgcgccgcggcgcagctgggctgccaggtctttatcggggctggcagccaggccgagtatggccgcgtggagggtgtgctgaccgcgcagaccccctgcttcccggaaaacggctacggcatggccaagctgtgcgccggccagatgagccgcgtcgagtgccagaggctgggcgtggcccacatctggacgcgcattttgagcgtctacggcccgcacgacggtccggccacgatgatcagcggcaccatccgtaagctgctgcacggcgagaagcccgctctgaccgcgggcatccagcagtgggactacctgtacgccgccgacgcggcagctgcgttctacgcgctggccgtcagcggacaggacggcagagtctacccgctgggcagcggcacggcccgcccgctgaaggactatatcgaggcgctgcgcgacgccatcgacccggcgctgccgctgggcttgggggaggtcccctacggcccgctgcaggtcatgcacctgcaggcggacacgtcggccttacaggaggacaccggctggcggcccgcgaccccgtttgaagaaggaatccgcgaaaccattgagtgggtaaggaaagagacaaaatgagtgagaaaaagacgatttcggtaatgatcccctgctacaacgaggagcagaacgcccgccccatctatgaggctgtgcgcgatgagctggtcaagagctgcccgaactacgactatgagattttgttcatcgacaataagagcgaggacggaacccgtgccatcatccggcagatctgcgccgaggacaagcacgtcaaggccatcttcaacgtcaagaacttcggccagttcaacagcccgtactacggcatgatccacacctccggcgattgcacgatcacgatgtgcgccgacttccaggaccctgtggagatgatccccaggtttgtggccgagtgggaaaagggctacaaaatcgtcattggccgcaagacccagagcaaggaaaacccggtcatgtactggctgcgcggctgctactacaagctcatcaagaagatgagcagctgcgagcagatcgagcagttcactggctttggcctgtacgacaagagctttatccagacgctgcgcaacctgaaggatccgacacccttcatccgcggcattgtggccgagctgggccccgagcgcaaggaaatcgagtacacccagccccagcgccgcgcgggcaagacccacaacaactggtacagcctgtacgacgccgccatgctgagctttaccagctacaccaaggccggtatgcgcattgcaacgttcgcgggcttcctggtggcggggctgagctttctggtcggcctgttctatctgattgccaagctgctgttctggcagagcttccgcgccgggtacgcgccgacgatgatcgccatcttctttatgggcggtattcagctggcgttcctgggctttttgggtgagtacgtcatggctatgaacacccgcatcatgaaccgcccgctcgttgtggaggaagaacgcctcaactttgggccggacgaccagtgaccggcatgaagcaggagtttggttatttcctgaaaaacgcgaaattccgcgcggcgctggggctgaccctgctgctcagctacggctatgccatcgccacgacacgggtcagcattgactcgctggaaggggaccgctacatcggcacgggcggcgtcatgctgtccaccggccggttcggcatgaacctctgggccgcggtgctgggctacggcagggccgagccgagctatgcctttggcattgacctgctggcggcgctgctgctggcgctggcggcggtgagcttctgtgcgctgctgcgcaaggccgcgcaggatcgcatcagcatgttcggctatgggctgtttgcctgcctgtttgtctcctacccgctgatgaacgaaatttgggagtacagcggcgcgaatgtctgcgtctgcggcggctatttgctggacgccgctgcgctgaatctgctgtgggacgcgcgccagcccggcgtgccgtggcgcggcagggctctgcgcatgtgcgcggcggcgctctgcctgatggtggtctgttcgtcttatgagtcactggcggcggtgtttgtgctggctgtctttgcgcttttaacgctggagcagctactggccgccgagcgcccgcggcttgcggcagtcctgaccgagggactgtggtacgcggcggcgctggtcggcggtctctgcctgcgcgtgctggtgacgtcgggcatccatcttgtgctgccgcaggctgcggccaacggcgccaccgaaattttgtgggcgttctacccatttgtctatcttgcaaagctgcttgtcaagggcattctgattaactacgcactgcgcggctgtttctacctgcccattgctgaattggcggtggcggcgcttgtatttatcgtactggttatcgcgcttgctgtgcgcaaaaagcggcctttgctgctgctcaccggcgcggggacgctgttctcactggtgctgctgtcgtttgtgcaggggcggtactcgccctaccgcacctgtcaggtgtttgcgctgtttgtggcgctggcggggctggccgtgtatgagctgctgcgccgcgctgcggcccggcgggctgtgctgctgggcagcgtgcagctgctggcggtgctgctctgtctgcaccaggccatgtacctgaaccatctgctggccgtcgattaccagcgctccgagcaggaggccgccgtggtgcgcactctgggcaccgagcttgtgcgcgactacggcaccgataagcccgtggtgctggtgggccgttacacgctgggggagaatatcacccggtacacgacggctgacccgatgcagcacccgctgtaccgcttcttccgtgagcacacgagctgggagagcggcgacaccgtcaagtacgtcgagaccaactgcaactcggtgctgaactggtcggtcacggccttctccgaggtggacgacgtctacggccaggcagcggagcacctgttccgctactatggctttgctttggacatgacccacagcgctgccctgcatgagcaggcgcagacctacgccgacgcccaccacctgccgggatacccccgggcgggggcgattgtcgattgcggggactatgtgctggtaaatctgcaataagaataccgcggaaaagtttgcgcttctccgcggtttttactttctttctgtattttgccgatgttttcagccggtcacggtctcaaagggcttcgtcaggtgcccgttcctgtcggcctcgcaggtgcggcgggcctacttcaaatactccaccaaaaacgccactgtcgtctcccgcagcgctttgtccagcgcggcggcggtggcggtgtcctcggatagatagttgtggttcccctcggcaaacggctccagcacgaccctgccgtcgggcaggctctcgacggcggctatcgtctcggcctgggtcgtgtcgctcaaaatgccctcatggccggtgtaggtcaaaagtgtcggcagggcgctctcccgcagggcggcgttcgggtcggaatcgcgcatctcggtgaacagcgttccgctgacatcgacgccccaggtgctgatgctgccgctcgcctcggcctcagcggccagcgcttccacggcggaaaagtcgtcgatgttcaaaaactccatgccgcgcaggcccgcgccgttggcggggctccacagcgccagcgccgtgatgccgcccctgcgctgcgggtagaggctggccagccgtccgcccatgctgtggcccaccagcgctgtgcggcctgtgccgtaggtctgctgcatgtaggtgatggcgctctcgacgtcgtcggtcatgttggacagcgtgtaggccgtgaacggctcggtgctgttgccgcagccgggaaaatccagccgcaccgtcgcaatgccctgggcggccagatcggcggccagcggcgcaaagtggccgtcgccgctgcggctgccggtaaagccgtggcagagcacgacgagcggcagctcctccccgcgggccagcttgccgggcagctgtaccgtggcgtaaatgtccccgcgcgtaccgggtatggtgacgtcctgcgctttcggtgcgggcgtcagcagaaagagcgatgccgccacgcagagcgccagcgcggcaatgcagcctgcaagggtataaaaagcgcgtttatacgtttgtttgtgcatagaattacctccgtaatgcctctattaaagcctatgcggggcaaaaagtcaagacgcacagaatacacacaaaaaaacaggtgacaaacccggggcggatgtggtatactaaaaattacaaattggttaaaaagtcagacccggggcgcaggcgcagccttgccccggcttttgtcctgttttaccggaggtgcttgactacgaattctatagcgaaccgtatgccccgcctgctggctatgctgtttgtgctgctggggctgttctgcgcggcggcactgcctgcccatgcggaggactacgacacggtgatggaccgcctgtcccgcctgcaggcgctggcgcgggattactcggccagtcaggccgacacgcccgacccgatcgagctgacgctggcctacacccgcacgggggagtacaacaccacgatctggcagctgaccgccggtgtgcgcgacgccgggtttgagagctacgtcaacagcagtgaccccgatctggcgtcgctgcagaatatgaacaccgtcgtcctgcccaacggagagagcatcgactttgggcacctgctggcgtcgatgaaccttgtctacaacggcatacccatcacgggcagctggggcggcgactgtgaggagctggccaggcagtattacggccaggccggcgatgccgcgggctacgccgaggcgatgcgcgcttcctttaatatggacgatgacggcacgctgagccgcttcagcaacggggacctgcgggcggacctcgactccgtcgtcgtcggctccaaggtgacaaaggacaccgacctggccgaggcgctgcgcagctactacgcgaatctgaccgagtatgaccgcgtcaaggagttcatctcactgagcttcggcacggtggatacctcgagcacggcctttgcggacgccgtgtacagcgctctgctggaggattccggtatgcagctgctgttctacatgaacggtatgtggaccgtcaagggctggcagatcaaggacgactacgcccccgccgtgcgcggcgcaacagacctgtttgccgagtacctggccaacgcggtcaatcacgagaagatcaagagcgagacgaatgaccgtctggttgccatgggcgggcaggcactggccgacgcgctggaggcgttgggcgacaccgacgccgcccaggccgcactgaccgccgccgaggagatggccaataacgcccaatcgacggtttcctccggttcggatgtggtctccgccgcgcgggagaatttgcagacaaattttaacgtgaaggtattccagctgattttactgattgcggcagggctggcagcgttcatgctggtgttcagcatggtgatgtttgtggtgcaccgaaaagaaaattgagtttggactacgtgccgctctcttgtgggaaagagagcggcacgcttttttggttgggcgcggggcaggcgggcagaccgctttttctgttcacaccccgttcacattccgtatattcatcccgagttatccacggcgtataacggttatccaccgtggaaatgttgaaaactccgtggaaagcgtggaaaactctgccgcccggacccgttcaaaagcggaaaaccgggaaaatctacgtagaaaaaacgtttattttccacattttcaacagcggcactgttgaaaactgtggaaagccgggggaaaacgcgaattgcgctttttgcaacacaaaatacacattttgtaaataagggcttgcactcgccgcgcgacagcgctataataaacctaatcatcacccgcactgctgtgcggcggtgcgcttgagtataaaagggagagtgtgaaattatgttggacattaaaatcaccaaaacgacccatccgaaggaaaagccgcaggacgagtcgaagctcggcttcggcaagcagttcagcgaccacatgttcctgatggactataccgcgggcgagggctggcatgacgcccgcatcgtcccctatggcccgtgggagatggatccggctaccaccgtgttccactacgcacaggaaatttttgagggtatgaaggcctaccgcaccgcggacggcaagatccagctgttccgccccgactgcaacgcgaaccgtttcaacgattccgcggaccgtctcggcatgccccccatcccgccggaggacttcgtgcaggctgtcaaggcgctggtcgatgtggaccgcgactgggtgccccactccgacggtgcgtccctgtacatccgcccgttctgcatcgctaccgatgtgggcctgggcgttcatgccgccaagcattaccgctttgccatcatctgcgcgccctccggtgcctactacgccgagggcctcgaccccgtccgcatctatgttgaggatgagtacatccgcgccgccccgggcctgaccggctttacgaagtgcggcggcaactacgccgcgtccatcaaggccggcgagctggctgaggagcgcggcttctcccaggtgctgtggctggacggcgttgagaagaagtacgtcgaggaagtcggttccatgaacatcatgttcaagatcgacggcgagatctacaccgccccctgcgtgggcaccgttctgcccggcgtcacccgccgctccatcatcgagctgctgaaggactggggctacaaggtgcatgaggagcgtgttgccattgccgacatcatgaaggctgccgacgagggcaagctggaggaagtctttggcaccggcacggctgccgttgtctcccctgtcaaggagctggattgggagggcaaggttgcccacatcagcggcggccacatcggtgagctgacccagaagctgtatgacacgctgactggcatccagtggggcaagctgcccgacaccaagggctggatcgttcctgtggaataa

SEQ ID NO: 363 - DNA, 7253 bp, unidentified
  source 1..7253: mol_type = unassigned DNA
atgataaagaatttagctggtagactaaaagaattgcgtattcagaataaattaacacaaaaacaggtttcagagctattaggcatatcaccaagcatcatttccggttatgaaaccggagaacgcacacccagtgcagaaattcttctttctctatcgtatctgtataaatgcagcacagactacttacttgggaaaagtaatgatatgcccgcaattttactagacaccaatggactgacacctagccaaatcaaggccatttctgcactgattgaatctatacgtcaataattcttaaacataaaaataagcgtggagcccgatcattacagactctacgcttattaatttatagttaacaccctcctgttccaagtgatatttcagatattgacatcaaaaatggtccttttgacaatgatggtattagtcatgtttcatttgtggatatagattttgatgaataccgcggtatttgcatgaacgatcgattagaatgccgctctgtaaatttccacaatatcgtcctttctaagcggtacaaacgatccctttgaaccctcgcaggccttctttgccatcacctcaaagttcctgtcgtctgtgattcccacagctcttagatttgcaggaatgcccattgtctcaaagaagaatttcttcaacgcatcaatgcctgcgtgtgcaagtgcatagtcatcatcaccggaaagtccccagacattttttgcaaactccacaaacatcggaagtgtgtcatcatttagtatgtgctccatccacgccggtgtgagtattgcaagtccctctccgtgagtaatatcatagaaagcgctcagctcatgctccataggatgtacgcaccatgccggtgaacagccatcgcccacaacgccgttgattgcatgtgtgcctgcccacatcaggttggctctggcctcgtaattatcaggctgtgcgagagcagccggtccatttttaatcattgtgcgtaacaatccctctgccataaatttctggcagtcagcattctccatagaaaaataattctccattgtatggctcatcatatctgcggttcctgctgcggtctgtttttttgatactgaaaaagtatattcaggatttaatattgacatagttggcaccatatacggtgatcctgttccccacttttcatttttagacatatcagagataacagcaaaaggatccatctctgttcctgttgctgaaagagtaagcacatcaaatatcggaagtgccgccttgacctttgagccatcaagcaccagatcccatgcatcaccgtcataccttgcacctgctgcaacaacctttgagcaatcgattgtactgccgcctcctattgcaagcaccatgtcgataccctcatttttacagatttcaacaccctttctgactgtctcaatctttgggtttggctccactccgctaagctcaaacacggtcagccccgcatccttaaggatcttcattgcggtatcgtagagaccgtttttctttatagagccgcctccgtacactaaaagcaccttgctgccatatgccttgagctctgataagctcgaaatggtatcctttccgaaatgaatttttgttggaatgttaaatgtgaaattgtacatatataatacctcctgctaaataataatattttttaatctctccatatcatctgcatcgggatgcgacaaagccttgtcaaaattttcaatcagcgtatcaatattatccggatgctccgggttttctttcattttcacatagcgctcccgcacagactgtggcattttgccctgacacatatattctcctacaatagtgttgcttgaatcaatggcgcttttaacattgccaagaatcctttgaaaatatgcatcacttcctccaaaaccggctgttccgaacagaaatatctttttatttttcaatttagataagaaatctaatgtatcgctatccgcgtttcccttgtccgtccaaaatccaatgtatagcaattcggattttatcccctgcgcatcagccgtgccaaaataatcacagctctcctttggcaggatttcatgaattttatcagccagcttacgtgtgttgcctgtcatactactgaatattattgaataattttcgttgtacatgcaatatcctcctttaaattaaactaatatttgggcatttacactttaaattcatcttcatgttttttgaagaaattataaaaatatcgtacattatccaaatcactccattttgtaacatcatactctttcgtatcaagattgtatattttagcatttaatgttccaagcataaatggtgaatgcgttgcaataataaactggcattctaacaaccttgccattttattaatttcctctgctaacataacctgattcgcaagtgaaagcgaaacttccggttcatctaacaaatacaatgcatctggttgtaaatactcctcaaaatattgcattgatgtctctccgttagaatatttttcctgtgcaaattttatatattcttcctgcttacacccttctttagatgctaaaaatttttttgcttcaagtaaagacatacctctcttaacgtaatcatactccatgccatctgataatatctgcttttgttgtatcttcttaatctcatacaatatatcttcacttttaatatatcggctattttccggtaatttatttattgtatttccataatcgtcttcccccaaagtatacaagcattctctggaaaacgaaccacagtaatcaacgcttccaaatgaattgcttgttgcatattctttcccttttagttgtaagcaattggctataatatttaagagtgttgatttacctgagccattgttgccataaagtacagtgataggtctaaaaacaaatggttcaatatacttatcccggaatacattgtagggataaatattaggattattcacttttcttttacttaatctaaaactacttaaatatatcatatcttttcattatccctttcctgataaaagagctccaacaccattatttctcgaatatgtgaaaatgaaggattattcactaatacatctggtttagttatgaattggtgagacactgtcacacttttccaaaatcatgtgcagtatttatataactaatttttaagtattttcttattttcaaatgacaaacacattatattaaagattttgatcaatccgattttcctatctgtactcaacgatttcttccaatggtttccttggccttttagccggagcttcatcggcaaagccaaccgcaacaattcctgtcaatcttatcctgcttatattttcttatacttcttctattctcaatttctcgtatcataatttttctctccattaggttcttaatcccaagactctttttaacttcacgaattgaggttgaactaataattaggcattttcacttttaattcatcaaaactcaatttgttagcgttaagtaaagaggcaattcgttgtatgtaaagaattttttatattaggaaatcttcctttgtgatagaacatattactaagtttttacgttctcctgaagcaatatcaattcttctgtttctaagctctccatcaagttgaaagcccagctttttcaataaatttccagaagccaaattacttatattatattttgcttcaagcatatacatatctcttttcatcaaatattctttaataatacactgtaatgcctcaaatgcatatcctttattttgaaaacgttcaccaatcacataccctatctctccaattccaagctgtatgtacggtatatcaatcgttacatatccaatacaattcttactctctttttccaaaataagccatgcatttttatttttcgaccaggcatctacaaatgcttccatctgcttttcttctgccggataaccaagtatatattttccaagctttttatctttcccccatccctcaaagcaggaatgcgtatcttctgctacaaaattccgtattaacaatctatttgtctcaagcatatttatttcctctaaagattttggtcaatcaaaatttataacattccttctgcttttacccgaattgcataaaactcccggaatgtatccggttcttccattattgtttctttcataatctttaatctccgtttgccaactcgtctatccaatacagcaaatatttttacgattaaattttcgcttttaaggctcgtttcaatatcttgattatcaaactctgcaaatgcattataaaaacagcgttggtcaaaaattcccaattttatagctgtatcgtctatatacgcattttctactttcatgcgtttctcgtatttttcgtctttgggaaacatgcctgctttcgaccaattgttccaatagcatcccttgatgatttcttttccatcatatcttatcgctgcccgcccctcatggtcgtgactcctgctatatgttgttgcataatactgaatatgaccttgcagactttgagccagatattccgtttccaacttttttcttataccactccatgttgccattcattattcctcaactgcttttctacttttcatcaacgacctggtagataaaaaatttaagataatacgactccggtacattagcagaattagcccacagtatcggatgatccggtccctgtgtgcggaactccacctgacgcagcctcttgtgagtggcctttgctgcttccttgaccgttttggcaagaagctcctgcgtcatgaagtgagagcatgagcaggtcgccagaaatccaccatccttaacaagcttaagtcccttcatgttaatctcgcggtagccctttatggcatttttggtggcctcacgcgactttgtaaatgccggaggatccagaatgactacatcatatttttcaccatctgcagcgagccgtggcagctcatccagcacatttgcaacgcgaaacttcactgtgtctgagagattatttctcttcgcattttctgtagcctgcttaaccgcatactctgatatatcaagtcctgtgacctcacttgcccccgcaattcctgcattgagggcaaatgtacccatgtgcgtgaagcagtcgagcactcttttccccttgcagatacgctgcatagcaagcctgttatacttctggtctaagaagaagcctgttttctgtccattttccacatcgaccatatagtgaactgcgttttctacgatttccacatttgtgtcaaactctgcgcctataaagccttttaccttaggaagtccttcttttttgcgttcatttgcatcactgcgctcgtatactccacggatatttattccgtccaccgccagcacttcctttaacagttcaactattttcaccttaaactgctccattccaagtgcaagacactccaccacaagcacatcagcgtacttgtccactgtgatacccggcaggaaatcagcctcgccaaatatcacacgacagcagtttaaatcaggtctgccggttgtaccaatgcctgccacacaagcctcacctgcagtgtctgtttcacctgctgcaaacacattgtcattgcctcctgccatcacctgcttgcgataatcccaagcattttgcactctcatcctgaggaaattgtcatcaatcagttggtctgcttttcttgtcatcattctgatacggatttttgaattctggtttatgaagccgcgccccatcggatatccgtcgaaatcgtgcaccacaacaatgtctccgttcgtaaatgtgcctgtgattgtgtctatttcattgtcaaaaatccatgcgccgcctgcttttatagtgcgtccttcgccttttttcagtgttacaattgtatgattttccatatttgttcctcttctaaattacttcattattccttgctaaaatctgattatatagtttatctgaaattctatagcctttagaaataagtttatctgtcgacattccatttcaattatatgaaatcccggcaatatttacaatacacaaatatttctgcaaaacatgccgatatatatattataatataatcgtaactattataacatccgaccggtaaatggagataaatatgattacaattagcttatgcatgatagtaaaaaatgaagaagaggtgctcgaacgatgcctgaacagtctcaaagggctgatggatgaaatcatcatagtggacaccggctcgacggacagcacaaaggagatagctgcacggtatacggacaaaatctatgatttctcatggtgcgacgattttgctgcggccaggaatttttcgttttccaaggctacgcaggaatacatatatgcacctgatgccgacgaggtgctcgacgataccaaccgcaggcgtttcatgatgcttaaggctgcgctgctgccggaaattgagattgtccagatgaaatacattactccaagcaaattcaacacagtgcaaaattcatcctcagagtatcgcccgaagctgttcaagaggcttcgcacgtttacatggattaatccggtgcacgaaacggttcgcttagagcctgtagtctatgacagcgatatctgtatacaacatctgccgcagggcactcacggcaaacgtgattttaccatattcaagcgctcctttgaaagaaacggcaccctgccaaaaagtatagcgactatgtatgccaaggagcttttaaaatgcggaagccccgaggattttaccaatgccctgccatattttcagggtgaataccgcaacagccccgacatcgaatccacctgcgtgctatcacgctactatcgcatgaatggcgactatgacaaatttttttctgttgccctaaaaaatgtagcagttgatggctgcagcgaggtgtgctgtgagctcggtgcgtactatttcgacaaggcagactatgaggaggcaagcctgtggtattacaacgctgcattcgagacaaagccagtactcgatgtggagtgcggcggtggcaaggcgcttcatgccctgtctgagtgctactcaagatgggctgatgagaagcagaaaaagcttgattcgcttcctcctaaatcaaggaatgtatttaaaggcgataaggagctgattgattcactgcgcagccaggcggccgattaccagaagcaggctgaggaatggatgcttccggagggtgactag

SEQ ID NO: 364 - DNA, 19214 bp, unidentified
  source 1..19214: mol_type = unassigned DNA
tcagtcaccttggtcgtattgagagaagttttcttcattttcataataattttcctccgggtgtttttctaagtagtcgagctgttcgtacatttcttcggtgatttcgggtgctgtcgctgcggcaacagcgtccattgtgatagtgacggcgtcacccatatagtcgggcggcattacataaggctcacctcctgcatcgggtgtatattttacattcgggtggtggagcagattatactttttgtcgatgacagggtcctcgcttcgcatcagcagcaggcactcatcgtcacgcatacggcgaatttcatctggcatacacagttcacgaccagcggtttgcaggctgtcgctgctgctgccccggctgcctttgccaatgctttggcttttggtgcgttcggtttccttgccgagaattttggaaagatattcgtaggtaccgtactcgttgccgccgaggtaaagcagggtgtcacagtttccgattatgccttcccaatcgtctttgaacaggctttttagctgggcgatgttctgcaaaataatgtcgcagctgatatttctacttctgcaaacagcaagaatattcttgaaattcttcggtagtgcaacatttgcaaactcgtccatcatcagccgcacatgaaccggcagcgcaccgttgtattccggcgtggaatctgccaaacgaaaaagctggtcgaaaagctgcgtgtagagcatcgtcgcaatgaaattaaaagttgtgtcattgtcgggcaaaacaataaataatgcccgctgctccagccccatacgcggcaggaacatttcatcgcgcgaagtcatttctgcaaacttgcgggagttgaacatgtacaagtttgccgctgccgaaatcaaaatggattgcagcgtctttttcgcacccaacataaaagacttgaattgcaggacagcggggtgctgcgggtcgcggcgctccagttctccaaacagcatcatcaaggggttctcgaccatttcattttcgctgacttggcaattcagaatcatatacatcaatgtggaaaaattctgctcactggcaggggcttcgtacatgagatagagaatcagtgcggagatcagcagcacagaagaatcatcccaaaacttatcaccgctgctgggggcatccttgggtttggtgttgttgacaatggcgaacgccagcttgatggcgtcctcatcggtttcgagataggccatcggattgtaatggccttgaaaatgcacaaggtcaagcactgtcacgctgatacctttcgtttccatgattctgccgagggtgcgtgtcaactcccctttggggtccagaaaaagataagagccaatcagttgcagcgcgttgggcttcacataaaagcgtgtcttgccgctgccagatccgccgattacgataatgttgagattatgtttatgcgcgtggctgtcggtgctgaagcgtacattctcggtcaagatgtaattttctttggagtctttggtgttgcggtacttgatgtttagtctgtgggcgctgccccacttggccgtaccatgttccgcgccggggtggcggtctgcttggtcgagcatatagcagtagacggccaacggataaagcaccagcaccgccagcagaaattttggagtgctggcgcaccagcgcagcatggatggggtgttcagaatttcggacaacactgcggtaatttttgccagtccctgtgcctgttcagttgcctgtgccagcgctgcggcagtaaacagcagcggtatcagcaacagcccgtacagaataatttctgtgcggcggtctttattcggacgcatggattaacgggcctcatcccgctgtggtgcgctctggccgcgctgcaggccatgtgctttttcaacggtgtctccaatagtcacagacagttcccggatttcttccagtgttttgcgttcctcaccgggtggaatgtgggcatccatcccttccaaaacagcggcagcggtatcgggcatcggcagggaaaaacgcccgcaaaactccactgatactgccatagccgtttttcgtagatagggcgcttgggagatacccggcgtgtgctgctctgcggttgcaatgacgatttcggcgggcagtcgtgccagcacttcacgctgcggcatggccgttgggaacacaatcgcgtgttgctcggcatcgtacccgacaacgccctcattttgaaatatgatgttgaccggggaaaggcgctccagttccttgatggccttgtccatctgctctggcttaatttcaggaatcggatacggcttattgccgtaggtcatggacacatcgaaaattgagccgacattataataaccattgacgcgcacaagctgcgggatgccttttgcccctttgtttacgcgccgcccgaatttatcccagtctttggcggtcaatacggcccgcgcttgcggcagggtttgcagcacaagtgctgcattgccggatgtgatatgactgccaagccgccccctgtcgtacagatagtcggcaaggcgctggccatcctgcacaacttcctgcaatacggatttttgcgccgcaatggtttctttaagctcggcttgctttttggctttccactcctcgatgggcaatcgctgttcgtacatttatcgctcctccttcgcagtaatatcctgcactttttcctgtgcctgtgctgctgtccgggcagcgcttttcagcgccataatggttgcccgcacagatggccgggggtcaatatccaaaggattcttcccgcgcgtcagcaagctgtcgccggattgacggcgggttgggtctttttttcggtctgccgtggtgactttggggatggcgtacccaagctgctcatagatgcggttcagcttagcgacatcttcagctttgaacatgacgtcaactttttcgttctgtgccttatctttcacaacagcaaacagaacgccgtactgcttggccaattccttaaactgtcccacgtctttgctttgcagggcaataattttcaattctttgccctcccgcagcagacggtcaaggctggttttgcctttcactttaggattttccttggcgtaggccagcgataaggccagtgcgtttttaatacccagcgcagacagcttaatggccacctctgtaacctgtaaggcttcccgcaccatctgatcggctgcttcgcctccgttgttcatcctgtttcacctcatttcgttcttcctgtgcggcaagttctgcttgccgtagtttttcctgcacctcggcagcatctgtttcgatgtcggaacagatgtaaacctcatggcgcagggctttcatttgctgggtcagtgatttgattttttcttcccgcgcggcacgttccggctcacgtttttggcgatacagaactttgcgctggcgggcaagctgttggatttggacttctgcattttccttgtaggccagcaattcatccatagtttcaatatggttttcccataggaattttgtctgctgctggtatcggctgaacagcagaaaatcctcacgcagcaaaaagtagcagcgctttgtgctcttgccgtggtaggctttccgcatcagggcgcagtagtgatagtagcaagccataaagccggacactttgggataccggcgcggcagcttgccgagataccgcgctcgccgcacagtgggctgtaattctgtgggctgccatttcggttttgccggggcgttttcctgccggtattcctgctgcatttcggtgggcatacggtgcagttggcggtaatactcccgcagcgctgtctcggaaaagcgcgggtcgagccggtcaatgcggatatttcgttgagcgtctttatggcgcacggccatgtgttccacacgcgggccgtatttgaccgtgtagcccatgttctgcaattcgagaataaaaccatcaaagctgtcggcggcagcaatagcctgttccacatctttgcgtaccatacctcggatggtaggcttgccggcctgaccgcttagccactcgtcataagattttcccttgccgtccgtttctatgacggacagccgattttctcggcaaagttcatcggaagtttcgcggattcctttataataggtattgaaatcgcttcggaacattttgccgtcagcataggacacagaattaacaactatatgattatgcagatgccctcggtcaaggtgggttgatacagtacattcaaatcgatctgcgagaaagcgctgcacaaactcgcagccgatttgatgcacttggtcgggcgtggcttcgccgggcgcaaaactttgtataatatgataggccaaaatgttgccgtcttttacaggcttgcgccagcgtgttttggtttcaatcataatttcataggcgttttgcggtatacagttaaatccgcttacatatagttggtgttcggttttgtcattgttttgagtgtagttaagcagcttgttcaagtcctccgcactccggcgctcggttttcattggattgcttgtgtagtctaaacacagattcaagttcgacttcaccttaataattttggtatatgccatatcaaagactatccctcacacagcgccacatatttctcttttgtgtttcctgctccatgtccgcagcgctgtgtagctggcattgcggataacaattttacaaaaagcgtggaatgtgtactcgatatgctctttgtattcttctgtgcaagtcataggaaatccccccttccctccgcaaagagttgtggctggttgatagttgctttttatgatgacaaagggcggcagcactttttgctgtcgccccttgattacccatttgcgaaaccgggcggggctgtcaacggcgggctttagcccgttcatcttgaccgttgactgctccggctgggtttgctatttgtgttttaatcacttacctaaagaaattatttttctttccacgacttttcaagaaaatctgttaattctgggatttccatctgttttagaccagttatatttccatttctatctctttctgtaataatgccaatatcaccgtttgcagagtgtacctcagttccttcaaaagttccatcggtagcccggttatcagcaaaatagcagactgacttaccattaaaaaacagctggttttcgtcagaattataggttaaaccgtattgctcatactgttctaagttattagcagtttcttcgtaaatctgtttgttgattagttcattaaatgccttttgttcttccgtaagccctttttcatagtcttggtcagtggtatcccgaacattttcagctttgcttttttcaggttgagttgaagaaaaaacagcatatacgccaccaaccatcaaaagcattacggcaagagtgagaataggaacaattatttttttctgtttcatcataatattaaatcccttctttttgcaagttgataagtatagtatagtgttttcctcctttcacccataagagcagcaccatcacagaatgttacacatgatttgcagttttttaagctctaaagtataaagagtagctacctcacacaaagatagctaccctcaaattttatgcagctttactcgaaaatatcttttggtgcagtaggtaataaatcgcctttcttccaaataagctcacaattattaggtgtaccataatatacagcaatgtagtcctttttttcatggttaaacccataattcattatttcggtttctccatcggataattcttctttgataaccgttcttaatacagaaatatacaagtttctattttcgtctgtgtaagtcttaattgttcctccacagtatccgtcaagtagttctaatctaaaagtaatctgttcatcggtcagtgaatatgccgagattgaaatttgctctgggcttaccatgctattttgtcttataaacaaggcataatatgttccaaatatcgctgtaaggacgatagtcgttattacaattcctatgataaatgaccttaatagtgaacgtttccatgaatgtgccatcttccccatgacactgctttgtatgctttcagcattttcctttgtatcaaccacacattctgtttttagcttctgaaaaatattggaacacttttcacattcctgcaaatgctcctcaatcatttttctgctgtctgctgaacaaacttcatcataatacagcggcaacatatcttgaatgatgtcgcatgaaattttactcataactttcctcctttacttgttcaatgatttttaatttagctctatgaaaggttactcttgcccaactttctgttttaccaaaaagttttgctatatcctgataacttaattctcctaacacccgtaaagaaaagacttccttatatggctctggtaaattgtgtagcagtttatgtattccaaacgcctgctctctttgtcctaacaaaatctctatggaattagtatcaactatttcattctctacagaattaaggtcgatatttcttttcctgtgcttctcatacaagaaaaatgaatgcttcgcaatttggcacagccaagtcgttattttacagtcacctcgaaagttctcatagcttttcatagccttaaaaaaagtatcttgcgctaattcttctgcaagttcttcatcgtggcaaagagctaacagatatttatatacatcttcaaaatataaggtatatatgtcactaaaattaggggtattcaattatgcacacctcctttcagcaataagagtaggcaagtaacattttgttacaaaaaatatttgaagataacatcaacaaaatatattatagcgtgaccgtgtttgattttcaatttctgtaaatgcagaaacatggagtgttccccaaattatacggaatagcaggggtactgtcatatctaatttattgttgcttctttaccaaccatgagcatttgttgacggtttctcgcaaatgtgctatcattataacggattagagtgacattaaatggaaggacggcaaattgttaggggcttacatggaaagaaacaatcgcaaacgcgggttcacattggttgagcttattgttgtgctggtaattctggcggttttagcagctctgcttgtgccatcgcttaccggatatatagacaaagcaaaaaagaaagctgtgataacggaggcaagagatgtgtggacagcgtcgcaggctgccttgtcggagtgctatgccctgtacccggagagttttaccgccaactctgcaaacaataaaagcaactgcaggttttctgtctacataaacaataaatgggtagacaatgtgggcaaaatttctaacgccgcgctgaatgcattgcaaaagaacccaaaggatacggtggaagcggggacggcaagccgcagagtttccgccatggtgttggcgtatttggacagtgcaaacaaaaacaatccgcgctatacattttacgatggcaaggtaatcaccaacggtacaaagccaagtacgtattttgataaaacaccaaagtccacggacataatcatacagctttttcatacggttgatggcaaagtcattgcgttgaatttcggaaaagatggctatatggtaacaatcgttcccggacaggaaattatctgtgagtatgatgggaaatgtctgaatttcaaaggatgatccggcgcctatcagccgcgggtaacccttttgctactaaaatcgtcaaatttgcgtaaaataaaaaacaatcaccgcataattatagacaaaacgaccaagtaatgctacaatattcctattccggggcgaaacggccccgtcaagaaggagcattgccgtgaagctgaacaaccgtcgcacgattctggtgggcctggcgtttttgtcgatctgtacgttctggcagatgtacgacagcgtgatgaccctgatcctgaccgacacctttaaactgaacgagaccctcgccggggccattatggcggcagataacgtactggcgctgtttttgctgccgttctttggcgcgctgtccgataagaccagcactcgcatcgggcggcggatgccgttcattgtgggcggcactgcattggcggccattttgatgaacctgatcccgctgctggatgaccgctatgcggcaaaccccagcaccggtacgctggtgctgttcattatagtgctgggtctgctgctggtttccatgggcacctatcgctcgcccgcggtggcgctgatgcccgacgtgacccctaagccgctgcgcagccgtgcaaatgccatcatcaacctgatgggggccgtgggcggcattttgtatctggggctggcggcgctgatgtatccggtgtccaaaaccaagggggtcgggcatgtcagctaccgcccgctgttcttcatcgtctcgatgatcatggtcgcggcggtggcaattttgtacctgaccatccgggagccgaagctcggggaggaaaaccggaagctcgaggccgcccaccccgagtggaacctggccaccgatgacggcgccggccatgaggtcctgcctgcgccggtcaagcggagccttgcgtttctgctgctctccatttcgctgtggttcatcggatataacggcgttacgacgtggtttaccaagtacgtggaggccgtcatgggcgagggcctgggcggcgcgtccacatgcctgctggtggcaacggcgggtgccattgtctcgtacattcccatcggtgcgctggctgcaaaaattggccgcaagcgcacgatccagtgcggcattgtgctgctggcgacctgctttatgctgggctatctgctgacgacgatgtacacctcgatccagccaatcatgtacgtggtgtttgcgctggtcggtctggcctgggcggccatcaacgtgaactcgctgccgatggtcgtcgagatgtgccgcggcagtgacatcggcaagttcacaggctattactacaccttctcgatggcggcgcaggtcgtcacgcccatcgtggcgggctccctgatgcgggccatcgactaccgcgtgctgttcccgtatgccgcgctgtttgtggcgctgagctttgtgacgatgtgcttcgtcaaacacggcgacgccagagccgaggcgaagaaggggctggcggcctttgaggacatggacagctgacccgttgaaaagttgaaaaagcgctgccgcacggaagaactttccgtgcggcagcgcttattttgttggttatttgtttttcgggtggccgttctcgacctcgcttgtgccctgctccatcagataggtggcggtaaggtcggcgatatgcagcttgacggcgaggggataggtgttgtaggcgtcactgacggcaaagctgccgccgcgcacggcatcgtcaaagccgcccatgtgccagcggatggcaatggcctcggcggttttcagccgcatgaaatgctcaattaaatacacgcttttctcgccgtggccgtagggcagctggtcagccacctgataaaatgggaccttctcccactggccggtaacgtcgttcttgacgttgcgggtgccgaccttgtaaaagttcgccttgcacaggtcgtgcagcaggccgcagatggcgtagctctcggcgctttcaccctcggtgaaaaaatgctgcatcatcgcattgtagacgttgatgctgtgcatgaccaggccgcactcgcacgcgccgtgaaagcgggtggatgcgggtgcagtgaaaaaatccgtcgtttccagccagttcagcaggcggtcagcgccggggcgggtgatgtttttgttgtagatctccacaaattcggcgtgatagtcctgcatacgaacctcacagttccatgtcgtccagaatgcccttcagggtcttcagctcctcctcggtcaggctgatgcccttggccatgcggctgccgtcgggggaccagtcgcggatgtcgtacttcggcgggttgccgttccagctgaccatgttcagctggcgctcccagccgcgggcgttggtggaaagaacggcgatgcgttcggtaacttcataggtgaattctgccatgattacagactccttttatcaataatactgggtcaagcaacatcatagccgattctgccggaaaatgcaagagcaaaatcaatcgatccgcacggccagcagggcaaagcgcgcgtcggtgtcggggtgggtgtcgccgcaggtcgagagcgtcagcagctgcgcgccgtactccggcatgacgccggtgtcatacagcgccttttcggtgatggccctgacgcggtgctgccagtccagcttggtgtcggcgtcaaaaaaggtgtagtagggcagcgcgtccgcgccgagcgcggtatccaccgcggccacgacctgccaggtgccgccctcgtacagtgtgtcaaacgtgaaggtcgggtgggctttgtaaaaatcttcgtcccggtagcgcacgagctggccgaacatcgaaccatcgtgcatattgtggccgtagatcagccagttggccgtcggcgcgtcggcgctgaccgagcagcgctcatccagaaacaatgtgccgcccacggcgtagaaacggtcaaagccgcggcgcaggtagtattcgttgtcgccgggcgtctgcacgacgggcaggtcgatgtccgtcccgtcgatgcgcagccagccgatgaggtcggggtttttctcgtagagtgcccggtaccggggcagaatttcgcctgcggctgcggcagggactgctgcggtctcgggcgtggcgtgggcgcttgcgtcggcgcgctgggtgtcggccagggcgtcccgcgtcgcggccagcggctgcacggtcacatgggtgggggcgggcagggccgtgactgccggggcggtgggcaccgccgcgggggcgtccggctgcccgccgcggaaaaccgtctgccgcaccagcagcacggcggccagggccagcgccgccaggcccgcaccgcgcagcacccgcacatggcggcgctggcgcgcgcgaagccccgtgcgggctgcaaaggggtagtaggcggtatccccgcgcagcttgcggtagcgcttgggcatggcggcggctcctttcgtagtttcctggccccccagagggagacgaggccgtcaaaaaattgcgttcctgcattattgcgtgtgtaggggcgaccattggtcgcccgtcagcttaccgcagcaacgcattttccgggacagtttgtttacaaggcaaacaggtgcgggcgagcaatgctcgcccctacaagagtttttcgacagtttgacctcccagagggaggcaagagggcggacaacttcttttttaaaaaaaacaaaaaacgccccgcagggcgttcacagctcaaattttacgcagcatcaaaagaccggcagagcagatcaaaatcagcccgacgacaccggccagatacataacgggaaaatcgcccgtggccggggtctcggcaggggcaggagccgcggtggcgctgggcgtcgcgctgctctgcgcggtgacgacctcgaccttggcggcagtctcattcaccttgacggtggagtcggacttctgggtgcgggaggtggagctggtgggggtggccgtggcctgtgctgcggcagaggatgtattcagtgtgccgcaggcagccagcagcgcgacgacgaccacaaaaaaggccgcacaaaaaaagcgcttcatcgagaaaacgcctccttaatttcagctttttatctgtatggaaaacgatgcagtaacgtgccatcgtgatttgttctttttgtattgtagcacagcgcagggggttcgtcaagctattgcaaagaaatagtaacaaaacggcaacaatttgggcacgcaaaaaggcttctccctcgggagaagctgcccgcggagcgggctgatgagggcaaagtctgccaacgctgcccgctcacaggagtttgtgggaagcccgccctcatccggccctgcggggccgccttcccccgaaggggaaggctcagactgtcgaaaaaggtgcgtttaccccttggccccctctgcgagggggctcccgccgcagcgggtgggggagagaactgtacggcaacccgaaatatttcgggctatggcaaggttctctccctccgcccctacggggcacctccctcgcagagggaggtttttcgacacgctgcgccttcccccgaagaagaaggcttaaaccgctctatttcccctcttgcgtgcggccccgaaatgcggtataatacccttaatcgtattgtgtgagattatgccccaatgggatgggcggcgcgcacggcaccgagaataaaaaaggagttgtaaacgatgaaaggtattatcctggccggcggcgccggcacccgactttacccgctgacgatggtcacatccaaacagctgctgcccgtctatgacaagccgatgatctactatccgctgtctaccctgatgctggcgggcattcaggacattctgatcatctccacccccaccgacaccccgcgctttgaggcgctgctgggtgacggcagccagtacggcctgcatctgcagtacaaggtccagcccagccccgacggcctggcccaggcatttatcctgggcgaggagttcattggcgacgactgctgcgccatggtcctgggcgacaacatcttctacggcgcgggattctccaagcgcctgaaaaatgccgccgccaacgctgccaatggccgcagcaccgtctttggctactacgtcaatgaccccgagcgtttcggcgtcgtcgcgtttgacaaggacggccacgccaccgacattgaggaaaagcccgctaaccccaagagcaactacgcggtcacgggcctgtacttctacaacagcgacgttgtcaaaatggccaagcaggtcaagcccagcgcccgcggggagctggagatctcgacgctgaaccagatgtatctcgaccagggcaagctggatgtccagctgctgggccgcggctacgcctggctcgacaccggcacgatggactccctcgtcgaggcggctacctttgtgcagaccgtcgagcagcgccagggcatcaagatttccgcccccgaggagatcgcctacaagtacggctggatcaccaaggaaaagctgctggaaagtgccgcccgctacggaaaatccccctacggccagcatctgaagaatgtcgccgacgacaagctgcaatactgatagagtaggggaatacgcatgaaaattctgattaccggctgccgcgggcagctgggcaccgagctgcagcaccagctttccgcggagggctgcgccatcggcccgctgcctgagcgcctgcgcaaggccaccgttatcccggtggatgtcgatgagctggacatcacggaccgtgaggccaccatcaactacatccgccgccaccagcccgacaccgtcatcaactgcgccgctttcacgaacgtggacggctgcgagaccgcccgcgacgcggcctttaaggtcaacgccatcggcccgcgcaatctggcgctggcgtgtgagaaggtcaacgcgcgcctgatccacatttccaccgactatgtgttccccggcaccgccaacggcggcgtcgcactggacgagtgcgccgtgcccgcgccgatttcggcctacggccagacgaagctgctgggagaacagtatgtcgagcgcttctgccgccggcacttcattgtgcgcacggcatggctctacagcagctacggcaaaaacttcgtcaagacgatgatccgtatgggccggacccacgataagatcaccgtcgtcaatgaccagctgggcaacccgacgaacgccgttgacctggcctaccacattctcaagctggctgtcagccacgattacggcatctaccactgcaccggcaacggcatttgcagctggtatgactttgcctgtgccatcatgcagggcgcagggcttagctgcaaggtcgaacctgtgaccagcgccgggtatgccgccgccaaccccgccagcgccagccgcccggcgtggagcgcactggaaaaccggatgctgcgctgcaccgtcggcgacgagatgcgcgactggcaggacgccctcaaggacttttttgcaaactggaatggagaactttaatatatgaaaacctatcttgtgaccggctgcgccggtttcatcggctcgaactttgtccactacatgctggaaaagtatgaggacatccgccttgtcaacctcgacaagctgacctacgccggcaacctcgagaacctgcaggacatcgaggacgatgcccgccacatctttgtacagggcgacatctgcgacaaggcgcttgtgaccgacctgatcgcaaagtacgaccccgactacgtcatcaactttgcggccgagagccacgtggaccgcagcatcaagaaccccgagatcttcgtcgagagcaacgtgctgggcacggtcaacctgctgcagtgctgcaaggatgcctggtatgacgccgccgccaagacctggaaggaaggcaaaaaatacctgcaggtttccaccgacgaggtctacggcgcactgggcgccgagggctatttcatggagacgaccccgctgtgcccccacagcccgtactctgcctccaaggccagcgccgatatgttcgtcaaggcgttccacgacacctacggcatgccgatgaacattacccgctgctccaacaactacggcccctaccagttccccgagaagctgatcccgctgctcatcaacaacgccaagcagcacaagacgctgcccgtctacggcgacggtatgcagatccgcgactggctgtatgttatggaccactgcaaggccatcgacatggtcgccaatggcggcaaggacggcgaggtctacaacgtcggcggccacaacgagcgcccgaacatcttcatcgtcaagaccgtcattgcccagctgcatgaccgcctgaaggacgagggcatcagcgaggagctgatcacccacgttgcagaccgcctcggccatgaccgccgctacggtatcgaccccaccaagatcaaggaggatctgggctggtaccccgagaccccgtttgagaagggcatcgtcctgaccatcgactggtatctggcgcaccccgactggatggctcacgtcaccagcggcgattaccagaaatattacgagcagatgtataagaataagtaagcacacgcagccttcccccttacagagaatgtaggggcgagcagtgctcgcccgtgcccgtttgcggcagcggaagcctccgcgggcggatatggaatccgcccctacgtgtaggggacgatgctcgtcatcgccccgggagccttgcggctgccgatcggctcctcacccggccctgcgggccccctcctctccgggagggctttttcactcaatcccccaaaaggagcaacacatccacaatggcaaattacagagaagaacatatccacaataaccgccgtctggcacggcaggtcgtgggcgcagcggcactgctgctggcactcatcggcctgttcaccgtgctgggctggatcgtcgggcttgtgcgcgcagcgctggacgacacggacctgcgcaatgaataccgtgaccgcctgtacggcatggtcatgctggatcccgtcgcttttgacgacgtgaacagcgtggacgagggcattttcaaacaggccgccatctggggcactgtctatcaggtgcagaacagcggcggcagcctggaccagtacgagcgcgaccccgacaccggctcggccctgatcccggcgctggagatcgacacctacatctccaacctgctcgggccggactaccaggtgacggagggcacgttcagcacggcggagttcgtctaccagtacgacgaagaaaagcaggcctatctggtgcccgtcaccagttcggtggcgctgtacacgccgacggtggaaaagatcaccaagaaggacggccagcgcatcgtgaccgtcggctatgtgccgacgtcgtcgaacaacgccaccggtgagctgtccctgaccgcgcccactgagccgacgaagtatatggactatgtctttacccgcggcgagaaccgccagtggtacctgaccgccctgcgcgacagcgatatgcaggttgaggtcacgccgatccccgccccgacggatgctgttgtggataacatgcagaacgaggaaatgggcacgtcggatgccgcgagcaccgagcccgcgcccgtccccgaagaaggcgctgaggccgccccggatgccgaaaacctcgacgataccggcgacgccccggcagaggatgccgccgcagaggggtaaatcctgaatttgaaaagtgcccgcttgtgccatgcgcatgagcgggcgctttttttgcggcagtgccgcaggggccgcacatgtacggcccgcagccttgccatagatgaccttttatgggatggcccctgcagttctgctgcaaaaatccgccggacactagtgcaatccgctgcggaatatgctataatacatctatatatacttgagtgaggtgtacctactatggaagaactgcttcgcattctggaaaagaacgcccgtatgccgattgaggacatcgcggcgatgctggataaaacgcctgaagagatcgccgccatgatggatgaggccgccgcaaagggctatatccgcggctatgagacgctcgtggactgggaacaagccggtgtcaacctcgtcgaggctgtcattgagctgcgcgtgaccccccataaggcccgcggctttgacgacatcggcatgacgattgctcagtttgatgaggtcgacaccgtgctgctgatgagcggcagctatgatttgcaggtcatcatcaagggccgcagcttccaggaaatcgccatcttcgtggccaagcgcctttccccgctggacgacgtgctctccaccgcgaccagctttgtgctgcgcccctacaagcgcggcggccgcctgtacctggccgaagaacccgatgaaagagagtgtaccgtcctgtgatgaactacgatgagctgcttgcccctgccgccaaggccatgcgcccgtccggcatccgcaagttctttgatctggcagccgatatgccccactgcatctcgctgggcgtcggggagccggattttaaaacgccgtggagcgtccgcgacgcgggcatccgcagcctggagctgggccgcaccaagtatacggccaactccggcttaaaggagttgcgcggcgagatctgcaattacttacagcgccgctttgatttgcactataaagaggaaaacgtcctggtcaccgtcggcggcagcgaggccatcgacctgaccatccgtgcggtggtccagcccggggatgaggtcattatcccggagccgtgctttgtctgctatgagccgatcacccagctgaccggcggcgtgcccgtgcatattgccacccgcgccgaggatcagttccgcctgaccgccgaccagctgcgcgcggccatcacgcccaggacgaagctgctgatctttccgtatcccaacaaccccacgggcgcagtcatgagtgccgccgagatggaggagatcgctgccgtcctgcgcgagacgaatgtgctggtgctgtccgacgaaatttactccgagctgacctacggcctggaccgccacgtttcgattgcgtcgctgcccggcatggcagagcgcacgattgtggtcaacggcttctccaagtcctacgccatgaccggctggcggctcggctacgccgccggtccggcaccgcttgtcaaagtcatgacgaagatccaccaaagctgcatcatgtccgcgccgaccacgagccagtacgcggccatcacggcgctgcgccagtgcgacgaccagatcgagatgatgcgcgacgaatacaaccgccgccgccgctacgtcgtcaaggcgctgaacgagatgggcctgacctgctttgagccgcggggcgcattctacgtgttcccgtctatccagatcagcggcctgaccagcagcgagttctgcgagcagctgctgcgggaaaaggaggtcgccatcatccccggctcggcgttcggtgcctccggcgagggctatgcccgcatcagctacgcctacagcgtagaccatttgcagaccgcgatgaagcgcatccgcgaatttttgaccgaacacggctggataaaaaagtaaaaacaggagtgacccctatgcaataccgctcggtaacggtgctggccccggccaagctaaacctgtcgctggacgttgtgggcacgctgcccaacggctaccatgatttggatatggtcatgcagacgattgatctgtatgaaaaaatcacgctgcgccgcagcaatgatctgtccctgacgctgcccggcagcttcgtgccggtcaacgacaagaacaccgccgtcaaggcagcgctggccttttttgactacacgggcctgctggccggtgtggatatgacgatttacaagcgcgtgccggtccgcgcgggcatggcgggcggcagcgccgacgccgccggcgtgctcgtcggcctgaatgagctgtacggtgcgcacctgtccatgagcgaactgtgtgccatcggtgcgggcatcggcgcggacgtgccgtttgcgctgctgggcggcacctgccgcgtgcgcggcgtgggcgacctgatgaaggccctaccgccctgcccggactgccggttcgtggtggcgatgcccagcgtcggtgtctcgacgcctgaggcgttcgcccggtatgacacgatgggcagccctgtccaccccgactgcgaggcgcaggagcaggccatccgcgactgcaatttggccggggtctgcgccgccggcggcaacgcgctggagcactgctccggtgcggtggaaacgcccgctatctgcaagacgctgcgggagcatggggccgtcatggcccagatgaccggcagcggcgcggcggtgttcggcatttttgacgacgagaacgccgcccgcagcgctgtagccgccttgaaaaacggctacaagcaggtctatctctgcaagccgacccacggcggcccccgcgtgacggtccgccgcctgtttggagcaaaaaaataa

SEQ ID NO: 365 - DNA, 19087 bp, unidentified
  source 1..19087: mol_type = unassigned DNA
atgaaaaaaggaaataaatacggaacgcatagagtaatttcaccgaaaggagtattaccacaaccggctgacaaactggataacaatatggacgaaatctatgataacgagattttgatcgatgtgcaaactctgaatatcgattcggctagttttactcagattgaagaacaagccggaggggataaagctaaaattgccgagatcatgctgggaattgtagagaaacaaggaaaacaccgtaatccggtgaccggttccggtggtatgttactgggaacggtggaaaaaatcggagatgctttagttggaaagaccgatctgaaagtgggagataaaatcgcaactttggtgtctttgtcgctgactccgcttcgtatcgataaaattaaagaaatccgggcagatgtcgaccaggtggatatcgatggtaaagctattttgtttgaaagcggtatttatgcgaagattccggcagatctgccggaaaagttggctttgtcggctctcgatgtagccggtgctccggctcagactgctaaattggtgaaaccgggagatacggtattgattatcggtgccggtggtaaatcgggtatgttgtgttgctatgaagcaaagaaacgtgctggtgttaccggtaaagtaatcggtttgtgccatagccagagaagtaccgaacggcttcagaaattaggcttctgtgattatgtattctcggccgatgcaactcagccggttccggttatggagaaaattgccgaactgacgaatggtgaaatgtgtgatattacgatcaataatgtgaatattacggatactgagatgaccagcatcttgtgtactaaaaatgacggattggtctatttcttctctatggcgaccagttttacgaaggctgctttgggagcggaaggtgtcggcagcgatgtgactatgatcgttggaaatgggtataccaaaggacatgctgagattacactgcaggaacttcgtgaaagcgaggcattacggaagatatttacagagttgtatgcctgaatggtcgggattttataatcccgacgaattaaaaatatgtttttatggctagcagaagaaaagagtttttccctgaagtgaccgatgaacaatggaacgattggcattggcaggtgaagaacaggattgaaactttggatcagctgaagaaatacatccggctgacaccagatgaggaagagggtatccgtgagtcgctgaagacattacggatggcgatcacaccttattatctgagtctgatcgatcccgataatccttattgtccgatccgtaaacaatcggtgccgaccattgaagaattacaccggtcaccggctgatctggaagatcccttgcatgaagacggtgattcacccgtaccgggactgacccaccgttatcctgaccgggtgttgttcctgatcaccgatatgtgttcgatgtattgccggcattgtacccggcgccgctttgccggacatcacgattgtgccactccattggaaagaatcgataaatgtatcgaatatatcgctaataccccccaggtgagagatgtcctcctatcgggaggggatgccttattggtcagtgacgaacgattggaatatatcatcaaacggctgcgtggaatccctcatgtcgagattatccgtatcgggtcgagaacaccggtggtgttaccccagcgcattacgccggaattggtaaatatgcttcggaaatatcatccgatttggctgaatactcatttcaaccatccgaacgaaattaccgaagagtcggcggctgcttgtgcccggctggccgatgcgggtatacctctgggaaatcagtctgtcctgctccgcgggatcaacgattgtacacatgtcatgaaaaaattggtgcacgagttggtcaagatccgggtacgtccctattacatctatatctgtgatctttctgtgggtatcggtcatttccgtacccctgtatcgaagggaatcgagattatcgagaacctgcggggacatacttccggttatgccgtgcctactttcgtcgtggatgctcccggtggaggcggaaaaattccggtgatgccgacctatctgatttctcagggccccaatcgggtggtgttgcgtaattttgaaggcgtagtgactacgtataccgaaccgacggattacagagacgaatgccactgtgaagagtgtgagaagcgccgtaaaacagaaggagtggctgagttgctgagcggagaacgcttgtctctcgaaccggcgaatctggatcgtaagacacgtaatctattggcgaaaggataaattatttgtgattttggatttaccgtttcattcgattgaaaggataaatccggaatcataaatgaaaatgctgaacagatgggttttgttgatgacatatccgattacaggagtctggcaattgtcggattggagaaaaatacagggaaaacagaatgcctgaattacatccttcgcaggataaaagattcggcagatcggttcgctctgacttcgatcggaattgacggagaaaaccgggatcaggtatgtcaaaccccgaaacccgagattatcgtgccggaaggaatgatattcgttacttcggagaaacattaccgggagaggaggttggtggctgaaatcatggaaatcgatgatcatcggactgctttgggacggttggttatcgccagggctaaaacttcgggaaaagtattgctttcagggcctgcggatactgccgggttgaaaagtctgatccggcatatgaaagatttcggggtacgaacgaccttggtcgacggggctttgtcccgtttaagcctggcgtctcccaccgttacggaggcgatggtcttagcgacgggggctgctgtttccgggaatattcgggaattggtgagacgtacccgttatgtttgtgatttgatcgatctggaagaggtggacgaagttttacaagagaggttggatgccattcaacaaggtgtatgggcggtcgggccggagggagaatgtatcgatctgaaattgccttctgtgtttatgctggagaaaagtggaaccgatctgctgcaatatgggcatcggatctttattgccggtgctgtgagtgataaagtatttcagtttttacgcgtacagaaacagaccgtagaattgatcgtccgtgattttacccgtgttttttccgcacctgagtctttttatgcctttttacgtaagggcggaagagtacaggtgcttcatcgtagccggcttttggccgttacgatcaatcctcagtctccgggaggattacttttggattcgttgcgtttgcagcaagcattggaagaaagcttgcaaattccggtgtatgatgtgaaaaaaatagaaaaagtcggtaaaaaccgttgaggatatgattttaagggaagcgataagacaagtcaggggattccgttatatgatcgaacaattggatatctgttcggctgtaggccggagggtattgtatgatctgccctggctcgattcgaaatctcggttggaggccgaatttgaacgtattcaaaagatcatggtactttttgaacaacctgaaaatgaatcccggctggaacgtttgactggtaagctgatgcaggtgagagatatccgggggacgatcgggcggatggcgatggagcaagtgttggatgatcttgaattgttcgaattgaaaacttttgctttgtgctcggaagaaatcaggggacttgtcgaagaatggcggattgttttactcccggaactggagccggttgtacgtttgttggatccggaagggaatcggattcctcatttttatatttatgatacttattcggctgagctggccaggctgagagctgaaataaaacaaaagagccttcaaggggcagaagaacgggaattagaagcgttgtatgtacaaagtgtggttttggaagacaaggtacgcgaagagttgtctgtgcagttgagaccttatcacgacgatttgaaacaggctttggaagcggtcggattgctggatgtcgtattggcaaaagccagacaagcaataagaggacaattgactttgccgcaaattccggaagagggggaaatggtgttcgaaggtcttttccatcctcagatccgggagattttagaacaggaaggaagagcgtttcaggctgtagatttgaaattggaaaagggaacgacggtgattaccggagccaatatggccggaaagacagtgttgttgaaaagtgtgcaattggcgcaatacctgatgcagttcggtttttatgtacctgcccggcgggcgggtatgccgctcgtggaacaagtcttgaccagtatcggggatgatcaggatgaattgaacggtctctcttcttatgcggctgagatgttgcgggtggatgaaatgatccggcaagtcaggcagcgaagtaaaattttggtgctgatagacgaattggcccggacgaccaatcccgtcgagggacgggcaattgtgaatggggtagtggattttttgactactcaccgggtgatggctatggttactacccattatagcggaataacggccgaatgccgtaaattgagagtgcggggatttgtagagaatcgggttgaagggaatatgaccctgaaaaatatcaatgagtttattgattattcactcgaagaagacagcggagaagaagttccccaggaggcgatgcgtattgcctggatgctggggatcgaccgtggagtgttggaacgggtggaaaattatttgcaggaagaaaatcctgattggaaaaagacagtacagtagaaagaaaatatatatgaaaagtaaattaggaatagattttgataaagtcggacatgcccgtgaaatggcccgtaagattgctgaccaggtgcaggattttgtggatggctatacgacagtggctgtcgaaaggacattgtgtcgtttgctgggtatcgacggagtggatgttcatgctgtccctctgccgaacattttggtagacgagctgaaagaaaagaacgtgttgggagaaggaattttattctttctgggtaatgtaatggtggaaaccggaatgactccacaggaaatagccgaacaagtggctgccgggaaagtagatgtcacccgggtaccggtatgtactcccggccagcgggaaaaagcgttgcaaccctatatcgaggccagtatccgtcggatttccgacaaccggaaacggcgtgagaattatatcgcaacgatcggagagggagcaaagccttatctttatgtcattgtcgctaccggtaatatttacgaagacgtggtacaggcacaggcggctgcccggcaaggggcggatgtcattgctgtgatccgtacaacggggcaaagtttgttggactatgtaccctatggggctacgacagaaggattcggcggaacttttgccacccaggaaaattttcggattatgcggaaagctttggatgaggtaggagaagaagtcggtcgttatattcggctgtgtaattattgttccggtttatgtatgccggagattgctgtgatgggagctttggaagggctggatgtgatgttgaacgatgcgttgtatgggattttattccgggatatcaatatgcagcggacgttggtcgaccagtttatgtcgcgggtgatcaacggctttgccggagtgattatcaacacaggcgaagataactacctgactactgccgacgctgtcgaagaagcacatactgttttggcttccgatctgatcaatgaacaattggctttattggccgggctgccggaagaacaaatgggcctgggacatgcttttgaaatggatcccatgctggaaaacggctttttgtacgaattggctcaggcccagatgacccgggaaatttttccgaaggctactttgaaatatatgcctccgacgaaatttatgaccggaaatattttccgcggacatattcaggatgctcttttcaatatgatcggaatctggacttcacaaggtattcaactgttgggaatgccgaccgaagccatacatactccatttatgtcggatcgttatctgtcgatcgagaatgcccgttatatttttaataatatgaaaaatatcggagatgaagtggtctttaaagaaaacgggattatacaaaacagggcgaaagaagtgttggataaagctaccgttctcttggaaaagattgaacgggaaggactttttacagccttggaaaaaggaatttttgccgatatcaagcgtcctaaaaacggaggaaaaggattggacggcgtttgtgccaagggaaagaactatagcaatccttttgtagagatcatgatgaacagataacaaaaatcgtaaatcaaataaagattatgagcggaggtttatattcaacagaagggagagatttcgatcaaaccctcgatctgaaaaagataaaaccctacggggatacgatgaacgacggaaagacacagctgagtttcactttacctgtacctgccggagatgaagcgatagaggctgctaaacagttgatgaaaaaaatgggatttgaaaatcctcaggtggtgtttcatcaggaactgacgaaaggatatactttttttaattgttatggaaattgtgtacacacggtagattatagcaatatctatgtgccgaaagtggaatcgaccaagtgggatatgggagagaccgatcagtttgtccgggaacatatcggtcggaaaattgtggtgatcggagctagtaccggaacagatgcccatacggtgggaatcgacgctattatgaatatgaaaggttttgccggacattatggtttggagcggtatgaaatgttcgaagccttgaatatgggtagccaggtgaccaacgaggaatttatcgctaaggctatcgagttgaaagctgatgctttattggtttcgcagaccgtgactcagaaagatattcatattaaaaatctgacggaactcgtggagatgttggaagccgaaggattacgggacaaagtgatcctggcttgtggtggtccccggatttcacacgagttggcgaaagaattggggtacgatgccggcttcgggatgaatacctatgccgacgatgtcgcctcgtttattgcgcaggaattggatcgaagaatgaatcattgaaaatatacaagctatggaaaaagaacaaatcagggaagtgattgccaggagagtggcaatggaactccacgatggagacgtggtgaatctgggtatcggtttgccgactttagtgccgaattatctgcctgaaggtgtcgaggtcatcttacaaacggagaatggattgatcggtatggggccgactcctgctccgggagaagaagatccggacttgatcaatgccggcggtggagcgataacggctctgcccggagcggccagcttcgatagtgctacttcgttcggtattatccggggcggacacgtagatgtcagtatcctgggggccttgcaagtagatgaaaaaggagatttagccaactggatgataccggggaaaaaaacaccgggaatgggaggagcgatggacctgctgatgggagccggtaaggtgatcctggccatggaacatacggcaaaaggaaatccgaaaatcctgaaaaaatgtactttacctttgacagccaaggggcaggtgaatatgatcgttacagaaatgggagttatggagatcacacccgggggaattgtactgaaagagatacatcctgagtttacggtagaacaggtgcaggcagctacagaagtaactctgatcgttgccccggatttaaaaaagatgtgctgaacgacgaaagcgtattgaaggaaatcacgatggaggatggatggtggatacctctagcccgaatcgtaaactataaattaaaaaaggtatggatttttcattatcaaaaaaagagatattgtttcagcagatgatcagagcatttgctgagaaagaagtaaaaccgctggcggcagaagtggacgaagaagagagattccctgtcgaaacggtagaaaaaatggcgaaactggggattatgggtatccctttcccggtggaatatggcggagccggtggtgataacgtattgtattctatggctgtagaggaattgtcccgggtatgtgcaacgaccggggttattgtttctgcccatacctctttgtgtgcttctccgatctatgaattcggaaatgaagaacaacggaaaaaatatttacccaaattatgttcgggagaatggatcggagcttttggtctgaccgaaccgaatgcaggtaccgatgcctctgcccagcagacaatggctgttgctgaagaggatcattatgtgctcaacgggtccaaaatatttattacgaatgcagcttatgcacacgtttacattgttatggcgatgaccgataagtcgcagggtacacgaggaatctctgcttttatcgttgaacgggattttccgggattttccatcggtaaaaaagagaaaaagatggggatccggggatccgcaacctgtgagttgatttttgaaaattgtattgtgcctaaaggaaatatgctgggtaaaccgggtgaaggatttaaaattgcgatgaagacgctcgatggcggacgtatgggaattgcttcacaggccttgggaattgctcagggagccatggatgagacaataaaatatgtgaaagaacggaaacagttcggacgctctatcggacaatttcagaatacccaatttcagttggccgatttaaatgccaagatcgaagctgcccgtttgttggtgcggacggctgcctggaagaaagacaggaaaatcccttactctgtcgattcggcacgggctaagttatttgctgctgaaacagcgatggaagtgacgacaaaagccgtacagtttcacggggggtatggatatacccgtgagtatccggtcgaacggatgatgagagatgccaagattacggagatttatgagggaacctctgaagtacagcggatggtgattgctgctgctctattgaaataataatgttttccgcattgaacttataaaaagagaatacatgaaaatagtagtttgtataaaacaagtacctgatacgacagagatcaaactcgatccggtaacaggaacaatgatacgggatggtgtacctagcattatgaatcccgacgataaaggtggattggaaatggctttggccttgaaaaataaatatggtgcgcaggtaaccgttattacgatgggaccgcctcaggccgatgatattttgcgtgaagcttttgccatgggagccgaccgggcgattcatttgagcgaccgtaagtttgccggtgcagatacattggctacgtcgaatgctattgccggtgctttacggatgctggatttcgacctggtcattaccggccggcaggcgatcgatggagatacggcgcaggtaggacctcagattgccgagcatctcgatttgccacaagtgacgtatgtcgagaatttggaattcgatggtgacaagttgtttacgatccgtaaatctaccgaagaaggatatcaaaccgtacaggtggaatctccctgtgtcgttactgttctggctacggcaaacaaagcgcgctatatgtctgtgcggggaatcgtagaggcatacgatcgggaagtggaaatctggaattttaataatatcagtgtggatgaagctaaattgggattgaacggttcgccgacgcgggtatggaagtcttttaccaaaggagctaaagcagccggaaaagttttcgaagtggaaccggccgaagctgtagatgttattatcgaaaaattgaaagagaaatttattatttaatacatgattttagaggaaaaccgggaataatccggtgaaatctaaagtttaaaatctgatgaagatggataaatctcaatataaagacgtttatgtattcgtagagcaacgggaaggagttattcagaaagttgccatcgaattattggggaaagcccgggagttggccgatagcctgaatgaaaaagtggtggcgatgttgttgggttatgaagtggcgggtcaggcacaggaattgatcgcttatggggccgatgtcgtattgtgtgctgacgaacgggagctggtacaatataataccgagccttacgctcaggcgattacacagattgtacatgagcgtaaacccagtatcgtactgattggagcgacgacgatcggccgggatttgggccctcgtttatccgcccgtttagagaccgggttgacagccgattgtacgggcctcgctgtctcggatgaacgggatttgctgatgacccgtcctgcattcggaggaaatctgatggcgacgattatttgtaaagaacaccggccgcaaatgtcgaccgtacgtccgggagtgatgcgcacgaaaccgaaagatgaacaacgtgccggaacggtagagaaggtgaatattcatttcgataagtcgaaatttaaagtgcggattctcgagacggtgaaagaacaaaagaaccgtatcgatataacagaagcgaagattcttgtatccggaggccgtggtgtaggtaatacggagggatttgagatgctcggaaaattagcggaaacgctgaatgccgaggtttcttcttcacgtgccatggtggatgccggggttatgcctcatgaccgtcaggttggccaaaccgggaaaaccgttcgtcccgatctgtatttcgctatgggtatttccggagctattcagcatttggccggaatggaggaatcggaatttatcgttgccgtgaacaaggataaatatgctccgatttttaacgttgccgacctgggaattgtcggggatgtgaaacagatcgttccgttgctgaccgagaggttggcaaacatccggaaaactgacaaataaaagcccggacatggagtatcaaaaattaatgctggaaaaacaagatcgtgtttgtctggtaaagatcaatcatccggaggcattgaatgccttgaatacggtgatcttgcaggaattggaccgggcattcgatgaaattgcagccgatccggaaaccgatgtggttattctgacaggcgaaggacgttcgtttgttgcgggagccgatattgctgaaatgagtgtgatgaaggccgaagaaggccggcgtttcggtgagttaggggctgctgttttccggaaaatcgaactgatggctaagccggttattgctgccgtgaatggatttgctttaggaggaggatgtgaactggcgatggcttgtgatatccgtatcgcctcggctaaggcgaagttcggtcagccggaagtgggacttgggatcacgccgggattttccggtacccagcgtttaccgcgtttagtcggattaggtaaagccaaagagttgatttatacggctgcggttatccatgccgaggaagcttgccggatcggactggtgaacaaagtggtggaatcggaagaattgatgaatgagtgtatggctatggcaaagactattgctgctaaagcgccattggcggttcgttatgccaaagaagctatcaaccggggagtggaaacggatatggataccggtatcgtcatcgaaaacggtttgttcgggttgtgtttcgcaacgaccgaccagaaggaaggcatggaagcttttttatggaaacgtaaacccgaatttgaagggaattaaaatctttgtaatttaaatttatcgattatgaaaatatgcattgttggaacagggactatgggacatggtattgcccaggtatttgcccaggccggacatgaggtattgttaaaaggccgttctgaagcttctttggcaaaagcccacaaagctatggataaaaatctttccagaatggtggaaaaaggtaaattggaagccggggttaaagatcaggtattggccaggattaaagattcgatgaaatatgaggattgtgccgatgctgatttggtgatcgaggcgatagctgaagatatggctaccaagcatgagatattcaaattgttggacggaatttgtaaaccggaagcgatattggcaaccaatacttcttcgctttctataacggaagtggccgctgtgactaaccgtccggaaaaggtgatcggtatgcatttcttcaatcctgttccggctatgaaactggtggaagtgatcaaaggccggctgacttcggcagaggtgcatgatcaggtatttgctttatcgcaggaaatcgggaaagtgcccgtcagtgtcgaggaagctcctggatttatagtcaaccggattctgatccctctggtgaacgaaggcatcggtatattagctgacggagtggcgaaaaaagaggaaatcgatgccgcgatgaaattaggggctaaccatcctatgggaccattggaactgggtgatttgatcggattggatgtttgtctggctattatggaagtgttgtaccgggaattcggtgactctaaataccggcctcatcctttgttgcggaaaatggttcgcgctaacttattgggacggaagaccggagtcgggttttatgactatcggaaataatgaggagagtcttctttaccgggatacgatgctggggaatatttccccagcatttttactttttccccactttctacaagctgcgattcttaatctgttgtatgtaatatattgataattagtatattttgttgattttgtgcttgtggcatcggatttgtcctgtttaaggacagaatctaactctaaaaaataatagtatgaaaaagatcgtcattttaggaatcggagcttctatgttcttcttgggtagttgcgtagagagttctcagaaatataagtctttacaagcccgtctggattctttgagtacagtacatattatgcagaattccgaaatggagagtatgctggccgatttgaacgatatttctgccggaatgcaatcgttgcgggatgccgaacgtttattgactttggaaacaattaatgaaaataaagccaatagtaaatccaaacagcaattgaatcagctgaaaaaagacgtacaggctattaccgaggcgatcgcttcttataaagaacagatttccaaactcgaaggtaagaataaaagccagtcggccgagtttaaaagattgattgccggcttaaatgcggaattggatcaacgtacacagaaactgaatgaaattactaaacaattggctgagaagaatcagcaattggcagtgaagaccgaggaagtcgctaatctgaccgagaatgtggaagctttggataaagccaataaaagtcagcaaatgacgatcaatgaacaggatatggcgattcatcagggacactatttgattggaaaccgcaaagagctgaaagaagctgaggtaatttccagacaagggattttctgtccgccgatcgtatcgtcacaagcacaaaaagccaactttaccgatttggatatccgtgagatgaaggtgatcccgttgaatagtaaaaaagcgaaattactttctgtccatccggctgattcctatactttggagaccggtgaagatggtaatatgaccctgaaaatcaatgacgaaaataatttctggaaacaaacaaaatacttggttgtgatgattggataaaagcgggaataattttaactgagagaggcatacccaaaaagtatgtctcttttcttttttcacaacgattattcttgtcgagagagaaaataaagaagttttttttgatttaaagacagttcgtttagaaaactagccgaagatcatcaggatttttaaaagtgtatccgatgagaaaatcgctttcaatttgtcgatgcttttgtatttcagtgttttaacactgtttactgagatgttcatttcctgtgctatttgctgattgtcgaggccttgaaaagcgagctgcatgacttgtttactacggggaggtaatttttcgatttccttgatgatctgtaaagcgacatctgtttcgactataacattgaaaatgttcacttctttgagcgaacggctattcacgaatttttcctgtaatttcagttttcttaaccattcgagagagaggttatgtaccaacatatacatataattatcgatgctttcgatttccttctctttggacactaattcccaaagccgtgcaaaagcttcctggacaatgtcctctgatgccgatttatcgttcagaaaccggttggctgcaaaacataaaggagcatacaaccgattcattgtactggcaaattcatttggagaagaatttttaatcccttgttttgctgttgatttcatctttatttaacctgaaagtcgaaaacaaaggtaaaaaattgtaagaatcattcatctttttggaagacttattagtctttaatataaagtgtaattcgatataaaacaaattatgtgtcttgtacaagatcgtcaaaaattgattttgttgttgcaaaaagcttatttcgggcaactctctgaagaagaagccgggctgttggctgagtggcgtagtcggtcttcggaacatgaggcattgtatcggcggatcatgagcggagaaagcctggccgaactgcttgagtggcaaaatcatttcgatccggaacaagcgaatcggtcgattttgcatcgggttgaaaaacgtagatctattcggatgaggaaaataggtttgcgggtagctgctatagttctcctgttgctgggaataggaacgatatggattataaatcgtcagggcgattatagacggcaacaggaattggcttttacattgattcacccaggaactccccaagctattcttactttggcggatggaaggcaagtggtattggataagaaaccggtaaccttgaaattaaatgaaaaacaatttttgaccggagatagtgctatattgaattatgcggttaatctaccgaatggtttggaaaataatgaacagcaaacattaatgcataaggtggaagttccggttggtggtgaatatcggttagtgcttgccgatggtactaaagtctggatcaatgctgaaagttctttgcaatatccggtagagtttactgctgaacagcgaacagtaattttacaaggtgaagcctatttcgaagtcgtttcggatacgctgaaaccttttacggtgaaaacgcctgccggtttggaagtgaaagttaccggtacgcatttcaatgtagaggcatatgccgatcgtagaacatggaaaaccactttagtagaaggaggggtggaagtccggcttggaaaatatcaaacctatctgcgaccgaatgaacaatttagttttgatcaggaaaccaatcagggaagcttgaaaaaagtaaatgtcagggaggtcatcgcctggaaaaatggctggttcgtttttgataatactcctttggaagaaatcatggagacaatacgacgatggtataatatcgaagtagaatatcgggatgctgagacgaaacaattgcgttttacgggtgaccttagtaaatatgattcttttgaatctgtgattcgtatgttcgaagatacacagaaagttaagttaaaagttcgggccaatcggctgatcgtagaaagacattaattcatagaaatagatgatagaatatacctaaaaatggggatttctcttaaatagagctcccattatctttggacctgctaaaatggtcgattcattttgcggatttccgcgaaaacaatggacaggtggtgattgaaaataggtaattattaattaaaacagtaaacatgaaagtaatgtgttatttcaaacaaggaacaatatcccggatgttattcagagggatgttgtttgcattgttggctgtatgttacccggaatattcccgggctgttattgctgaggattatcaggcgaatcggttgattacgctttctatgaagaatatctctgtggctgacattatcgggcaaatccggaaaacgacagattatcgtttcttatttcaggtcgatgacctgaagggagtccggaaagaggttttcgaggtttctgaagcgactatccgggaagcgatggataaattggtggcaggaacatcactgacttatactttgcggcaggacggagtagtcgttttatctcaaacacaacctcaatccagggaatttaccgtttcagggtttgtactcgaggctgaaacccggaaaccgataccctatgccactgtttttataccggatttactgatcggtacttctgcccgggaagacggggcattcacacttaatcatgtacgtcccggaaaattgaaacttgaagttcgttttatgggacggatcagtctggatacggttattcaggtgaatgcgaatgtgacgaatctccgtttttatttgcaggaagaaaatttcaggttgaatgaagtacatattacggccgagaacagcaaagccggacaagctacttcctccaagatttcccgtttggccatggatcatatgcaggcaaccagcctgggagatgtgatgcagttattgccgggtgggttagcaaccaatccgaatctgggatacgcctcccaattgaatctccgtatgatttccgagaatgcttccggcataccgggggtgacggatggagaagaggaagctgccaatatgaatagtttagggactctgattatccgggatggggctcccgtttccaataatgccaatctgcagactgtaagtcctgctatcacaggtgccgggactgctttgggcggaacatcttcaccggccggaggtgtcgatgtccgggctatctcgacagacaatatcgagtccatcgaagtgattcggggaataccttctgtcgaatacggagatttgacttcaggggctgtcattatcaattcgaaagcaggccgggaaccgttccgcttacgttttaaaaccaacgaaaacatttatcaggtatcggctggtaaaggatttaatctgggagggaagaaaggaagcctgaatatcagtggggattacgcttataatgtgacggatcctatgcaatcttatgtatactatcaacgggctgctgcaaaagtgatgtattcgaatatattcttacatgatgttctccgttccaatacttcggtagaggtgatatatggggataataaacggaaacaaaatccggatgatgaacggctccaactgaagagcaacggacgggatctcggtattgcgtttaatacgaacggaatttttgacctggattacggctggctgaaaaatctccgttatacgttggcagtaaattatatgaataagaagagttatgaacaaagattattgacaaatgcaacatatcaatattcgatgacgacgaccgacggtgcaattctgagtaatcggcccggtgtcgatttgtatgacgatcagggaaataagctgaccaatattcctgccggcgaagagacactttatgccaatatgttacccaacgattatcttacccgttatgatatcgaaggaaaagagctgaatgtgtttgctaaagtgatggctaattttgtcaagcaaggcaaccggatcaataaccggattttagtcggggcggattttaaaagcgatggaaacaatggagatggaaagactttcgatccggcgacgcctccataccgggtaaataccagtctgtattcttctttccgcccgcggaaatacagtgatattccgtttgtaaaccaactgggagtatatgcggaggaaaatttcagcctgaattttgccagacggaacctgaatttacagctcggtatacggtatgataaattgttcggacaccaggatatctggacgccccgtttgaatgcttctttagatgtattgccaaaaacatttacgttgagagggggatacggggaaacggctaaaatgcccacagtcctttatttgcatccggagaaggcttatttcgagatggtcaactttgtgagtctgacagatgataagattcccgaagctcaacggttgatgatgacgacgacccgggttttcgatacggaaaacaaagacctggaaattgctaaaaaccggaaagcagaagtcgggttcgatttgaatatcaaaggagtgaggctggcagtcaccgcttttcaggaacgcatgaataacggttattcgatggcttacttgccgactacttttaaatccgtcgaaaacaaacaatacaaaagcggggaattacctgccgatggagtgactgctcctgcgctgaccgaaaaggggacttaccgggtattgatgaaatatatgactcctcagaataacattacaatcaatacgcggggactggaattcgatctgaatctcggacggttcgatgcgattcgtaccgctttttcggtcaatggcgcctggttacggacagaacggttcaataacggttatacctattatgaaaaaggctccgaagatccggccaaagctcctcatgtggggatttatgaagccgctatgcggaaaaattattcagaaagaatggcgacgactttccgggtgacccacaatattcccgatatcgggtttgtggtgacattgtctgctcaggtgttgtggaaagaggccaactggagccgtttcggaaatgattcgatcccagttagttatatctcgaaagaagacgggcaggtatatcctttcgatccggctaaaaaagaggatgctgagtttaccgctatcatgcggacagtcaaccagaaagaccgaatccgggaatccatgcctccgacactctgtatgaatttgtatctgacgaaggaaattaaagactacctaagggtatcgttttttgcgaacaacatgttcagcagtcgtccgctatacaaacaaaaacggactatcggttcctatgaaagaagaaatattccgttattcttcgggttggaactgtcggccattatcaattag

SEQ ID NO: 366 - DNA, 5317 bp, unidentified
  source 1..5317: mol_type = unassigned DNA
atgttggaagaacagatacagatggtcgacttgcatggacaatatctccggttcaaagaggagattgatgaggccatgcaggcggtgatcgacagttgtgcttttatcaatggtccgcaggtgaaatcctttgccgggcatttggctgattatcttcaggttccatacgtgattccttgtgctaacgggacggacgctttgcagattgctctgatggcattggagcttcagcctggcgatgaggtgattctgccggcatttacttatatagcggcagccgaggttgtcgctttgttagggttgacgcccgtgttggtggatgtcgatccctgtacctttaatatcgatccccggaaaatagaagcggctgtttcggaacggacaaaggcggtcgtggccgtccacctgttcggacaagcctgcgatatggagccgatcatgactttggcagatgtctatcatctgtatgtagtggaagataacgctcaatctgttggtgccgattatatcttttccgacgggcgggtacgaaaggccgggacgatcggacatatcgggacgacatctttttttccatccaagccgttggcctgctatggcgatgggggggcgttgatgacttccgacgaggcgttggctgcccgtatccgcatgattgccaatcatggccaggaatgcaaataccaccataggcggatcggatgcaactcccgtctggacacgttgcaagctgctgtgctggatgtgaagttgaagcatctggaggagttcacggaaacccgtcggcaagttgcctctcggtatgatgaagctttgtcctcctgcgattcgttggttctccctgcgagatcgatattttcgactcatgtctatcaccaatatacggtccaggtaaaagacggcaggcggaatgtccttcaatgcctgttgaaagaacagggaatcccttccatgatctattatcctgtaccagtgcatcatcaggaagcttaccggcatatctcccgtgtatccggcaatttggacgtctccacccgtttgtgcgaatccgtcctttccctgcctattcatacggaaatgtccctcggacaacagcaatatataacagaaactctaaaaaaggggggcgaaactatcctgttcccgcacttgacgcgggatagcattaaaaccgaccctataaaaatctgattgataaggtctgtccttttgcggctccgcgtcaagcgcggggacaaggagattttgacacacccccatcgaatgcttatggataaaaagataaaatttgcagttatcggttgtggccatatcggcaaacgtcacgccgagatggtgacacgcgatccgggagccgaattggtggccctttgtgatattcgtcctcgtgaggaattgggtattgaggcatacgatgtcccgtttttctcttccctgacggagctattgcagagcggaatttccatagatgtcgtaaatgtttgtaccccgaacggcttgcatgcagcaatggccattcaggctgtcgaaaccggttgcaacgtcgtgatcgagaagccgatggcactgacgcttgccgatgccgagaaggtggtctatgcttcgctgaaataccgtaaacaggtgttctgcgtcatgcaaaaccgttattctcctccttccgtctggatcaaggagatggtggattcgggtaggttaggcaagatctatatggtccagttgaattgttattggaaccgtgacgagcgctattataaacccggtggctggcatggcgatgccgttttggacggagggacgctttttacccagttctcccatttcatcgacattatgtactggcttttcggggatatctgcaatatccaggctcgctttgccgatttcaaccatgccggacttacggcttttgaagattcgggctttgtgaatttcaacttcgtgaacggcgggatggggagcctgagctattccacttctgtctggaacaggaacatggaaagcagtatgctgattgttgcggagaacggaagcgtgaaaatcggcggacagtatatgaacgaagtcgaatactgccatatcaaagattatgaaatgccggaactggcgccgacgaatccgggaaatgactacggcccttataaaggttccgcccagaaccataatttcgtgatccgcaatgtggtccgtgtcctttccggtgcaagttcggaatgtattacgaccaacgtactggaaggcatgaaggttgtggacatcatccagcggatttatgcattgaagtaataaatgtaagatagggacggggcggcgtttaaatatggattccgtattcatgctttacctcgtccatcacaaaggtgctttcgagcgatccgaggctgtcgatcgtgcctaacacgttcaagataaactcctggtaatacttcatattcggtgcatggatcttcagcaggtagtcgtaacttcccgatatattgtagcattctgtgacttgcggaatttcttgtatgattcttgtgaactcctccgcaatctctttgttcagtctcctcaacttgacactgcaaaagaccacgaagcccaggtttagcttttcggcgtccagcacggcaatgtacttctttatatatcctccgttttcgaggcgtttcaggcgttcgaatacgggtgtcgacgagaggctgacactcgcggcgagctcttttgtggtgagccgggcattcgattgcagggtacggaggatctgcaagtctactttgtctaatttctcaagtgtgttcataagaataaaattctatcagaatccttttttcgatcctgatacagtttatgcgttctgttgacgaccgtaaaaatagcgttattttctgtattttccatatatcttgtctgatatctctgtctgctatagttttgctggaaaatgagcaagaagaacaatttaaaataatacgactatggcaacaaagaaattacatttcgagacattacaggttcatgtagggcaagaacaggccgatcccgcaacagatgctcgtgccgtccctatttatcagacaacatcttatgtatttcatgattcacaacatgcggcagaccgtttcggccttcgtgatgccgggaatatttatggccgcctgaccaattcgacccagggagttttcgaagcgcgtgttgccgctctcgaagggggagtggctggtctggcggtggcttccggtgcggcggccgtgacgtatgccttgcagaatatacttggagtgagtgatcatattgtggctgccgacaatctctatggcggttccttcaatctgattacgcatacgttagcgactcagggcattacccacacgattgtaaatgtcaatgacttgcaggcgttggaggctgctatccgggagaatacgaaagcggtgtatgtcgaaacgttcggtaatcctaattctgatgttaccaatatcgatgctgtggcggaggtggcccatcgtcataatattccgttgatagtagataatacgttcggtacaccgtacctgatccgtccgatcgagcacggggccgatattgttgttcattccgccaccaaatttatcggcggacatggatcgagcttgggaggagtgattgtggacagtggcaatttcgattggaaagcaaatgccgataagttcccgaccttgggcaaaccggacccaagttatcatggggcggtctttgccgatgtggcgggtccaacagctttcgtcactcgtatccgggctgtcattctgcgtgatacaggagctacgatctcgcctttcaatgcttttatcctgctgcaaggtctggaaacattgtctctccgcgtggagcgtcatgttgccaatgctctgaaagtcgtcgagtatttatccaaacacccgaaagtaaccaaagtgaaccatccggctcttccagaccatccagaccatgaactttataaaaagtatttcccgaaaggtgccggaagtattttcactttcgagatcgaaggcgggcaggaagcggcctggaagtttatcgattcgctggaaatattctcccttcttgccaatgtggctgatgtgaagagcctggtgatccatccgtatacgactacccattctcaaatgactccggaagagttggccggacagcatatcacgccttccattgtgcgcctgagtataggtactgaatatatcgatgatatcattgatgacctagaccaagctctggcaaaggtttgatgtaagatggcaatgtgtttttgttttgatgcaagtgtaagttgttttcgacgttgtcgagaatatatttgacgttgtcgggaatatatacggcaatgtagaaaacaacttacgcttgcatctgaatgaagaagtatgggttcgaatttttattttatcctgaatagtttgtttttgtaatcgataatcacggtgttttcaaagaaataagcatttccggttattccccagacatcgagggtactataaatactatcccaaaggccgtctttggcgtagtagactttcgaattgttcaaggcttttccgccgaactcgatcggtttggttacattaaagccataaaatgttatttcttgtccccaccataaaggaccgcttagagagtcgacaatagtaaggtctgatacgctccaagctctttcttgtgtcgttattaactggaaagggcttgaacctgtatcgaacaatactttacatgtttttccattaatccgtaaaggcaattttatttccccatattctgattcaaattcttcagccagcagattttcgtattcagccggtaaaaagtctgtgattacaagcctgtttgatttgtaatcaatgattaagactttatcttgcaccatgtcggatgcgatcgttccaatatgcttgggggtatttgaatgaagtgaatctttagggattttatttccgaaattctgcatgaatccgatattggcattgctaaactccactgtccctatttgcaggttgacattcttatacatcccggttgaatcttttttgttcattaaagatggggcttctttgagataaggagcaaaagtattcccgtaaaagacagaattatatgctcctaaatcaaactgcattgtgaattcgtagggtaaattctctatttttaccggaacatttagaaaagctttttcaatgtatatccccgaaattgtatcaccttcccaactgaagggaatccattgcagcgatggttttcgtgaacaatttgtaaagattaatagaaggagtacaaaagtaatcccttgtttgtgtatttccat

SEQ ID NO: 367 - DNA, 14707 bp, unidentified
  source 1..14707: mol_type = unassigned DNA
atgaagaaaattataacactggtatcttgtctgatttcgttttcatgtctcttttcccggggatggaaaggggatgatacgattgcttttcgtgacagtttgatgaggaaggtggaacatttaccagcagatacttctcgtttgtctgtgttgctggacgcggcatatttgcatcagaatcctccttataatgtgttttttgccaagtgcctttatgaagaagcacgtaagcagcagaatatctattatgagaatttgggtgcctattatctggctgtctgttatgataaaaaacatgatttggacagtatcaccctttgggtggatgagttgcaggaacttgcttccaagataggcaagtatgattattatctggaacaaaaggctgctatcagtcgcgtgctggcttctaaaaaaatgaatgaaaaggcggcttttgtggcaaaagaagttttgaaagaggcacaagagagaaaaagtaataatggcatagtggctgcctataatagtttgggatgtacgtatgctgcttttaatcgttcggatgaagcacttgcagctcttctaaaagggtatcgggcttgcaagaaaacgactaaattgagtttgcgcattgatattctttctcgtttatcaagtagatatgctgatattgtttccggtttgccttctaaggaccccgatagagtgaagagagattctgttttgttttatttagagaaaatggagggcttgttgaaagaagtgttgtctaaggagcccaagactgtgaataattggagagatgtaatggtggattgccaaaccaggtatgttcgttattatatgcatcataaggattattctaaaacggctgaattccttgaaaaagccaaaaacttgcttactccggaagtggattcggtgtattggctgaatatacaattgatggaattgcagtattatgcccggacacaggaatatgataaaggaattgcattgatagaccaggtcgctccgtttgtcgaaaggggacatatagatgtattcgaaactcttattttttataagtctttgatattgcgtgataagggtgactggaacgaaggcatccatacattgaagtttttgctgcataaacaggattctttgagtatagctacaaccaccagccagttggaacaagtaaaagagaattatcaaatcaatgaattgctgatggaaaagcaaaagattactaacctgaactatcttcgggctattatgattttgggtgtactattggttttgatgctgttgttttatctttataccggttacctatcaaagagaattgctttggcagaaaaggaggcgataaaggctgccgagctttcgcatactgataatttggctaaagaacggttgaaacttgaaatcagtcatgatatacgtactcctttgaatgctgtggtgggttttgccgaaattttggctgatgcggataatttggatgaagaaagtaaatctgcttataataagattgttcaggagaatgctacacagttattggactatgtgaataatatccttgagctttctcgccttgaatcggggaaaataaaatatgtggaaggcagttgtgactttatcggtctgtttcgcgctgtgatagaggaggctgataaaaacgggcagaactgtgtgcatgcagagttgcataccgatttggagaaacagatggtcagaacagatcaggcacgtttactttctttgtttgaaagtttagccgtctctaccgtggacacggaattttatcattcggatataacagtaaaacgtgtggaagaaaaatcgcttttactggtgacggttgttaatacaccattggcaaaggagcgttttgagaataaaacggctatgattcgtaatgagataaatgctcactttattcattatttcggaggatattataaagtagacgaacaggcaaaacaaggaccttctgtgacttttacatatccgtatgatgttgccggtctgcatattcattgaaaagtttcacgaaaggattgagttacgtcgagagtagacaaaggcagttgtttttctgtcttacttccttattgggtatggcttttttcgattaaaatataactttaacactacttttttgcatatatgcgcaaaaatattctgctttttgtatctatattcccaaacaatgcgtaattttgcaatcgaatcagaataattatgcagtatgaagagcaagaatagcagactggatgccatcaaaattataatttcctgcaaggaaataggaagtcaggaagaactgttacaggaattggctaaagaaggattccgcctgacacaggctacactgtcacgtgatttgaagcaattgaaagttgcaaaggctgccagcatgaatgggaactatgtatacgtattacctaataatacaatgtataagcgtatgaccgaacagcattcggccggcgaattattaatgcataatggctttatttccattgagttctcggcaaatctggctgtgataaaaactcgtcccggttatgccagcagtttggcttatgatattgatagtaaagattttgatgaaattctgggaactattgccggagatgataccattatgcttgtggtgcgcgaaggttgcacagagaccggggtgaagaacgcactttcactcattataccgaatatacaataaaaataatatagaataagaaatggatgctaaacaagttgatgtgatggtggctgatgcctcacatgaagtttacgttgataaaattttagataccatcagggaagcagctaaggtacgcggaacgggcatcgcagaacgcacacatgaatacgtggcgactaaaatgagagaaggaaaagcgattatcgctttatgtggcgaagagtttgcaggctttacttatattgagtcgtggggaaacaagcaatatgtggccacttcagggttgattgttcatcccgattatcgtggcttgggattggcaaaacgcattaaggcggcatctttccgattggcgcgtttacgatggccgaaagctaagattttcagtctgacaagtggtgcagctgtaatgaaaatgaatacggaattgggctacgttcctgtcacattcaatgagttgacggacgatgaagctttttggaaaggttgtgaaggatgtgtcaatcatgatatattgatggcaaaaaaccgtaagttctgtatttgtactgcgatgctttacgatccgtctttacacgaggaagacacgatttaaagaagaaataatagaaaaaacacatattattatggaagaaaaaaagaaaaaagtagtagttgcgttcagtggcggtcttgatacttcgttcactgtaatgtatctggctaaggaaaaagggtatgaagtatatgcagcttgtgcaaacaccggtggtttcagtgaagaacagctgaagcagaacgaagaaaatgcttataagctgggagcagtgaaatatgtaactttggacgttactcgggagtattatgaaaagagcttgaaatacatggtattcggtaatgttcttcgcaacggaacttatcccatttctgtaagttcggaacgtatcttccaaggattggctattgcccgttatgccaatgaaataggtgctgatgctattgcccacggctcaaccggtgcgggtaacgaccaaatccgttttgatatgactttcctggtattggctccgggggtagaaattattacccttacccgcgatatggcgttgagccgtcagcaggaaatcgattacttgaacgaacatggttttgctgctgattttacaaagttgaaatattcatataatgtaggtctttggggaacttctatctgtggcggtgagattttggactctgcacagggattgcccgaaagtgcatacttaaaacaagtgactaaagaaggcagcgaacaacttcgtcttacttttgagaaaggtgagttgaaagctgtgaatgatgaaaaattcgacgatccgattaaggctatccaaaaagtggaagaaatcggtgctgcatacggtatcggtcgcgatatgcacgtgggagataccattatcggtatcaaagggcgtgtaggtttcgaagctgctgccccgatgctgattatcggtgcacaccgtttccttgaaaaatatactttgagtaaatggcagcaatactggaaagaccaggttgccaactggtatggcatgttcttgcatgaaagccagtatctggaaccggtgatgcgcgatatcgaagctatgcttcaggaatcgcagcgcaatgtcaacggtacggctatccttgaactccgtccgctttcgttctctacggtaggcgttgaatctaaagacgatttggtgaagactaagtttggtgaatatggtgaaatgcagaaaggctggacggcagaagatgcgaaaggctttatcaaagtaacttcaacaccattgcgtgtttattataataaccacaaggacgaagaaatctgattatgattaaagtaggaattatcggtggggcaggttatacggcaggcgaattgattcgtctgctgattaatcatcccgaagtagagataaagtttataaacagtagcagcaacgccggcaataagattaccgacgtacatgaagggctttacggtgaaaccgatttggtatttaccgaccggcttcctttggacgagatagatgtattgttcttctgtaccgcccatggtgacacgaagaagtttatggatagtcataatgtgcccgaggatttgaaaatcatcgatctcagtatggactatcgtatcaagagtgatgaccacgactttatttatggcttgcccgagctgaatcgtcgtgccatctgtcatagcaagcatgtggcaaacccggggtgttttgctacttgtatccagttggggttattacctctggcaaaacacttgttgctgaacgaagatgtgatggtgaatgctattacgggaagcaccggtgccggtgtcaaaccgggtgcgacaagccacttcagctggcgcaacaataacatgagcatctataaaccgttttctcaccagcatgtgcccgaaatcaaacagtcattgaagcagttgcagaacagttttgattctgaaatagattttattccttaccgtggagactttccgcgtggtatctttgccacattggttgtgaaatgcaaagtagaactggaagagctggtgaagatgtatacggactactatgccgaggattcctttgttcatatcatagataaaaacatagacttaaagcaggtggtgaacaccaacaagtgtttgattcatttggagaaacatggcgataaactgttgataatctcttgtatcgataacttgttgaaaggtgccagcggtcaggctgtccataacatgaacctgatgttcaatctggaagaaaccgtaggcttgaaactgaagccggctgctttctaaaaaagaagagttatgaaattattcgatgtatatcctcttttcgatattaatatcgtaaaaggaaaaggttgccatgtatgggatgataaaggtacagaatacctcgacctgtatggcggtcatgctgtcatttctatcggtcatgcacatccgcattatgtagaaatgataagcaatcaggtggcacggttgggcttctattccaattcggtgattaacaagttacagcaggaagtggcagaccgattaggagagatttcgggatacgatgactatcagctgtttctcatcaacagtggggccgaagcaaacgaaaacgccttgaagctcgcctctttctataacggacggaaacgggtgctttctttcagcaaagcatttcacggacgtacttcattggcagtagaagcaactcataatccgaagattattgctccgattaatgcgaacggtcatgtgacgtatctgcctttgaatgatatagaagctgttaaagcagagctggcaaaaggcgatgtgtgtgctgtgattattgaaggaattcagggggttggaggtattcagatacccgatgctgaatttttgcaaaacctgagcaaggcatgtgaagcggcagacgcggtgcttgtgctggatgaaatccagtcgggttacggacgaagcggtaaattctttgcccatcagcatgcgggtatccgtcccgatatgataaccgttgcaaagggaatcggtaacggtttccccatggcaggtgtcttgattagtccgaagttcaagccggtatacggacagctcggtactactttcgggggaaatcatttggcttgttccgctgccattgccgtgctggatgtgatgaagcaggaaaatctggtggagaatgccgctaaggtcggtgcccacttattggccgaattgaagaaacttccacaaataaaagaagtccgcggtgaagggctgatgattggtatggaatttgctgaacctattaaggaattgcgtcagcgtttgttgtttgaacaaaaagtattcaccggtgtcagtggcacaaatgttatccgcttgttgcctcctctttgtttgagcatggctgaggctgatgaatttttagctcgctttaaaaaactcttttgattgaaagaagtttgcaataatataagaaagtgaaaatacatgtcctgtggatgagtattttcactttttccttttatctttgacccaattgattttaaaagaataaggtatgaaaatagcaattatcggtgcaggaaatatggggggcgctattgcacgcggcctggcccggggaaccatagtgaaagcaaatgaaatctttgttgccaatcccagtaatggaaaactggacgcgctgaaggcggagtttcctgaaatcaatgtgacaaacgataatgatgaagtggtgaaagaagccgatatcatcattctggcagtgaaaccgtggatggtggaacaagtgctgagttttactaaattggatattgagcgccaggtgcttgtctctgttgcgggtggtctgtcgttcgaccgtttttccgaatgggtaagcccgcagatgactattttccgtgttattcccaatacagctatttccgaacgccaaagcatgactttgatagccagtcgcaatgccagcaaggagcaggagcaattaatgctggatatttttaatgagcttggaatggctatgttgatacccgagagtcagatgggagctaccactgcattgacttcttgcggcatagcatacgtgttgaaatatatacaggcagctatgcaggcaggcattgagatgggggtttgcccgaaagatgctcagaagatggtggcgcagtcggtaaaaggtgctgccgaactgatattgaataatgatacccatccttcggtggagattgataaggtaacgactcccggaggaataactatcaagggtatcaatgaattagaccatgccggatttacttcagccgttatcaaggcgataaaggccggtaacgtagaatgacatagcctttctctaagtattgaatttcagtatgtaaagacaatcggctcttgctgtattcataaatctctgccactgatttataaaccggaagcggtaatttataaatcagtggcagtgacttataaatcggtggtgctgattaatgaatatatagggaggttacgaagaatatctctctttccatttgttttttgtgttgtaaataaacagtaattccaatgtggcttttccatttcacgaaacactgcaccgggggacatttggtcagagccggagcttatggaaaagaatagaaagcagttatacagggtaatgtaaggggagttccacaacaaatcttgcacctccggtgtattgtgtgtccagatagattttacctcccaacagggtagtgaggctccggcaaatactcaggcctagtccgaaaccgggattcatgctgttcagcttctcaaaacgttggaaaatcaattcgcctttttccttatcaatgccacagccggtatcggtgacagagaaaatgatagaggtgtctgctatctcataagccaagacgatactgccttgagaagtgtatttgcaggcattgaccagtaggttggtcaatatctgttgcaggcgttgcgcgtctgtattcaggatgatttccgtatcgggttgtttcagctccagtctgacgccttcggccactctgtgtgccacgcctgctaaagtggattggcatagttcgggcaagacgacattggatagcgagatgctatagttgccgctttccagtttgctgaggtcgagtacatcgtttaccaatgtgagcaataaattggtattggtatgcagatgaccgagtaattcgctccgctcttcttcgctgaattctgcaccggcatcgttcagcaaatcattaaaaccgataatggcattgagtggcgtacggatttcatgactgaggttctgtaggaaagccgatttcagcttgtccgctttttcagcttgctgccgtgctttttcggcagcttctttttctatctttaaatgcctggcatgttgccggcgtgtaaaagcatatatgctggagaagccggaaataagtatcaggatggagaacaccacccaaatcttgcgctgattggtttttttctccatttcaatacgttgtaactgttcttgctggtgtatgacttccaagcgttgtttttgtgtttcggctttttccagttcgatggctgtttgttgttgcttcagttgcaagtcctggttttccagcttcatgcgcgtctgttctttttccatcagtatcatttgttcccgattttgcatttgtgccagtttcatttctgtgttttggagagacaggcggttcttttccaattccagcctttggttattgaaacgggcgttgtatgccgccattacttccgcattgtttgcttggttgatagagtcttgcagacggtattttttgtatagttcggcaaaggcggaatagaaatcccctgccatttcaaatgctttgtatctgaccgcaagactcaatcctttgtcactgatggaatcactgtatgcaagggctttgtcaaggtttcccaatgctgcataataataaccgttcagagtgaaatagttttcaaggatggcccctttcatcactccctgagctctgtactgcgctaattctttttgaagttcgtcggctttttttaaatccattttgctgcatgtcacttgaaacaagagtagtttggattgtatcaatgcagattgggtgacggaagcatctaaacatcttagggcatattcttcggcttcttcgtatcgctgcagatttatatagcatgagcttatggagcgatacgaataaaagttctctttttcattgccggtctgtatgtagtaatccacagcctgtttgtattgttggagggcaagccggaacatgcgctgctggtaatacacatctcccatgcgcacgtagcttttccctatgccgtaaggattgtccaaacgaatggcttcgtcctgatattttttcagttcttggatggcggaatcatattccctgtttctcaaatagtaagtgataatgcggttccatgctccgaatatgtattgcttataaggagtattgcgtgcaaagtcggctaccttttctttctcgatgagcaatgtattgatatcgttgataaagtaataatggtcggatttcaggttcagggcaaggcattgcgctttcacgtctccttttttctctgccatgtggaagagtgtatccgccatgagcaatacttcgggcttcctgatggcgttgctgcacttttggtaataggaatagagttggtcgtttattttataaggattgttttgactcatcgttgtcgggcagaaaagaaatatttccgccaatagtattaggatagtatgcccgatgaacctcttcatatcattctgtgtgtctttggcaaaaatagtgattcttttataattcatgctatcatttatcataagttttatggagcatggattttttctatgtttcttcatggatatagggaggtatctgctccgggcttgtggggtaatccaaactgttaccattcttacggtgcagaagaaaacgtggttgcaacgctctatggtagcgcagcttccgttccttgtggcgcatgatggttggactacattatccggcttttttcacacgttgggaatgtttttgcagtcctattgcccgaatactttcatttgaaactatccgaaaggcaaccacttccttaaacccgtgtccttgctcatatagaatgatattgtgcagtttcgctgtctgtcagatagttttcatagaaacttcttgaaactttgctaggattaattaaatcttcattatctttgaaccctaaatctaaagattatgagtgaccagataaagcaaatagccgaacgtctccggggattgagagacgttttggaactgacttcccaagaagtggccgaaagttgccaacttacagtggaagagtatttgggtatggaaagcggtgagaaagatatatcggtcagcgctttgcagaagattgcccgcaaatatggtatcgcactggatgtgctgatgtttggcgaagagcctaaaatgagtgcttacttcctgactcgttgtggcacaggggtatcggtggaacgtaccaaagcatacaaatatgaatcattggcatcgggattccgcggacgtaaggtagatccgttcatcgttaccgtggagccgaagcccgaagatacgcctatttatttcaattcacacgaaggacaagagttcaacctggtgatagaaggacgtatgttgcttaatattaacggaaaagaacttattttgaatccgggtgacagcctttactttgattctgcccagcctcacggcatgatggcactggacggcaagactgtgaagttcctggcagtaattatgtaaattgtaagagtatggtagaaagattcttagaacaaaccacttttgcctcacaagaggattttataaagaacctgaagattaaggtacccgaaaattttaatttcggctatgatgtagtagatgcctgggctgccgaggaacccgacaagaaagcgctgttgtggactaacgataaaggggaatccagacagtatacttatgccgacctgaagaaatataccgatatgacggcgtcttatttccaaagtctgggtatcggtcgcggtgatatggtgatgttgatattgaaacgtcgttatgagttctggtattccattatcgctctgcacaagttgggtgcggtggtgattcccgccactcatttactgaccaagaaagatattgtgtaccgttgtaatgctgccgatattaagatgattgttgcggcaggcgaagatgtgattaccaagcatatcatagaagcgatgcccgattcgccttctgtaaagaagctggtcagtgtcggtcccgaagttcccgaaggtttcgaagactttcatcagggaatggaaaatgcggctccgtttgtaaagcctgagcatccgaataccaatgaggatacctcgctgatgtattttacatcgggaactaccggtgagccgaagatggtggcgcatgactttacttatccgttggggcatatcgtaactgcctgtttctggcataatctgcatcgcgacagtttgcatctgacgattgccgataccggttgggggaaagcggtgtggggaaaactttacggacagatgattgcgggggcgaatatctttgtgtatgaccatgagaagtttactcctgccgatattctcggaaagattcaggactatcatatcacttcactgtgtgctcctcctaccatttatcgtttcttgataaaggaagatatcagtaagtatgacttgtcgtctttggaatattgtaccactgccggagaagcattgaactattctgtatatgagacgtttaaaaaaataaccggtattcgtttgatggaaggtttcggacagacggaaaccactttgacgttgggtacttttccctggatggagccgaaaccgggcagcatgggtgtccccaatccgcaatatgatatcgacttgctgactcccgatgggcgttcggcagaagacggtgaacagggacagattgtcatccgtacgtctgaaggcaagccgctgggtttgttcaaagagtattatcgggcggccgaactgaccgaagatgcttggcacgatggcatttattataccggtgatgtggcttggcgtgatgaagacggatacttttggtttgtgggacgtgcggatgatgttatcaagagctccggctaccgtatcggcccgtttgaagtggaaagtgcattgatgactcatcctgccgtggtggaatgtgccattacgggtgttcccgatgaagtgcgcggacaagtggtaaaggcgaccatcgttctttccaggaactacaaaggacaggaaagcccggaactgattaaagaattgcaagatcatgtgaagcgtgtgactgccccttataagtatccgcgtgtgatagagtttgtagaagagctcccgaagactatcagcggtaagattcgtcgcgtggagatacgtgataaagataaataaccgggggagtgcgttgagcgaagtctttattcgtaaataaagtaaaagatgaaaagaattttgttttttgcctttttatgcctgtgtgtctgcttgtcggcaggtgcacaggcattgtctcctgttacatggactgcctacggattgacttttaaggttccgaagggtattgttgtggaagaggatacagaagaaacgtttttgttgaacgatagtaagttttatatcactgttcaggcgttggactctgacggcatcacgaagggtgacctggaaggtatgttgaaagactatgccgacgatgatggtgtggagaagcagactgctgtcaaagcctttgacttggagcaattttatggtgtttcgatggatgggcaatgtgagggggagccttgttgctatgcctgtctgatgaccaaggcggccgggagtgcatttcatgtttccatcatttattcggtggggaaaaaagctgaggcggaagctattctgaaaagttttgtgatggaagagtaagcgaatgcagtcagttctgtgcattcggggagtcaaagcattattaaagttaactgtaggggcggggattgcccgcccgaatgcatcaagtaaagtgtattcgggcgagtgtccccgcccctacaggcaaagtgataggttgattgggtcttgataaaacctcctattttgctcttaccttgaattgcaaagcaataggttcattctttattcctttgggaagaaatacttttactttatcaccatcgcaagtatatttcacactcttgtttcctttcagcattttcattttgcttttcggaagatttcctgtccattctatgacttccggcagtgtttctccttcgggcaatgcatagatggcatagagtgtctgtccgtccttgtcggcagtgaaccatgtgtgtccgtcctgataaacaggagtgattcgggtattgtagatggctttgccgtttgcccgcaaccattctcccacttcgtgtagacgcttggccacttcttcttcgatgacaccgtccggggttggtcctacgcccagcagcaggcaaccacctttggcagtgatttcactcaatatgttgataaccttttgagacgatttgaatggagcattcggcacccatccccaatcattgctcagcgtgatgcaactttcccacggatagttgagctgtgtttcggggatgccgcgttcgggagtctggtagttttcgtttttgcccctgatgctgcggtctaccgaaatcaatcccggatgcttccggcgtgcttgtgccagaatatcgtccagaccaatgtcatcacctttcacccagccgccgtccagccaaaggatatcaaaacttccgtagtcggacatcagctcattcagctggttacgggtaaaggtctgatagtttttccaccagtcgggatggcggtctttcttgtaattgatgttacggtcgggggtagcgaaataaggattccaaaaccattcgcaatgccagtcgggtttggagaaatagcatcccgtcatgaaacctcttttgcggaaagcatcgaatacatggtaagctacattcttgcgcggattgtccttgaaggctccgtgggcaatggagaagtccgtgtacttggaatcgtaagtacaaaatccgtcgtgatgtttggtggtgaatatcatgtatttgatacctgcatcctgcattacatctgcccattgttcgggattgaagttgaccggattgagcgagtctttcaagccccagtaccactctttgtactcatcgtatggcaaaggttttttgcgtgaaatccaatcgacatcttccgagcagatggaccatgactctacaatgccgggaacggagtaaagcccccaatggaacaagactccgaacttctggtcttgccatttatccagtttatccaatacttgttggtcggtaggccatacataatccgttgcttctgattgcttgtggacaaagccttgtacttgctgggcgtgaaggttcaaagcgaacgctgcaccggccatgcatacgattagttttttaaggttatacat

SEQ ID NO: 368 - DNA, 7997 bp, unidentified
  source 1..7997: mol_type = unassigned DNA
ttaatcatccagtacagaatctaaaatcgcaatcattttatccacatcgcttttttcaataataagcggcggaataaaacgaatgacatttgcgcctgcgctcataaaaatgacgcctttttccaatgcctttgtaatataaggaccggcaggaacggaaagttccaagccacgcatcagtcccataccacgtgtctcaacagcaatttcttttttctccaccaatttctgcagacattcattaagatactctccaacttcttctacatggttcggaatttctctcttttcaaaaatttccagtgtctttgccaccgctgcgcaggcaagtggatttccgccaaatgtcgtgccatggtctcccggcacgaggcattttgccacttcttcttttgccgcaattgctcctaccgtaataccgtttccgattccttttgccattgtcacgatatccggcacaatatcgtatttctggtacgcaaacatcttaccggaacgtcccatgccacactgaatttcatcacaaatcataatgatgtcattttcatcgcacaatttgcggattccctgtaaaaattcagcatttgcaggataaattccaccttcaccctgaacggcttccacaatgatggcatatgtattttctgtaaccgctgcttttacactctctaaatcgttgtaatcagcaaatgtaacaccctgtaacatcggttcaaacggctctctgtattttgccgtaccggtaacggacaatgctcccatgcttcgtccgtgaaatgctttattcatcgaaataatctcatgacgattttcatgtccctgcataatggcatatttccgtgccattttcaaagcgccctcattggcttccgtaccgctgtttgccataaatacacggtcaagtccggttgcttttgcaagacctttggcggcctgcaataatggctccgaataaaaatagttagaaaaatgaattcctttatcaatctgtgctttcaaagcatctgtgtattccttatccccatagcccaacgcacaaacggcaattccggcaccaaaatccaaatactcttttccgtctgtatcgtataatttcacgccttctccatggtctaatacaaccggataacggttatacgaatgaactaaatactgttctgattcatctatcatctgtttcatatcacatgctccttcctaatcctgctcatgcggatacaatgttgtgtggttatcaataatcgctgtaccaataccttttctggtaaagaactcaagcaaaagacaatgctgtctgcgtccgtccagaatatggacgcggcttacaccttcttctaccgcttccacacagtttcttattttcggaatcataccaccgccaatggttccatcctcaattaactgttttgcctcatctgttgtcaatacagagagcaatgtttccgggtctttcgggtctttgcagacaccctcaatatccgtcataaatgccagtttttctgcatgaatacactttgcaactgcacttgccgcatcatcagcattgatgttatatgcctgataattttcatccataccaatcggtgcaataatcggaataaaatctttggcaatcaaagtatcaatcaaatcagaattaacggattttacttttcccacaaaaccgatatctcttccaccggctgtttttttctcacagagcattgtgccaccgtcttttccactaatgccggctgcctttactccaagtttctccatcatctgaactaaatgcttatttactttatttaaaaccatttccgccacttcaattgtatcggcgtccgtcacgcgaagtccttctacaaattcgctctcttttcccatataaccaagccatttgctgatttcttttccaccgccgtgaacgataatcggctgcatgccaaccagtttcaacaaagcaacatctttaatcactgattcctgcaatttttcatccagcattgcgcttccaccgtattttacaactactttttttccgttgaaatcacggatataaggcagcgcctcaatcagtgtttccgccttaagtacaacttctttcatcttgtcttccatctttttgtcctctctaacttctgtaatcgccatttatttttacataatcataagtcaaatcacagccccatgcagttgctgacgcatctccctgcttcatgtcacaaatgaacgtaaccgcatcttttcctaataaaatagtcgcctcgtcttcactgtaatctgtcggcacaccatcttttactaaaacaatctgctcatcctcagcttctaaaatcaaatcgattacatccgggtcaaagtctgcaccggaataccccagtgcgcacaaaacacgtccccagttcgcatccttgccaaacaccattgctttcacgaggtttgaagtcacaaccgatttactaaaaatctttgcctcttctttattcttacagtgaactgctcttacttccatcagcctcgtagcaccttctccatccgctgccatctgttttgccaaatccgttgcaacaaaactcagtgcctccttgaattttacatatccattcgttcctgctttaatttcaacaccggattcgccattggcaagcaccagatatgtatcatttgttgatgtatcgcggtcaaccgaaatcatattaaaactatccgatacaatttccgaaaccatttcctgcagtagatcatgtgaaatttttgcatcggttgtcgtaacgctaagcattgttgccatattcgggtgaatcataccggaacctttactcatgccaccaacagttacggttactccatccacctcaaaacttactgcagcttccttcggaacagtatccgttgtcataattgcctttgccgcaagcagacctgcttcttttgtatccgcaagcgcatcctttaaaagctttgcgcctttttgtatcggttctttctttatctgcatcccgataacacctgttgaagctgtcaagacctcttttgtcgaaacaccaagtgcctctgcaatttgtgcagccatgtattcattaatttctttgccttctccgccggtacaagcgttggcaattccgctgttcaatacgaccgcatggacatcctttttattctcaacgatttctttatcccaccagaccggtgccgcttttacaacattcgttgtaaaagttcctgcacagactgccgggctttttgtataaacaagtgccatatctgtgcggtttttatatttaattcctgcttctgcgctcgccgccataaatccttttgctgcggtaacgccgccttctattgtattcatcatattttcctcctttacggaaccatcggtacaagccgaagcccctctgcctcatcaaatccaaacatcagattcatgttctgaactgcctgtccggcagcaccttttgtgatattatccattgctcccatcataatcacgcgatgcgtacgctcgtctacttttacatttacatcgacaaagttacttccctcaacccatttggtctccggacacacaccctcatccagcacgcgcacaaaatattcatcttgatatgctttcacataagcctctcgaatctgctcttttgtcacaccttctttgtattttgcataagctgtaaccaaaataccacgattcatcggaatcaaatgcggagtgaaattaagtgtaacatcttttccactaatataggaaagctgttcttcaatctccggtgtgtggcggtgtgtggcaactccatatgccttaatattctcatttacttcgcagtaaaggtttggaacttttgcacctcttcctgcccctgatgttccggatttagcatcaataattaaagtatccatatcaataagtccttctcttgcaagcggtgcaattgaaagtgttgaacatgttggatagcatcccggattagcaactaaacgtgcatttttcacctgctcacggttcaactcgcacaatccgtataccgcttcctccaaatactgaggacttttatgtgtaatgccgtaccatttttcatatacagcgacatcttttattcggtaatcggcactcaaatcaatcacctttgcctgagaaaggatttcatcatccagaacacctgccaaatacccctgcggtgttgcggtaaaaatcacgtctgcctcttttgccaaagtatgtaaatcatcacttttacaaatattttctacaatctgaaaaacatttccaaaaacggaactaaatttcttatccacatagcttctcgaaccataccatacaatctcaacttctttgtgctgcaataataatcgaaccaattcctgtcctgcgtaccctgtagcaccgataattccagcttttatcatagcatcctccattccgccgtactttggcagctcactctttttattcatcatttatgcatatttatacatattatacacaaacctcaattattatacatcttttccgataaatatgcaatacctaactagaatttattcgttattctttgaaaataattgattttatgcttgcataatattcacttgtggtgtatattagaaaaaggttaataccaaaaaatacatacggaggttctattatgaaagaaaaagttattttagcttattccggcggcctggatacaacagcaattattccatggcttaaagagaattttgattatgaagttatctgtgtctgcatcgattgtggacagggtgaagaattggacggtctggaagaaagagctaagttctgtggtgcatccaaactttacattgaggatgttgtcgatgagttctgtgatgaatatgtagttccttgtgtacaggctcatgctgtatatgagaacaaataccttcttggtacttcgatggctcgtccggttattgcaaaacgtcttgttgagattgcaagaaaagaaggcgctactgctatctgccatggtgctaccggaaaaggaaatgaccagattcgtttcgaactcggtatcaaagcacttgctcctgatttgaaaattattgcagcttggagaagtgataaatggacaatggattcccgtgaatccgaaattgaatactgcaaggcacatggaattgatcttccattctccgcagattccagttacagccgtgaccgcaacttgtggcatatcagccatgaaggtcttgaattggaagacccggcaaacgagccaaactttgaccatcttctggttcttggtactacaccggaaaaagcaccggatgaaggtgaatatgtaactatgacatttgaagccggcgttcctaagagcgtaaacggaaaagaaatgaaagtttccgatattatccgcactctgaatgaattaggtggaaaacatggtatcggtattgttgatatcgtagaaaaccgcgttgtcggaatgaaatcacgtggcgtttatgaaactcccggcggaacaattctttacgaagctcatcagcagctggaagaattaattcttgaccgcgatacaacaacattgaaaatggatatgggtaataaacttgctcagatttgttacgaaggcaaatggttctcccctctccgcgaggcagttcaggcatttatcgagtccacacagaaatatgtaaccggcgaagttaaattcaaactgtacaaaggaaacattatcaaagccggaactacttcaccatacagcttgtacaatgaaagcattgcaagttttacaaccggagatttgtatgatcatcatgatgcagaaggcttcattaacctctttggtctttctaccaaagttcgtgcaatgaagatggcagaagtagaaaagaataataagtaaacaaccgtattgttgtaaataacaaaacagccttccatccaatgatgtgaaggctgttttatttatctttttatatcacttatatatcagaagattttatgcatcttcattggtatcttcttctgctaactgttcgtattcatccgtagaaccaaactcagcaaattcagagaagtcctcatcctcatatgatgctgccgcttcatctgtctcttctgtctcttctgtctcagcagaatcctcaacttcatcagtctcagtttcaaccgcatcatcaacagtctcactttcctctgcatcgtccggaatcgtaagataaacatcatcatctacctcagtttccgcatcctctgctgcttccgcttcctcataggattcttctgcaacatcttcataatcacttgcagtcaatccttcctcatctgcatctgttacaaacttagcaacttcagaatccaaacgacggcttacatcctctgttacacgaatgcttgtctgaatatccatcatactatccgtcaatgtagttacagactcagatacaccggatacctgattggaactatcattaatcgtctctgaaatttcatgtatcagtgttgccatctcatgcatcgtatctttcaatgcggttgcactgtcagcaaactgaagcatcaatgtatcaatacgatttgcatcgtcgttatactggttaccggtatttacaagattatcataatccggcatgacctcattttgaataaacgtcagcatcttattagcattgtctgcaagctctcctactgaagaatttacttccaaactgatatcctgaatgttatttgctgtctcacggctcgaatctgccagtttacgaatctcatcagccactacagcaaatcccttaccaacctcgccggcacgtgctgcttcaatggatgcattcaatgcaagcaggtttgtctgagaagaaatctccaaaatatcatttgtcaatacattaatcttttcaacatctttactcttttcaagagaactctgaagcagtgtattaatttcacttgccatctctgccgtcatcttacggcgtttctgaccactctcctgcaatgcattcgcacggtctttaatttcctttgcgaaatcagaaccattatttgcctcaccggcaatatgctccattgcttcataaacacgtcctgcctggtcattcaaatggtcggcatggtttgcaacctcttccattccggcagaaagtttttccattacctcagataccagtttgatatcgccattcgatgtatttacaccattaaacacctgctcaacattaccctgcagctcaacggcatcggatttgatttccataataatgtcgcggagtaaatcaataaacttattaattccgacaaccagtgttcccacttcatcttttgtttttacctgaatctgggatgtgaggtcaccgtggtcttgttcaatacttcgtacaataccgttcaagtgacgaattgcatgtttggttggacgaaggattgtcgctacaaccattaaaatacagaatacaatagaaacaaccaacaaagcaatcaaaacaacaaatgctaatgtactctgtgatgcagctgcactaagtgctccctgcgaatcctctactttctggctgttcaccttctgcatgtcatcaatagcactctgaaatttcttgtagataggctctaccgcttcattcaaattcttcatgccattcagttcataatcatcaattgcctttttcgatttctggtaagactcactaaatgttgcatacgcagctttatagtcttttaaagcatcggcttcaccactgtcagaactcttctctgcaataacagaaatatccttatccatgcgttctgtagcttctttaatatcctttgataactgttttaaatcatcgtcatcaaatgcagtcacatagcgagccagcttatactgaagcaatataaaatctgactccatctctcctgtcttctccgttatcgtcatgtaattgtcgctaatcgacttggttgcccggttcatctgtgcaatctttgaataaatcaatgtagaacacagtccacatacaattgcaagaatacaaaacggcaccatgattttcaatccaattgacttcctcat

SEQ ID NO: 369 - DNA, 7781 bp, unidentified
  source 1..7781: mol_type = unassigned DNA
ttataaagcctttcggttactgataactcgcatggcggcagtgtactgctgacaaggcacagacacgtgaatgccattacctttgtcctctgttgaagcggtgatgtaagctgacttcagcaattgcttcacactttccacttcccaggggctacctgcgaaaacgttaatctgagaaatctttctacttgtaatcatgtgctttaaactttttagttgtactttccggtcgcaaatgtaagtggtttgcgggaaaccgaatagctcaaatcgatcaaaaagtaacataaaaggtgcaaacgatttagaagtagcttattcctcatatttttttcttatttcgtatcgttcttccggatttccacacgacggatctttccactgatggttttcggcagttcgtctacaaattcaatcacacgaggatatttgtaaggggctgtcactttctttacatgattttgcaattccttgataagtgcttctccctctttccctttatattctttagccagtacgatggtagctttcactacctgaccgcggatttcatcaggtacgcctgtgatggcacattctattacagctgggtgtgtcatcagagcactttccacttcgaaggggccgatacggtaaccggaactcttgatcacatcgtcggcacggcctacaaaccagagatagccgtcctcatctttccaggcaacgtctcccgtatagtagatattattgttccaggcttcgtgtgtacgttccggatcgcggtaatactctttgaacaatcccagtggcttacccttgtctgtacggattacgatttgtccctgttcaccggcttctacggaacggccgtcattgtctatcaggtctacatcgtattgtggattaggcaatcccatacttcccggtttcggttccatccaaggcatggtagcaatggtcagcgtggtttctgtctgtccgaatccttccatcagtttgatgcctgtcagtttcttgaaggtctcaaatacggctgggttcagagcttcgccggcgatggtacaatattgcagtgatgagagatcgtactttgtcagatcttcgtgaatgaggaaacggaagatggtgggaggtgcacagagagaagttacatgataatcctgtatcttctccaggatggcggcaggggtaaatttctcgtggtcatacacaaatatatttgctccggcaatccattgtccgtaaagtttgccccatacagctttcccccaaccggtatcggcgatggtgagatgcaggctgttttccgtcaggttatgccagaaactaccggtaacgatatgccccaacggatatgtaaagtcatgggcgaccattttcggttcaccggtggttccgctggtgaagtacatcagtgagatatcttcgttcgtattcggatgctccggcttcacgaaaggtgcggcattttcgatccctttgtggaaatcatcgaatccttcggctacttggggacctacactgacgagtttcttcacgctgggggaatccggcatggcagctacaatatgatccgtgataaccgattctcctgcacaaacaatcatcttgatgtccgcagcgttacagcggtacacgatatctttctttgtcagcaagtgagtggcgggaatgacgacggcaccgagtttatgtaaagctatggtactgtaccagaattcaaagcggcgtttcaatatcaacattaccatgtcaccatggccgatgccgaggctttggaaatacgaggcggtcatgtccgtataacgtttcatgtcggcaaacgtaaattgccggtgttcacccttatcattagtccataacaatgcaggtttgtcaggttgttcggcagcccaggcgtctactacatcgtatccgaagttgaagttttccggtacgtttattttaaagtttttgataaagtcctcttgtgtagtgaaagaggtttgtgataaaaatctttctaccataattataggaattaagaatgagagattcccttcattctccatttagttgttacatgataattgccaggaatcgtaccgtttttccatccagtgctttcatgccatgcggcaattttgaattgaagtacaggctgtctccttcgtttagtataagctctttgccatcgatgttgaccatcatgcgcccttcgagcacaagactgaattcttgtccggcgtggctgttgtaatgtatcggttcatcgtccggtttaggttcaacggttacaatgaacgggtctacgctacggttcatgaaaccagaagcgagggcttgatatttgtaggccttggtacgttcgatgctgacgccttttccggcacgagtcaggaagtagctgctcattttaggttcttcaccaaacatcagtgcgtccaatgaaactccgtatctgcgtgctatcttttgcaacatacttacggagatatcaaaatctcccgtttcggcaagacggtagtcgtaaggagagatgtcacattcacgggcaatgtcttcagcggtcagctccagtacatcacgaagcccgcgaaggcgttctgctatttgcttaatttgttcgtccatgtggttgtttatttaatgaattaattgttagtcttattgcttacttgctttgatagcattgatgatggcggatgtataaccgtcatgttccagttcattgatacctttgatggtaataccgccgggggtacatactttatcgatttctacgctgggatgcgtatcattattcagtatcagttcggctgctccctttaccgattgagccaccattctcatagcatctttgggataaatccccatttctataccggcttgcatggcagcctggatgtatttcaacacataagcgattccgcaggaagccatggaagtgcaggctgcgaatttttcttcggggatcagcatggcaagtcccatctgattgaaaatatccagcatcagttgttcttgttctttggtcgcattacgactggcaatcagtgtcatactttccatttcgctgatagcggtgttaggaataatgcggaacatggtcatttccggttcgggtacgtagtgagccagctcttcaaagttgatgcctgcagcaacagaaatgataatttgtttactcttcagtttcagttcgcgcagcacacctttgataagccacggtttcacagcgagtatgatgaattcggcgccgatgatggcttcctgattgtcatgggtgatttgtaaagcaggaaactctgcttgtagttcatccaactttccttgtgagggattagaaactatgatatccgaggcggggataatacttccctttgccaatccacgggctatagagccgcccatgtttcctgctccgataattgctgttctcatatcattctgttattaaaagggttgtcgatgggcaaaggtagatattttttctacctttctaacctaattgatgtaaaaaaagtgcttgtgtatttaaaacaacaggcagccttaagaaacgctgaaacgcttgaaggctgcctgtttattgctgattatgttatcaaatatactttaaagtacttttctgaaacgttcgaggaagagattggcttcttccatgctgaggcagaggggtggaagcaggcggagtacatttgtaccgctgacaccggtaaatacatgttgttctttcaacagtttcagacgaagttcctttatcggttcttcaaattcaagaccgatcatcagaccacgtccgcgaacttctttgatctgcgggaacttttttaactccgtcatcagatactcacctaccttggctgcattttcaaccagattctcctgacctattacgtccaagacagcaagcgctgcgctgcatgccaggtgattaccgccgaaagtagtgcccaactgtccgtaaaccggagtgaacatcggactgataagtataccggccattgggaaaccgttaccgatgcctttggctaccgtgataatatctgctttgataccattatattgatgagcgaagaacttaccgctgcggccataaccgctttgaatttcgtccagaaccaatatcgtattatgagctgtacaagcttcacgcaaagcctgcatgaattcatctgtcggcaattgaataccacccacaccttgaataccttcgataatcactgcgcaaacatcaccttttgccagttcgtttttcatagcttcaatatcgttcagcggaaggtaagtgacatgtccgcagtcattaataggagctatgattttgggattattagtcacttccacggcaagtgaagtacgtccgtggaatgccttgttgaaggaaaccacacgtgtacgtccgttgtagaacgaagcgagtttcaaagcattttcgttggcttctgcaccgctgttaatcaggaataaggagtagtcatcataaccacaaacttttcccagacgttcagcaacctgttcctgtagcttgttaatcacagagttggaataaaatcccaacgtggcaacctggttgctgatcatctccacgtaatgcggatgtgcatgaccgatggagataacagcatgtccaccgtagagatcgaggtactcagtaccgttctcgtcccacacgtggcagccttttcccttgacaatgttgatgtcaaaaaggggatatacgtcgaataagttcatttctttaattctaaattacaaaatacaaattacttagaaggcgctgggtttcaatcgcaagccgacggtttcttctaaattgaacatcagattcatgttgtgcaccgcctgaccactggcacctttcagcaggttgtcgatgcaggagatgataagcagcttatcaccgtgcttttccaaatgcagaagacatttgttggtgttcactacttgtttcaggtcgatgttcttttctacgatatgcacgaaagagtctttggcgtaatattcttcgtacatacggactatttcatccagtgcaactttagtttttactacgatggtagcaaaaataccacgtgcgaaatcaccgcggtaagggataaagtcaatatccgcatcaaaactgttctgcaattgcttcagagattgcttgatttcgggtacatgctggtgctcgaatgccttgtaaacactcatgttgttgttgcgccaactgaagtgactggttgatcccggttttacaccagccccggtggaaccggtaatggcattcaccatgatgtcgttgttcagcatcagatgtttggcaagggggagcaatcccaattggatacaagtggcaaagcaacccggattagccacatgctttgctttgcaggtagcgcgacggttcaattccggcaaaccgtaaataaagtcatgttccggagaagcgatgcggtagtccatagaaaggtcgataattttcaattcctcgggaaggttgtgactctccatgaacttcttcgtgtcgccatgggcggtacagaagaataacacgtcaattttgtccaaaggtaactcgtcggtgaagacaaggtccgtttcgccgtacaatccttcatgtacgtcggtaattttgtttccggcgttacttgagctgttgatgaatacgatttccgcttccggatgattgatcagcaaacgaattaattcacctgccgtatatccggctccgccgatgattcctactttaatcatgttagtttatactattattcttttatctgttatacaagttcttttcctcgggaacaataagccacattataaggtacacggggataccggcaaatacggtaaaaaacgtcaataacgcatagccgatacgtacgagtgaagggtcaagtccgaaataagcggccaatcctccgcagacgccggcaagcattctgtcgctgcgtgagcgagttagttttttgttattattatccatatctgttcgtataattgttctatcccctaaccgttctctatgagagatgggttaggggataggctttttagatttcttcgtctttatgattgttataatatactctcagtggagtagaagtaaccttgatgaaacctttcgcatcttctgctgtccagcctttttgcatttcgccatattcgccgaacttcgttttcacaaggtcgtcttctgattctacacctaccgtagagaaagataatgggcgaagttccagaatagccgtaccgtttacgttacgctggctttcctgtagcatggcttcgatgtcgcgcatcaccggttccagatattggctttcgtgcaggaacataccgtaccaattggcaacctggtctttccagtattgctgccatttactcagtgtatatttttccaggaatttatgtgcaccgataatcagcatcggagcagcagcttcgaaacctacgcggcctttgataccgataattgtatcacccacatgcatatcacgaccaataccgtaagcggcaccgatttcttctactttctgaatggctttgatgggatcatcaaatttctcatcgttcacagctttcaactcacctttttcgaaagtaagacggagttgttcgctgccttcctttacacagtgtttcagataagcgctttcgggtaatccttgtgcggaatccagaatctcaccaccgcagatagaggtaccccacaaacctacattgtaagagtatttcagtttggtgaagtctgctgagaaaccatgtttgttcagataatcgatttcttcctggcggctcaatgccatatcacgagtcagtgtgatgatttccacgcccggagccaatacaaggaatgtcatgtcaaaacgaatctggtcgttgcctgcaccggtagaaccgtgagcaatagcatctgcgccaatttcgttggcatagcgtgcgatggcaagtgcctggaagatacgttcggaacttacggaaataggataggtaccattacgcagcacgttaccaaataccatgtatttcaagctcttttcgtaatattcctgcgtcacgtcgatagtgacatattcttttgcgcccagtttataggcgttttcttcgtttgttttcagttgttcggggctgaaaccaccggtgtttgcacaagctgcatacacttcataccctttttccttggcaaggtacattaccgtaaatgaagtatcaagaccgccgctgaatgcgactactacttttttcttttcttccatatcctttgttttttaaattttatcatcttcatgcagagccgggtcgtagagcattgctgtgcagatgcagaatttgcggttcttggctactaatatatcatggttgatgcagccttcgcagcctttccagaaggattcgtcatcagtcagttcattgaaagtgacgggaacgtatcccagttccgtattcattttcatgacggcggctccgctggtgagactgaatactttggcgttgggccatcgcaagcgtgccaggcggaaagatgccattttgatacgcttagccaatccaataccgcgaaagtcgggatgcacaatcaaaccggaagtcgcaacatattgtttgtttccccaactctcgatgtagctgaagcctgcaaacacgtctccgcataaggcgatgatggcttttccttctttcatttttgtcgccacatattcgtgtgtgcgttctgcgatgcccgttccacgtactttggccgcttctctgatggtatccaaaatcttatccacataaacttcgtgagaggcgtcagccaccatcacgtccacttttttggtatccat

SEQ ID NO: 370 - DNA, 7526 bp, unidentified
  source 1..7526: mol_type = unassigned DNA
atgaagggaaaacatagaattattgtatcaacaaagcgcttaaaatatgattttgaaattcgaagaaatctgacggtcatccggggagacagtgcgacaggcaaaaccacattggtagatatgattcgggaatacgtaaataatccatccggtacgcccgtggaactgacgtgtgacaaaaaatgttatgtgctcgaaggttcactgtggaaagaacagttatcagcaatgcaggatagtattgtatttattgatgaaggaaacgaatttatcaagacagtagaattcgcagatactattcagaaaacagataattattatgtcattgtttccagggaatccttgccttctttgccgtatagtgtggaggaaatctatggaattcgtacttcaggaaaatacggaacattaaaaccgtgttatcatgagttttacagaatatatggagcacagactttaaagaaggatattaaaccagaggttgtaataacggaagacagtaattccggttatcagttttttaattctgtatgtaggcaacagcaattgaaatgtgagacaatgaatggaaagtcaaatgttttccattatttaaatatgcataaaaatgaacgcatacttgtaattgcagacggtgcggcatttggttctgaaattgacagagtgatgcagttgatgggtggaaaagatcaagtggtgctttatttgccggagtcatttgaatggctgatattaaaggcaaaagtagtaaaaagcaaatgggcagatcaggtgctggaaaagccgtgggaatatgtggaaagcaaaacatattttagctgggagcggttttttacggcagttttgattgaagagacaaatggttcttaccttgcatatgcaaaaagaaaattaaatccagcatatctgaacgattctgtcaaagattccatactggaacagatgacaaaaattaaattgttttagggaaaaagtgtgataaaatagcagaagatgtgattttttctgcaaaggagtaagagacaatgttaaaaggaaaatgtgtggtactcggcgtgaccggaagtatcgctgcctataaaatcgcctatctggcaagtgcgctcgtcaagcagcatgcggatgtgcatgtgatcatgacggaaaatgcaaccaattttattaatcctatcacgtttgagacgctcacaagcaacaagtgtctggtcgatacgtttgaccggaatttccagttcaatgtcgagcatgtggcactggcaaagcgtgcggatatttttatggtagcaccggcttctgccaatgtaattggcaagatggcaaacggaatcgcagatgatatgctgacaacaacgattcttgcggcaaaatgcccgaagtatgtttcccctgccatgaataccaatatgtttgaaaatccgatcgtacaggataacatcaaaaagctggagcattatgggtttcatatcattgatccggcgagtggttatcttgcctgcggggataccggagccgggaaaatgccggagccggaaacactgttttcttatattatgaaagatcttgcctgtgaaaaggatatggtcggaaaaaaagtaatggtcacagcaggaccgacacaggagaagattgatccagtgcgttatattacgaatcactctaccggaaaaatgggctatgcaattgcgggaaactgtatgcgccgtggcgcggaagtgacactgatcacgggaccggtggcaatcactccgccgccgtttgtaaaggtcgttccggttgtatctgccgcagatatggcggcagccgtaaaggagacagcagagcaacaggatattattatcaaagcggcagctgtggcggattatcgtccagatcacccggtcgatgagaaagtcaagaaaaaagacggggatgccactcttacgatggaacgcacggaagatatcctttcgtatctgggcgcgcacaaaaaaccgggacagtttctgtgtggattttccatggagacggaacatatgctggagaattcccgtgcaaaacttgcaaaaaagaatgcagatatgattgtggcgaataacctgaaagtagccggagccggatttggtacagataccaatgttgtgacgctgattacggcagatgactgcagggaactggaaataatgagcaaagcggatgtcgcatcagcgattgtgagtgaaattttaaagaaaatgtgttagtattaaaatatgacagacttagaagcctattataataaatttaatgaagagaagcgtctggacagccgacacggcagggtggaatttgtgacaagcatgcattatatccatcagtgtctggatgaaattgtgaaagaacgtgcaaaagaggaaatccatatccttgatatcggggcgggaaccggacgatacagcgtaccgctggcacaggaagggttcgatgtgacggccgtggaactggtgaagcataatctggggcgtctgaaacagaagggggcaggcgtgcatgcatatcagggaaatgcaatgaatctgaaaaaattttccgatgattcctttgacgtaaccctgttgtttggaccgatgtatcatctgcatgaggaaaaggacaagcttgctgcgctgcgggaggcagtgagggtgacaaaacccggaggcaggattctcgtggcatatattatgaatgaattttccgttatcacgtatgcgtttaaggaaaaacatattctggaggcgcttcaggagggaatgctcacagaggattatcactgtacttcaaaagccaatcctctgtattccatggttcgtctggaagatattgaagcattggaccggcaggtagaggtcaggcgccggcagatcatagcggcagacggtgcagcaaattatatgcgtccgtttttaaatgcgctgacggaagaagagtttgatgcgtttctgcagtatcatctggcaacctgtgaacggatggatcttatgggtgcaagcggtcacacggtggatattcttgtgaaagaggagtctgaaaacgtatgaaaaaatggatattgccaatcctaatggcaggatttttgctgacgggatgttcttctcctgcagcaacgtcatcggctttgccctcttctacggaaaaaatcacggagacacagatgacggaagaaccgggtacgctggaagaaacggaaaccgggactgcaactgaaacgcagcaggaaccggtgatacagacggtaaaaattacggcgacaggtgactgtacgcttggggcaacacagacgcatgggtatgcaggttcctttcatgaatactatgataaatacgggcaggattatttttttaaaaatatcagaagtatttttgagcaggatgattttacactgatcaatctggaatgtgtgttgtcaaatgcgaccgagcgtgtggaaaaaacgtggaacttaaaaggaaaaccggagtatgttggtattatgacagacagttctgtggagggggcaagtctgggaaataatcatacgtttgattatgggcagcagggacttgatgataccagagaagtgttaaataaagcagggattatcttcggattcaatgatcatgtggatacctataccacgaaggatggtatcaaaatcggaattgtctccgcaagccagctgtccgctgatgaaacacatgccaattatatccgggatgggattgcagaacttcgggaagaaggagcggatctggtaattgcctgttgccactgggggatagagggggatcattatccgaatgattatcagcagaagctggcacaccaggtgattgactggggagcagatctgctggtcggtacacatcctcatgtattgcagggaatggaattatacaacggaaaaatgatctgctacagtcttggaaatttctgctttggggggaacaggaatccaaaagacaaagatacggcgatctatgaacagacctttacctttgtggatggggtactgcagacagatatatcagccgatatgataccatgcagcatttcttccacatcagaaagaaataattttcagcctgccatagcaaaaggcgacagaaaacagacgattattgatcatatgaatgagtattcggaaaagtacagtaaaatcggatttgacgcaaatggcagggtaatcatcagggaagagtagggggatactataattttatgtggcaagtaaataataatgataagaggaatcagcacatgaatgcaagtttttggaattatccgtcaaaacagaaaagctggccgatagacgaagaaatggaaagtctcggggaagtcattcatccactcgataatatcggtggatttgatgtacgtccgggattttatcagatgaatggtgcatatcagacagaggaaggggtaagttttaccgtaagctcccatggagctacgagctgtgtcctgctgttattccggccggcggcacaggaaccgtatgcaagaatccgcattccggaaagttataaaattggaaatacgtattctatccttgtttttggcttaaaagcagaggattttgagtatgcctatcagatggacggtcctgccgatcaggcgagagggttactgtttaacagaaaacatacgcttcttgatccatatgcgaaagctgttaccggtcagagaaactggggagaaaaaccggaaggcggaaaggattttgtctataaagcccgtgtggtgcaaagtgattttgactgggggcggtatcggaatctgaattacaaatttgaagatctggtgatctatgagatgcatgtcaggggatttaccaaagatgcgtcctccggtgtaaaaggtgggggaacatttgaaggtctgcgacagaaaattccgtatttgaaagatctgggaatcaatgcggtagaactcatgccgatttttgaatttgatgaaatggaaagtgcccgtgtggtggatggcgtgcagttgtacaattactggggctataatacggtttccttttttgccccgaatacaagttatgcatttcatcaggagcataatcatgagggtgatgaattaaagcgtctgatccgcgaactgaaagaaaatggaattgaagtcattcttgatgtggtattcaaccatacggcagagggaaatgaagacggtccatgtttttgctttaaggggattgataacaatatttattatatgcttacaccggatggatattattataatttcagcggctgtggcaatgtcttaaactgcaaccatccggtggttcggaggtttattacggattgtctgcggcactgggcagtagagtaccgtgtggatggattccggtttgatctggcatcgattctgggaagagatcagaatggtgcaccgatggagaatccgccgattctggaagcccttgcatttgactctattctgggggatatgaagctgatcgcagaagcctgggatgcgggtggcttgtatcaggttggaagttttccgtcatggaaccgctgggccgaatggaacggaagataccgtgatgatatgagaagctttttaaagggcgacagtggcgtcgcagggcgtgcaattacacgtatcaccggatcctccgacatgtatgatccggcaagccgcggatatagtgcatccgtcaattttctgacctgtcatgatgggttcacgttgtatgatctgtattcatataatgaaaagcataatgagaaaaacggatggaacaatacggacggggataacaacggcctgagctggaactgcggggtggaaggtgagacggatgatccggcggttatgagcctgcgacgcagactcgtgaagaatgcatttgccgcgttgttatgcagccgtggaccggctatgttttttgcaggggatgaattttgtaatacgcagtatggaaataacaacgcatactgccaggataatattatttcctggctggactggaacagactggaagaatttcaggagattcatgattttgcccgttttatgatccatttccgtgcaaagcatccgattctgcgaagggatacaaagccggcagtctgcgggttaccttccgtaagtatccataacggagagccgaaccggaattatacggactataatacacatttaattggaatcatgtatgcgggaagaaatgccgatgatacggatgatgatatgatcttttacggaatgaatgcgtattgggagcctttggagatgcgcctgccttcgttgccggagtcttatcattggaaacttgtagtaaatactttctgtgaataccaggatggggcagattttgaagctcagacacagggagatcagacacgtgtgcgtgttccggaacgttctacggtaattttactggcagaacatgatttataaaaaaagagttgagcaccgctctggaaacagggcgtgctcaactctttttttcggtggtatcgggtctggttgtaatttcactggttccgatgaggtaatctgcagaaacattcagaatctgcacgatggctgcaagatccgcaacggtcggagaacgacgaccggtacggtatccgctgatcgtggacggcgaaacaaacattgcatttgccagctggatattggaaatattttgtttatacataatcagactcagacggtcaccaaaatctttgtatttatttttatcattcgttttcatacaaatgattttatagaaagttgatataaaaaacagagaaaacgcgtattgcgttttaattcttaaataaatggaaaaagatttccaaaaagataagaaattaaatccatccgccgtctaaggtgagaatctgtccattcaggtaactgcttgctgtggcaagagaatatgccagtgaagcaacttcttccggggatcccatccggccggcaggaatttcttcgatgagtgcagagcgttcttcctcggagaaacaacggttcatatccgtatcgattaccccacaggcgatggcatttacctggatattgctaggggcaagttctttgcccaaagcgcgtgtaagggaattgatcccgcctttgcatgcagaataggcaacttcgcaggaagctccgacatttccccatacagaagaaatattgatgatatgtccggatttggcatgaaccatggaggggatgacctgtctgcatgtggaaaagacggatgtgaggtttgtcgcaactattcggttccagtcggtaatatccatgtcggttagcagaccgatataagagatgccggcattgttgattaacacatcaatctggccgaaggtatccagtgttttttgcaccatgtcacagataaaagtatagtctcctacatcaccacggaagcaaagcacctgtatggagcaggttgtttcaagttttgtggcaagtgcctgcagcgtttcataagagttatggcagcaaagagccagatgatagccttcagcggcaaatcgacatgccagggctgcaccgattccacgggatgcacctgtaatcaaagcagtatgtttcat

SEQ ID NO: 371 - DNA, 7299 bp, unidentified
  source 1..7299: mol_type = unassigned DNA
tcatttcaaaacaaccgtaaagcagctgccgctgccggggcggctgtccacagtgacagcgccgccgtgcagggcggctattttttgtgccatggcaaggcccaagccgttgccctgcgtccggtggctggtgtccccctgatagaactgctcaaagatatggcggcaggtttcggcgtccataccgcagccctggtcagtgacagccacaaccgggctgccctgctcgctgtgcagtgttacgcttatgattccgctcttcgggctgaacttggcggcgttgtccagcagattcagccagatctcctttaccagcgtctcgctgccgtggtaggtgcagggggccagctcggcctcaaactgcagcggcttatcgcgccacttttgccgggtcacaaggatgcactggcgcagctgctcatccagcgaaaagtctgtgcagtcggtcagaatggtctgtgcctcgatacgattcaatagcagcacactgccggaaagctgcgccagccgcctgctctcatcgcggatgatttgcagatactcgcgctgctcctccggggtgacatcctcgtccagcagcaggtcggcaaagccgctgatgctgacgatgggcgtcttgaactcatgggaaaagttattcacaaaatccttgcgcagcagctccgtgccggaaagctcctccgccgctttgttgaaggctgctttaaactcccggatctcggtaggctcatacccgtgggcagcaggctgcagacgcacggtgaagtcccctgccgccagccggttcatcgcctgtatgatgtttttgataggctttattaatacaaggcgaatcgcaaccacaaggctgacggccatcaaaatacaactggcatacaaaataaccagcgcaccgccgatgctgacgctgccgtcttggataaaaaagccgtggtcagcctccaatacaaccagcaccgtgacagcggtcagattcagtgtaacaatgaaaaagaggttcagcaccagcagcatcgtcaaatttacggtgcgtatgcagtcgcgcagcttgtttacaaattgcgccatattacaccttctttatagcacggtagccaatgccgcgaatggtctgtatctcaaactccggccaatcgtaaaagcgggtgcgcagccgattgatatgaacatttaccgttttgtcgtcactttcgctgtccatgccccagatctcatccagcagctccagccgggtaaaggtcctttccggataagccagcagcttgtataggaggttgaactccttgggcggcagcacctgtgcatcgtggccgcgccgcacggtatgggtgtcgtagtccatctcgacatcccctatcgtgattttgtgttcatccacgatgcgggcgcggcgcagaagcgccttgatgcgcagcacaagctcctgccggtccggcggttttgtcatataatcatcagtgccaacgataaaacccatgtgcttgtcctgcggcatatccttggccgtcagcattaaaataggcagcatgctgccgctttcccggatggtcctggtcagggtaaagccatccatccggggcatcatcacatcgcagagcagcagatctatatggttgtggtcgagcatttccagtgcctgcacaccgtcggcagcaatcagcggctcatagcccgctcgctttacgatggcgcaaagcagacgcgccgtgctggggtcatcctcggcaatcaaaatacgaaacatccgtgtatcctccttagttctattatagtacagcgcaaagataaacgaaagataaacattcccgtttaccaaaggtttattttggcggtgtatccttaggagcatcgaaacaaaaaacaccctacgggaaaacggaggatacagctatgaaaaccatctatcttgtcaccggtgctgccggatttatgggcactaatgtctgcgcacagcttttggagcgcggtgatgctgtgcgtgcttttgtgctgaagggcgaccccgctgtaaaattcatgccgaaggccgtcgaaatttttgagggtgacctctgcagtgccgaggactgcgagaaattctttgccgtggagccgggcgtccagactgtctgcatccactgcgcgagcatggtgacgatcaacccgaattacagtgaaaaactcatcgccgtcaatgtgggcggcaccgaaaatatgctgaatgccgccaaaaatcacccggagtgcaaaaagttcgtctatgtttccagcaccggcgccatccccgagctgcctaagggcgagagcatccatgaggtatacagctttgttccctacgatgatgatcgcgtggtcggctggtacagccgcagcaaggcaatggcgacccagaaggtgctggacgccgccgctgacgggctgaatgcctgcgtggtgcatcccagcggtattcttggccccaacgaccccgccatcgggcagacgacccgcacgctgatccagattttgaacggtgagatgcccatcggtatgcagggctcgttcaatcttgtcgatgtgcgcgacctggccgccggtacgattgccgccgctgaccgcgggcgcaagggcgagtgctacatcctttccaatgacgaggtttcgctgaaggaactctgcgaaatgctgaaggcagaaaccggctgccgcggctgcctgttttacatgccgctttcttttgcgcattttgccgccaagcagatggaggcccgcgccgccaagaccggtaagcctgctgtactgactgagtttgccgtttacaatctggagcgcaacaaccattttgactgctccaaggcaaaaaatgagcttggctttgccccgcgtccctacaaagaaacactgcatgatttggcggtttggctcaagcaggagggaaaaatcgcatgaagaaggtttgtgttatcacaggcggcggcagcggcatggggcttgccacggcgaagctcgtctgtgaagaaggatattacacgattttggtggggcgcacggcgtccaagctggaaaaggcagtcaacgatctgcgcagtgcaggcggcgaggccgaggcgttcagctgtgatgtttccgaccgtgaaagctgttttgcgctggccaaatacgccgccgaatgcggcgaagtaaaagcggtattgcacatcgcgggcctcagccctcacatgggcgatgttgaaaagattttgcgcggcaatgcgctgggcacggtgaatatcaacgatgccttttatgaggtcatggcaccgggcggctgtgtgatcgacacctccagcatgagcgcctaccttgccccgcagtttatcatgcccaagggtgcgtacaagctggcgcgcaccgaccgtgaaaaattcatcaaaaagctggtggcgcgggcaggcatcgcccctaaggacgctcgcccgggtctggcctacgccatcagcaagcattttgtaatttggtttgctaagaccgatgccgcacgctttggcgagaaaaatgtgcgttgcctgagtgtgacacccggcaactttgacacgccgatgggcgcactggaaagcaggcaggcggatgtattcaaaaaatactctgctctcaagcgcaacggaaagccggaagaaatcgccgctttgtttgcgcttcttctggatgagcggctgggcttcctgaccggagcagacattcttatggacggcggcgttgtggcaagcggcgccagcggattgagcaaataaaaagggcagcaaagtaaaccccgattttagcttttggggtctgctttgctgccttttgaattttgtgctttcgcttggctgtactttagtgcagctcgctttcgcagcggtccagcacggcggcgataacctgatccatgtcgtaatacttatactcacccaggcgtccgccgaagatgaccttcgactcggcgtcggccagcttcttgtactcggcatacagtgcgccgtttttagcatcgttgacggggtaatacggctcgtcaccgggcttccactcggaggaatactcacggctgatgatcgttttgggcaggtcgttgccgttctcgtccttgccgaactcgaaccatttgtgctcgatgatgcgggtccacggcgtctcgcggtccgtatagttgacggcggcgttgccctggaagctgggcttgtcgagcagctcgttctcaaaccggacggagcggtactccaacgtgccgagtttgtagtcaaaataagcgtcaatcgggccggtgtagacgattttgtcagccagtgcgtccagcgcgaccttgttttcgaggtaatcggtgttcagccgcacctcgatgccgtccagaagattggcgatcaccttggtgtagccgccgatgggaatgccctgatacagcgcgttgaaatagttgttgtcaaaggtcagccgcacaggcaggcgcttgatgataaatgccggcaggtccttgcaatcgcggccccactgcttttcggtgtagcccttgatgagcttttcataaatgtcgcggcccacaagggagatggcctgttcctcaaggttctgcggctcgtgggtgatctcacggcgctgctcctcaattttggcggctgcctcctccggtgtgacgacgccccacattttattaaaggtatacatgttgaagggcagcgaatacagctcacccttatagttggcaacgggagagtttgtaaagcggttgaactcggcaaaccgggtgatatagttccagacctttttgttgttggtgtggaagatgtgcgcaccatacttatggacgttgataccctcgatgttctcggtataaatgttgcccgcaatgttggtgcgcttatccacgaccagcacggatttgccgtgggccttggcctcatgggcgaagatggcaccgtacagaccggagccgactaccagataatcatatttcatataacaggtgttcctctctttaaaaatcacagggatattgtgcggtaatggcattgagagccttactccaccgtcaaaaagcggcagaaaggcgtttcagtctctgccgaatagatctcttgtgtagaccttgtcctgcacatcgttgaggcaggcatcgtagcggttggccagaatggcctgactctgccgcttgaatttgtccagatcgttgaccactgccgaaccgaagaaggtcttgccgttctccagcgtaggctcatagatgatgacctgtgcgcccttggccttgatgcgcttcatgacaccctgaatcgagctttggcggaagttgtcgctgttgctcttcatcgtcaggcggtagacgccgatcgtgacgggcctttcgcggctttcgtcaaactcattttcctgatcgtagccgtagtacccggccagcttcagcacgcggtcagcgatgaagtccttgcgggtgcggttggactccacaatggcctcgatgagattttccggcacatcggcgtagtttgccagcagctgcttcgtgtccttgggcaggcagtagccgccgtagccgaagctggggttattgtaatggctgccgatgcgcgggtcaagacatacgccgtcaatgatctgcttcgtgttcaggcccttgctctccgcgtaggtatccagctcattgaaataggcaacgcgcagcgccagataggtgttggcgaacagcttgacggcttcggcctcggtaaagcccatgaagagcgtatcgatgttctccttgatggcaccttcctgcagcagtgccgcaaattcgtgggcggctgcgacaaggtgcgcatccttcggatcggtgccgacgatgatgcgggacgggtagaggttgtcatacagggccttggactctcgcagaaattccgggctgaacaggatgttccggctgccgagcctttcccgcaccgacaccgtgtagcccacgggaatcgtcgatttgatgaccatgagggcgtttggattgacctccgtgacaaggcggatgactgcctccactgcagaggtgtcaaagtgctgggtctggctgtcgtagttggtgggtgcagcaatgaccacaaagtccgcatcggcgtaggctgcctttgcgtccagtgtggcggtcagatccagctccttctcagccagatatttctcgatgtaatcgtcccggatcggcgatttgcgcgcgttgatcaatgcgaccttttccggcaggatatccaccgccgtcacatgatggtgctgggaaagcagcgtggcaatcgaaagccccacatagccggtcccggccaccgcgatcttatattttttcataacagttatactccgcagctgcgaattttccgtaaggcagcggtcaaaattacgccgtgccggcttaccgtatgtaggtttattatagcacgtcaccggccacaattcaacattgccgcttccatcagaattgtttgaacaataatccagtattgaaaacaatcgtctctactcagtctttgatgtatctgctaagatagaatcacggtactggcgtggtgtcagaccggtttgtttacggaaaacacgataaaagtaattgtcatccaggaatccgatctgctggcagatctgtgcattggacagattcgtatcgcaaagaagcttcatcgctttttggatgcgcagatgcgtgatctgctcgttgatgccgcagccatagagctgccgggaaagatagtacagcccggtacggcttaacgaaagatcacggcagatcgtttcgtttgtcaatgtctcatccagatgtttcgccaggtagtggctcagtttttcctgcgcactgcccgctgccagccgcgtcagtcccttttggtacaatgcagccgccgccaaagccagcagatccgctgctgatttcagcaccggatagggcgtgcgcggcaaggcattataggctttttgcagtgccgctttatcaattgcgtaagccgagcagcatttttgcgcatagctccactcgctctgctcatcggccccctgtacaatgtggctcaacagcaaaaagcccacaacagcaccatcgatttggaccggcgtgatcacttcgatcaaccccgcatggcaggggtagatgatcgtctgcttttgccgcgttgccttgcggcaagccgcctggtcacacaggtaacagccggtctttccatcaggcacactgcggatcaagcggcaataagctggcagttccggcggataggcaagcacttcgattccatacgaatcaaaaacggcggagcgcagccccgtaaggcagtgaaaatcctgcaagaggaccaaaagctcctttttattgaaaacggttcccat

SEQ ID NO: 372 - DNA, 21014 bp, unidentified
  source 1..21014: mol_type = unassigned DNA
ttattccacaggaacgatccagcccttggtgtcgggcagcttgccccactggatgccggtcagcgtgtcatacagcttctgggtcagctcgccgatgtggccgccgctgatgtgggcaaccttgccctcccaatccagctccttgacaggggagacaacggcagccgtgccggtgccaaagacttcctccagcttgccctcgtcggcagccttcatgatgtcggcaatggcaacacgctcctcatgcaccttgtagccccagtccttcagcagctcgatgatggagcggcgggtgacgccgggcagaacggtgcccacgcagggggcggtgtagatctcgccgtcgatcttgaacatgatgttcatggagccaacttcctcgacgtacttcttctcaacaccgtccagccacagcacctgggagaagccgcgctcctcggccagctcgccggccttgatggacgcggcgtagttgccgccgcacttcgtaaagccggtcaggcccggggcggcgcggatgtactcatcctcaacatagatgcggacggggtcgagtccctcggcgtagtaggcaccggagggcgcgcagatgatggcaaagcggtaatgcttggcggcatgaacgcccaggcccacatcggtagcgatgcagaacgggcggatgtacagggacgcgccgtcggagtggggcacccagtcgcggtccacatcgaccagcgccttgaccgcctgcacgaagtcctccggcgggatggggggcatgccgagacggtccgcggaatcgttgaaacggttcgcgttgcagtcggggcggaacagctggatcttgccgtccgcggtgcggtaggccttcatgccctcaaaaatttcctgtgcgtagtggaacacggtggtagccgggtccatctcccacgggccataggggacgatgcgggcgtcatgccagccctcgcccgcggtatagtccatcaggaacatgtggtcgctgaactgcttgccgaagccgagcttcgactcgtcctgcggcttttccttcggatgggtcgttttggtgattttaatgtccaacataatttcacactctcccttttatactcaagcgcaccgccgcacagcggtgcgggtgatggttaggtttattatagcgctgtcgcgcggcgagtgcaagcccttatttacaaaatgtgtattttgtgttgcaaaaagcgcaatttgcgttttccccggctttccacagttttcaacagcgccgctgtggaaaatgtggaaaataaacgttttttctacgtagattttcccggttttccgcttttgaacgggtccgggcggcagagttttccacgctttccacggagttttcaacatttccacggtggataaccgttatacgccgtggataactcggggtgaatatacggaatgtgaacggggtgtgaacagaaaaagcgtgccgctctctttcccacaagagagcggcacgcagtccaaactcaattttcttttcggtgcaccacaaacatcaccatgctgaacaccagcatgaacgctgccagccctgccgcaatcagcaaaatcagctggaagaccttcacgttaaagtttgtctgcaaattctcacgcgcggcggagaccacatccgaaccggaggaaaccgtcgattgggcgttattggccatctcctcggcggcggtcagtgcggcctgggcggcgtcggtgtcgcccaacgcctccagcgcgtcggccagtgcctgcccgcccatggcaaccagacggtcattcgtctcgctcttgatcttctcgtgattgaccgcgttggccaggtactcggcaaacaggtctgttgcgccgcgcacggcgggggcgtagtcgtccttgatctgccagcccttgacggtccacataccgttcatgtagaaaagcaactgcataccggaatcctccagcagagcactgtacacggcatccgcaaaggccgtgctcgaggtatccaccgtgccgaagctcagcgagatgaactccttgacgcggtcatactcggtcagattcgcgtagtagctgcgcagcgcctcggccaggtcggtgtcctttgtcaccttggagccgacgacgacggagtcgaggtccgcccgcaggtccccgttgctgaagcggctcagcgtgccgtcatcgtctttattaaaggaagcacgcatcgcctcggcgtagcccgcggcatcgccggcctggccgtaatactgcctggccagttcctcacagtcgccgccccagctgcccgtgatgggtataccgttgtagacaaggttcatcgacgccagcaggtgcccaaagtcgatgctctctccgttgggcaggacgacggtgttcatattctgcagcgacgccagctcggggtcactgctgttgacgcggctctcaaacccggcatcgcgcacaccggcggtcagctgccagatcgtggagttgtactcccccgtgcgggtgtaggccagcgtcagctcgatcgggtcgggcgtgtcggcctgactggccgagtactcctgcgccagcgcctgcaggcgggacaggcgatccagcaccgtgtcgtagtcctccgcatgggcaggcagtgccgccgcgcagaacagccccagcagcacaaacagcatagccagcaggcggggcatacggttcgctatagaattcgtagtcaagcacctccggtaaaacaggacaaagccggggcaaggctgcgcctgcgccccgggtctgactttttaaccaatttgtaatctttagtataccacatccgccccgggtttgtcacctgtttttttgtgtgtattctgtgcgtcttgactttttgccctgcataggttttaatagaggcattacggaggtaattctatgcacaaacaaccgcataaacgcgctttttatacccttgcaggctgcattgccgcgctggcgctctgcgtggcggcatcgctttttctgctgacgcccgcaccgaaagcgcaggacgtcaccatacccggcacgcgcggggacatttacgccacggtacagctgcccggcaagctggcccgcggggaggagctgccgctcgtcgtgctctgccacggctttaccggcagccgcagcggcgacggccactttgcgccgctggccgccgatctggccgcccagggcattgcgacggtgcggctggattttcccggctgcggcaacagcaccgagccgttcacggcctacacgctgtccaacatgaccgacgacgtcgagagcgccatcacctacatgcagcatacctacggcacggaccgcacagcgctggtgggccacagcatgggcggacggctggccagcctctacccgcagcgcaggggcggcatcacggcgctggcgctgtggagtcccgccaacggcgcgggcctgcgcggcatggagtttttgaacatcgacgacttttccgccgtggaagcgctggccgctgaggccgaggcgagcggcagcatcagcacctggggcgtcgatgtcagcggaacgctgttcaccgagatgcgcgattccgacccgaacgccgccctgcgggagagcgccctgccgacacttttgacctacaccggccatgagggcattttgagcgacacgacccaggccgagacgatagccgccgtcgagagcctgcccgacggcagggtcgtgctggagccgtttgccgaggggaaccacaactatctatccgaggacaccgccaccgccgccgcgctggacaaagcgctgcgggagacgacagtggcgtttttggtggagtatttgaagtaggcccgccgcacctgcgaggccgacaggaacgggcacctgacgaagccctttgagaccgtgaccggctgaaaacatcggcaaaatacagaaagaaagtaaaaaccgcggagaagcgcaaacttttccgcggtattcttattgcagatttaccagcacatagtccccgcaatcgacaatcgcccccgcccgggggtatcccggcaggtcgtgggcgtcggcgtaggtctgcgcctgctcatgcagggcagcgctgtgggtcatgtccaaagcaaagccatagtagcggaacaggtgctccgctgcctggccgtagacgtcgtccacctcggagaaggccgtgaccgaccagttcagcaccgagttgcagttggtctcgacgtacttgacggtgtcgccgctctcccagctcgtgtgctcacggaagaagcggtacagcgggtgctgcatcgggtcagccgtcgtgtaccgggtgatattctcccccagcgtgtaacggcccaccagcaccacgggcttgtcggtgccgtagtcgcgcacaagctcggtgcccagagtgcgcaccacagcagcctcctgctcggagcgctggtaatcgacggccagcagatggttcaggtacatggcctggtgcagacagagcagcaccgccagcagctgcacgctgcccagcagcacagcccgccgggccgcagcgcggcgcagcagctcatacacggccagccccgccagcgccacaaacagcgcaaacacctggcaggtgcggtagggcgagtaccgcccctgcacaaacgacagcagcaccagtgagaacagcgtccccgcgccggtgagcagcagcaggggccgctttttgcgcaccgccagcacgatgaccagagcgacaaacaccggcaccgccaccgccaattcagcaatgggcaggtagaaacagccgcgcagtgcgtagttaatcagaatgcccttgacaagcagctttgcaagatagacaaatgggtagaacgcccacaaaatttcggtggcgccgttggccgcagcctgcggcagcacaagatggatgcccgacgtcaccagcacgcgcaggcagagcccgccgaccagcgccgccgcgtaccacagtccctcggtcaggaccgccgcaagccgcgggcgctcggcggccagcagttgctccagcgttaaaagcgcaaagacagccagcacaaacaccgccgccagtgactcataggacgagcagaccaccatcaggcagagcaccgccgcgcccatgcgcagagccctgccacgccacggcacgccgggctggcgcgcgtcccacagcaggttcagcgcagcggcgtccagcaaatagccgccgcagacgcagacattcgcgccgctgtactcccaaatttcgttcatcagcgggtaggagacaaacaggcaggcaaacagcccatagccgaacatgtcgatacggtcctgcgcggccttgcgcagcagcgcacagaagctcaccgccgccagcgccagcagcagcgccgccagcaggtcaatgccaaaggcatagctcggctcggccctgccgtagcccagcaccgcggcccagaggttcatgccgaaccggccggtggacagcatgacgccgcccgtgccgatgtagcggtccccttccagcgagtcaatgctgacccgtgtcgtggcgatggcatagccgtagctgagcagcagggtcagccccagcgccgcgcggaatttcgcgtttttcaggaaataaccaaacgcctgcttcatgccggtcactggtcgtccggcccaaagttgaggcgttcctcctccacaacgagcggacggttcatgatgcgggtgttcatagccatgacgtactcacccaaaaagcccaggaacgccagctgaataccgcccataaagaagatggcgatcatcgtcggcgcgtacccggcgcggaagctctgccagaacagcagcttggcaatcagatagaacaggccgaccagaaagctcagccccgccaccaggaagcccgcgaacgttgcaatgcgcataccggccttggtgtagctggtaaagctcagcatggcggcgtcgtacaggctgtaccagttgttgtgggtcttgcccgcgcggcgctggggttgggtgtactcgatttccttgcgctcggggcccagctcggccacaatgccgcggatgaagggcgtcgggtccttcaggttgcgcagcgtctggataaagctcttgtcgtacaggccaaagccggtgaactgctcgatctgctcgcagctgctcatcttcttgatgagcttgtagtagcagccgcgcagccagtacatgaccgggttttccttactctgggtcttgcggccaatgacgattttgtagcccttttcccactcggccacaaacctggggatcatctccacagggtcctggaagtcggcgcacatcgtgatcgtgcaatcgccggaggtgtggatcatgccgtagtacgggctgttgaactggccgaagttcttgacgttgaagatggccttgacgtgcttgtcctcggcgcagatctgccggatgatggcacgggtgccgtcctcgctcttattgtcgatgaacaaaatctcatagtcgtagttcgggcagctcttgaccagctcatcgcgcacagcctcatagatggggcgggcgttctgctcctcgttgtagcaggggatcattaccgaaatcgtctttttctcactcattttgtctctttccttacccactcaatggtttcgcggattccttcttcaaacggggtcgcgggccgccagccggtgtcctcctgtaaggccgacgtgtccgcctgcaggtgcatgacctgcagcgggccgtaggggacctcccccaagcccagcggcagcgccgggtcgatggcgtcgcgcagcgcctcgatgtagtccttcagcgggcgggccgtgccgctgcccagcgggtagaccctgccgtcctgcccgctgacggccagcgcgtagaacgcagctgccgcgtcggcggcgtacaggtagtcccactgctggatgcccgcggtcagagcgggcttctcgccgtgcagcagcttacggatggtgccgctgatcatcgtggccggaccgtcgtgcgggccgtagacgctcaaaatgcgcgtccagatgtgggccacgcccagcgtccggcactcgacgcggctcatctggccggcgcacagcttggccatgccgtagccgttctccgggaagcagggggtctgcgcggtcagcacgccctccacgcggccatattcggcctggctgccggctccgataaagacctggcaacccagctgcgccgcggcgcggcaggccgcaatggtgtagcggatgttctcgatctgcgccggcatgtcgttgcggcccgggccgatcgtgtgcgtccacgcaaagtggaagaacgcatcggccttttccgggatcagctccggcagcgcggccaactccgccgcatcgcagggcaccacatgcagccgcgcgtcctgcggcagcagcgccgcccgcgcgctgcccgggtgggtgaccgcgtaaaccgtcacaccctccgccagcagctttgcacacagcgccatcccgattgcccccgtagggccggtgatgatggcggtgtggatttgtctttgaatgcttgccatttttgaatcacgcactcccttacacttccggcatcagcgggatgaacatctgcttttccagctcctcacgcggcaggaagggggccaggtcctccaacggggggctgaccagcgtgccgtcgggcaggcgcttggtgctgctcttgggctcccagacctgtttcgtgtcggtgaaaatctcgcagaaagccgggccgtccagtgccagcaccgtgtccacggcctgcttcatctcggcgttgctgtgggcgctgtagtaggggtagccaaacgcctttgcaatcttttcaaactccgggaaggacaggtcgccgctctcggggccgatgccgaccttgcagtgctccttgaaaaggttattctgcgtcaggcggatagagtggtaaccgttgttgttgatgaggaagattttgatcggcagcttgttcgtcagaatggtctgcagttcctgcaggttcatcatgatggagccgtcgccctcgaggcagatcgtcgggcggcgtccgccgccgatgcaggtgccaatggctgcgggcagaccgtagcccatgctggcaatggcgctgttgtttgccatccggctgcccttctggatgacatacgcctggttaccgacgacacagcacgcaccgttggagaccgcggtcaggctgttctccggcaggcgactgcttaaatagcgcacaaaggcgtagacgttggcggtctcgccgttttcctcccactggcggggcaacacggcggggtagtcgcgtttccagcgctggcaggtggccagccactcgccgcccgcgttcacgggggccgcggcagccttatccagcttggtcaaaaagtccttcgcgtcggcccagaccggcatttcgacgtgcagggtcggctttttcagctcggcctggtcaatgtccaccatgatgacctctgccgcgcgggcccaggtcttccagttgtagccgacctggcgaatagaaatgcgcgtgcctacggccagaatcaagtctgcgttttggatagcccagttgcccgggcggtcacccatgttgccggcgcgcccgcagtacagcggattgtcatcctcgatgaggtccacggcgttccagtaggtgacgatggggatgttgagcttttccgccacggagcggaacgccgcatacccgccggacaggcggatgccatagcccgcgtggaacactggccgtttggcgttcttgattttttccagaatcgtccggatcgtggtgtcgtccaccgacgggggcagctgggcgtcatcctcggcggggtcatagccgcgcagctcgtcagtctcgatgtagccgccctggaagttgaccgggatgtccagccagaccgggccggggcggcccgttgtagccagatgccacgccttttccagcaggtagcgaatgtccttggggtcctccagcatggcggcgaacttcgtcatgtactggacggacttggtgatgtcgtactcctggtcgcccatggcgcgcagcggcgtgccggtgtactgcaaggcgtaccgggccgtggtgtcatagcgcacctggccggagacgatgaacattgggatggagtccagccagccgcccacgacgccggtcagcgcgttggtgccgccggggccggtggtcacgcagaccgccgcgatcttattttccagccgggcgtaggcttccgccgcaatggcgcaggcctgctcatggtggttgtaggtcacatgcagccgggggttatggcccagcgcatcgttcaggtgcatagcgccgccgcccacgacggagaaaacatccgtcacgccgcgtgccgccagaaaatccgccacataatccgctaaacgctgtttcattgggttgctccttttccattcagtcaattttcaggaaccaataccgggtggccgtccgttccctttgtccattcgacaagcgtaatcgcttcttctgcgccgctctcgctgtttgctttattcttttctcttactgcggcattcagacgcttcaccaggaaatcactgttgaaaacatcttcgtcggcatagctgacacgcttttcttgaatagcgggtctatcaagcaggcttgtcttttgacccgtcagctgataaacattctctaccataattgagctattataggcgattgcatccgcgttttcgccaccagtcagcgcaccggcactaacacagtttacaacactaccagcgaagttatcggtaatgccaccagcgcgcgagcccgtgacattcacatccgtaaagcagttcataatctctgcctccgggttgactgcatagctggcaattgctccaacacagtcgccagtcaggctgcccgcttcaagccccagattgtaaacagccccttcgagacgtccaaacagaccgacatcctctgtagccttgccctgaatgctcagattgcggataatatgtcccttgccattgtaggtgccgtaaaaatagctttccccgctgaatgcaccaatgggcgtaaattttttaccgtccatatcaatgtcagcggtctgttcaacatactgatctgcaaagctcatgccgcggttgacataattgctgaacgcctgcaaatcctccgccgactgaatcagatacggctcttcctcggttccctttccttccaaggtgaagctaccccagtctgtctcgtctgccagcttgtacaccttgatcttaccggttctttcctcaccatacacgcccaacagggtgtagcgtgtgcccagcagtcgtccaaaattcttttccagctcgcgctgcttcaatttctcaccattgcggtaactttcttcgtgaaccttcttgcagtttggaacatcatccttccagattacaatgtcaggcagattttcctgtagcagctcatcctcctgcaaaacgtactggtcgtctaccacgtcatagaacagaaccggaacaaacgtatccattgtatagcggtttgtcagaatattaaagagctttacatagggatagccaaaaatcgttgcatcttctgttgtgttttcaagaatcagctgtgtgatgtcttccaacatcttgtcgtcctccgcagaaaaacggaagcctcgcagcgcggggatgccggtggcgtagatttttttgtcatactctgcctgttcacagccccaccaagaataggaacatacgaccttctgtgcaatacaagccatcgaaagtactgtgcacagcgcaatcgtaccgattttgaccgatttttccgtaactttatctgtaaatacgctgttcagcccaacacacagaacaaacggcatagccaacataatcccatggtaggaaatttctgatgccgatgccatactggctgcatatatcgtagaaaatgccgcacaggccatccaaaagtgctcacgtgcatagccgtcattgccatccgcttttattttcataagggagcgggcaatcagatatagatccaaaaagctgatgatcgtatacagcgtaccagtcacactcttaaacagcgtgcctgattcatagattgcttccaataagctcccgttatcttcgcctaatgacgcataacgggccgtaaccagaatagtcaccacataggcggcacacagaccgtaaaatacatcgtgcattatcttgctgccgcttctgcgcttttggctgtacgccagcaacagtagcaaccctccaccgatgacaacggcttggacgcttttcgtaccaacgagcacttcgataaagtcgttcgcagcctgcctttccaaaacatagccgccgcctatgaccagcagcaagagcatccgtcctgctgtctgactctcgtttttctgcgccagtgttatggcagctacacaccccaccatcagtaaaaataccggcgcattgattgtccagcccgtaaagattttcagcaaaatggcaagcggactgcctttgcctcccgtgtgcataaagacctgctgaaagaacggaagcaacgcgccattgacggcaaggattcccatggccacgacgaacaccagcaaaaagccaagtatgactgccgcacaatattgcagaaagcctttgtcttttttcttccagcagtagacactcaaagccagcagataaataacccccgcagctgcaaaaatcgtctgcttgttcagaaagagcagccccagcatagcgccggcagcaaacaggtatttcccggcggctttcttatctgccgcctctgcaaatcccagaacacaatagagcagcaacacagacaaaaacggaatcgtctggttataatcaccgaataaatcgtagacagaggccgtgcacagaatcgcagagaaggcacacgctgcaaaggcggcatatctattgaaataccggcagagcagccgaaacatcaactcataaatagcaatccgctgtaccagccaccacgcacggtaaatgaacaggctgccaaacgacagcttccagagcatcacatcaatcaggatgttcagtggcggcaggtaatagtaaaaatcgcggtatggaaatttcccgtgcaataccagctctgcatagtttacattccagccttccgtaatgggcatcgtgttggcgaaataaattgaggaataggccagaatcaccacacaaagcagtgcagccaatacccagcctcgcgcgttctggcgcttattcgtatgtggtttttccattactaattgcatcgtgcttgttctcacttttccttaaatgtccacagcttgttgataacaaagttcagcgggatcgtcactaacagattaacgatgggcgcaatggacttgctgacactgaagaatgcaacttcgatccagagcagcacgttggacaaaatcgatgtgccgccgtaactgacataggtcttacccagccgcttgagcttgctgcgccagtcattggcgttgccggtaaagacaaatttatcattccagaaaaaggcgttggcaatgctcagaatcgtgcccagaatgctgccgaccatatacaggtccgggctgatccacaggaagatatagtagaccgccatggacacagccgtattgcttacgcccactaggccgaacttgacgaactgcttgaacagctccacaaattcctctttattttttgcgcccagcagggccagcaatttctgcatagtatatgtttccttccgttattcggtttcctccacagcgccctcactggcaaccaccaggtttgtcaccgtgaaggtaccgtttttgcgcgaagaagcatcatagaccgccatcgggccgtcatagctcacatcgatttgggtctggccgggggccacatctaccgtgtagcacacggtctgcccctcatggtcaatcttaatattcgtctgcttctgcttcccggttgtaccatcagcatcttccagattcggtgcttcaaacgtcatcgtataggcgcgcttcaaatccatgccgtagcctgtctggaacgtgaccaccatcctttgcgtaaatggcgcgtggttgtaaatcataatatacgcaccgcggccgctccatgttgcctctatcgggttgccgtcgctatcctgcacgtccttctgctggatgtcctcggcatccagtcggccgttgtagccatagtcaaagccccagttgtgggtgcgctgccacagctgctggccgcccacaccggtcaccgccacacaaacggccagcagcaccgtggccgccgggtgtccgtgtgccggcttgaccggcttttccgcacagcgtacacgcaccccctgcactgcctggacaaagcaccagacaatgagcagcagcagcatgacatgacaaatcgtgttgcgcggtacaaaggacggctccatctggtcccgccggaacagcggcagcggcagcaccggcaccatcaaggccagatagggcagcacgttgtccctgcgcagctcacgctcctgctccataaacaggaatagcggaatcaaaaacaggcaccatacataatcatactggggctggaacatcagcatcgccagaatgattgctgtaatgcgcttccactccttatccataaaaaagctgcacaccagcagcaccgctgccagcacaatgcccagcagtgcgtagctgccatagcccagctgcgtgcccagcaacttgtccaccgcatgtccggcctctgccaaaatgttggagaaaccattgccgatccacggttcacctctgctgccgctaaaatcaaacagtacacggaaccacagtgtgaggccaaacaatccttcattgaagaagaacagcgggaagcacaggcagacaacaccgtacagcaccgtgcgcaccgcggccagatagtttttatcgcgcagcagcagcacgcccagaaacgccgggtacagcttgaaaccggcggcaatcgccagtgccagacaggccagctcccgcaaaagtggtttttctgaattgcggtacaggataaaaaatgccattaacggccagcacagcagcagaatattgccgcgttccaagccgtacagtaccccatagctgaacactgcacagaatgccagcagctttttccgccccccgcagctgcgcgtcaggcgttctgtcatcgatacaattcctaagaccaccacgataacaaagacgacaaacagcatcatcgtcgcttgctgtaaacgcaaatcccgttctgttcccctcatgttgagagacgagatatacgattccgtccacgtagctgattgtgtctttggcacaagcaaatacaacacatagaaaaacagatttgcaagcggcgggtacagcgtatcgaactgtccgtagggcatacgccctctcacatactcaatactatggaaaaagtccataccggtatcggtgacatcataaaagaagaatcgatgcagcagcgtaccgcggctggccagcagggcaagcagcagcaccgccagacaggccaccgttgcccagcagtagatctgcataggcgtcagccgcctgtttttgtccaaccgcagtctgggtgcgcgggtcgttttcaccttttgctgcatcataggggtctgtacctcgttgtcaaaattttactgattcacagcctcgataatcgtcttggccatgtagtcgatcatctcgtcggtcatgccgggataaacgccgacccagaaggtgttgttcatgataaagtcggtgttggtcagctcgcccgccacgcggtaggcgtcggtgccgcggatctggtcaaagcaggggtgcttgatgaggttgccgctgaacagcagacgggtctgcacgttgtggctctccacatagcgggtcacgtcgttgcggtccagaccgctctccggcttgacggagatcaggaagccgaaccaggacgggcggctgttggcagccggttccggcaggatcagcttgtcggcggcgggctccagcgcggcgcgcagacggtcccagttgtggcggcggcgctcgatgaaggtggggaacttcttcagctgctcgcagccgatggcggcctgcatgtcggtgaccttgaggttatagccaaagtggctgtagacgtacttgtggtcgtagcccttgggcagctcgccgaactgaccgtcaaagcggtggccgcaaaagttatcctgaccggaggggcagatgcagtcgcggccccagtcgcggaaggagaggatcaggcggttcagcagcgggttgttggtgtagacgcagccgccctcacccatcgtcatgtggtgcggcgggtagaagctggacgtgccgatgtcgccccaggtaccggtaaaacgggtctcgccgttgatggtgtactgggtgcccagcgcgtcgcagttgtcctcgaccaaccacaggttgtgggcgtcacagaacgccttgacggcggacaggtcaaacggattgcccagcgtgtgggcgatcatgacagccttcgtcttgggggagagggcggcctcgagcttggtgacgtcgatgttgtactggggcacggtcacatccacaaacacgggcaccgcgccgtactggatggccggggtcacggtggtggggaagccgcaggccacggtgatgatctcgtcgcccttcctgatctggcggacacccagctcgggggcggtcagcgccatgaaggcgatcaggttggcggaggaaccgctgttgaccagatgggcgaacttaacgccgatccacttagcgaactccttttcgaactggtctgcaaagcggcctgttgtcagccagaagtccagcgtggcatcggtcagagcgcacatctccttctcgtcaaagacgcgggctgcgtaggtgatgcgatccccctcctgatagggggtctttttctccttgaagtcgtgataatactcggcgaccatcgtcttgatctgctcgcgggcttctgcctcgttcttccatgccataggttttgctctccttttttattgcttttcgtagtagtaataggtaattgggttcgtgccgccagccgatgtgaaggtcgtctgcagctggtatccgagcatgtcgggcgtgtagccattctgccccagatagacccccagtatgtcatccacgacaaagctcggctgggccttcaactctgccagaatatgagggagtaatttttcggtatctgccacgccgtaatccgcagcatccacataatgtccgtagttgtcccagcctgctgcatggtagatgattcccacatcgcggccaaccgcaaaggtgttgtccggtatattggcagagaaattctccacctccgcatagatgccgcgtgtgctgaacgcaccgcgctcctgcaggatcactgtattcatcacgccgccgggcagctgtgccgtaagcacgcagagcaccagcagcacggccagtcccacagactgtgccgccgtgcagtacaggccgcccagcttcttgcgtagcccctccccgtccgtcagcgcctgcagcgggaagcacaggcaaagcagtgcctccggcaggcagatctccagattcatccaggcggagcggtttgcatagtaactgaacgataccagccccagtaccgacaggcaggccgcaaatggggcaatgttctcctttttggctattcttccgatagcggttgtctggaacagcgaccatgccagcacggccagcataagcagcagcacaaacacccatgggcgcacgcctagctcaagcgggtagccgatggaaccatccatataattgctgctgtacagcgggtaaaaaaacaccttgaagatcggtgctccgccgcaggccaggttatacaaatttgtcaggccaatggcccccagcaccgccaacacagcgcccagcagcagcgcaccatagcgtttccactggccgcgggcgtaccatggctcctgctgccaccagcggacgatgcagcccgcgcaccagccgatgatacagaacagaccactctcggtgctccacagcactgccagcatgcacagaagccagccgccccagaaccgagccgtttttttcgactgctttttccgcaaacagaacagcatataggccgccagcaacatcgggaataccaaacggtgaggctgcagctgccagtaattcgtccgtctgtatgcaaacggaatgaccggcacaaccagtgccatcaacaggcgtacccagttcttttttatcaggtgatggatgcagtacagcatggccagatccgtcacaacgccgaccagcgcgatcaggaattgaataacaacagcctttgcaccgaaggtcttcatcggcagcaggaagaacagcccgtagtggccgtagatgcctgtcgtcaactcctcataggggatgccgtcagccacgttgtagatgctttccaaatacgcctcaccgtggtacgggtctccctcaaacgtattgacgatccatacgcccaagaagtacatcactgccgaaaggccgtagccgccccaggtcatccactgcgggcagtccttacccgtcagcagcagatagattgcctccacaaaaaacagcaccgtaagcaggtaatacagcggcaccatctgcggcgccatcagggaggacggcgaataggaaggccccgcaaattccttggacaccccaatgttcgcgtaataaataaggtaggcggctgtcaccagcgcagataccacaagggccgctgccgcgccgcgaccctgcagacgcgcgtcgcaggcccgcacaaagccacgttcttgcggcagaatgcgggcaaaaaggttgccgaacagcaaaagcgaaacgccgaacagtactagaactacggcatagttgaccatgttgctgccgatgggccacggctgaccaccccatacatgcgccagccaggaaaccagataggctccacctaccaaaaccgaaatgacaaaagcgcttgttatactcctctgttcctttgtcatttctgcccctccaagaagctgttaatttccttttccatctccgccgggacgtcgccgttggcaagccagatcttgctgaaggcgacggtcttttccatgcactcggccatgtgccagcgcggcgtccagccgaaggtcgttttcagcttgctgcagtccagcttcaggaagttggcctcgtgcggggcattggcctcggcctgattctcccaggcggcgtcgccgccccaggcccggcagaacagatccaccagcgtgccggtggtgacgcagtcgcagtcgtcggggcctacgttatagtagcctgcaaagcggctgtcctcgtactggcgctgggcgatcagcaggtaggccgccagcggctccagcacatgctggtacgggcgggtcgagtaggggttgcgcacgccgatcttacggcccgcggccatggcgcggacgcagtcggggatgatgcggtcattggcaaagtcgccgccgccgatgacattgcccgcgcgggccgtcgagacggccacggtcttatcggcaaaaaagctgttgatgtaggagtgcgtcgccaactccgagcagctcttgctgttggagtaggggtcgaaaccgtccagcggctcgttctcgcggtagccccaggcccactcgttgttgtggtagaccttgtctgtggtgacgttcagcaccgagcggggcgctctgccctgctgctgggccagccgcacacattccagcaggttgaccgtacccataacgttcgtctcataggtgtagcgcgggtccttgtagctgtcgcgcacgatgggctgcgcggccaggtgcagtacaatgtcgggctgcgccgcgtcaaaagcggccttcagcgcgtcaaagtcgcggatgtcgccgatgacgctgtgcatcttgccctcgacgccggcgatggagaaaaggttcggctgcgtcggcggctgcaggctgtagcccgtgacctcggccccggccatcagcagcatcttgcagagccagctgcccttgaagccggtgtgaccggtgacgaacacccgcttgccgcggtaaaattcaggatcgtaatgtaccatcatcaatcctcccacttcttccagggcgcgttgccggtggcaagcattttctccaggacctgcttctcgcgggcggtgtccatgcactgccagaagcccttgtggatatagctcatcagctgaccctcctcggccagcttctgcagcggcttctgctcaaagacgcaggcgtcgccgtccagatagtcgaaaatctgcggctccagcaccatatagcccgcgttgatgagcgcgccgtcgctggccttcttttcacggaaagaacggacagaattatcctcggcaatatccagaacacccttctgctgctcctgctgaacggcggtcagcgtggcgatcttgccgttctcgcggtggaatgccaccagcttggcaatgtccacatcgcagacgccgtcgccgtaggtcatcatgaaggtctcattgccgatgtagggacgaatgcgtttgatgcgcccgccggtcatcgtgttgaggccggtgtccacaacggtgaccttccacggctcggtgtgatggttgtggacgatcatctcgttctggccgcgggtaaaatcaaacgtaatatcgctggtatgcaggaagtaatccgcgaaccactccttgatcatgtgctgcttgtagcccgcgcagatgacaaagtcgtgaaagccgtagtaggaatattccttcatgatatgccacaggatgggcatgttgccgatttcgatcatcggcttgggcttgtagacgctttcttcgctgatgcgcgtgccaaggccgccggccagaattaccactttcatagtgcgctcctttattgttttgtgagccggtcagtccgtcgacgaccggtttttgtcccgtgcgctctgcctcgtttgggcaattttacacacttattcataatgaagagtataacacacacgctctgtaattgcaacaatttacgcccgtctgcgccgttccaaaaccatcggttcaaagtcaatatttttgtccagagcccacaaaaggccgtcgttcgcacatttttttgcgcttttgcgttccaaattttacatactgtatttccgcaaaaaaatccccgccgccggggtgcggcggggggattttcatggtggagctgtagggaggcggcgccctcggcgacccgggccgtccgtcttactgctgcttaaaataatacactgcgccgacaaggccggcgtcgttctggagggcggcggccctgacctcaaggccctcggcgaaggcgggcatgatgcttttgcgcacctgcgcggccaacgggtcgatcagaagcgcctgctgtgcgctgacgccgccgccgatcaggatcagctgcgggttgaagatgtgtacaaggcccgcaaggccctgggcgatctcgttgatccagccgttgagcacagccagcgtgcgggcgtcgcccgcggcgcctgcctcaaaaatcgcacgcccgtcgggcgcgtccagcccggccttctgggcgctgcggaccagcgccgttgtagcggcgtagcgctcatagcagccgattgccccgcaggtgcaggccacgccgtccagcgcgtgcagacggaaatgccccagctcgccgccaaggccgcgcgccccctccagcagatgtccgccggtcaggatgccgccgccgacgccggtgcccagcgtcacaccgatgacatcggtatagcccttagccgcaccgacccagacctcgcccagcagcatacagttcgcgtcgttggcgacggtgacgggcaggccgaaggcacgctccagcgtacctttaatgtccacgccgatccaccccgggaaattgccgcaggtccccgcgaccacgccgcggcggctgtcgatctggcccgtggcggacacagcgatgccctcaagcctcggcgtgtccgcggtcagaaattcgtggatggccgcctgcacggtatccaggatcggcgttttgtagccgtcaaagctgacgctgcgctcggcgcggcgcagcaccctgccgttctcatcgacgagtcccagcttgaccgccgtgccgccgatgtcaacgcccagataggttttactcat

SEQ ID NO: 373 - DNA, 11882 bp, unidentified
  source 1..11882: mol_type = unassigned DNA
ttactggttcaccgcttcaataatgatctttgccatatagtcgatcatctcatcggtcatgccggggtacacgccgacccagaaggtgttgttcatgataaagtcagtgttggtcagctcccctgccacgcggtaggcgtcggtgccgcggatctggtcaaagcaggggtgcttgatcaggttgccgctgaacagcaggcgggtctggacattgtggtcctcaatatagcgggtcacggcgttgcggtccaggccggattccggcttgaccgaaatcaggaagccgaaccaggacgggcggctgttggcggccggttccggcaggatcagcttatcggcagccggttccagggctgcgcgcaggcggtcccagttatggcggcggcgctcgataaagctggggaactttttcagctgttcgcagccgatggcggcctgcatatcggtcactttcaggttatagccaaagtggctgtaaacgtacttgtggtcatagcctgcgggcagttcgccatactgaccgtcaaagcggtggccgcagaagttatcatggccggacgggcagatgcagtcgcggccccagtcgcggtagctcttgatcaggcggttcagcagcgggctgtttgtatacacgcagccgccctcgcccatcgtcatgtggtgcggcgggtagaagctggaggtgccgatatcgccccaggttccggtaaagcgggtttcgccgttgatggtgtactgggtgcccagggcatcgcagttatcctccaccagccagaggttatgagcatcgcagaaggctttgacggcggacaggtcaaacgggttgcccagggtatgggcgatcatgactgccttggtcttgggggaaagagcggcttccagcttggtcacatcaatgttgtactgcggcacggtcacatccacaaacaccggcacagcgccatactgcagcgccggggtgacagtggtggggaacccgcatgccacagtgatgatctcatcgccctttttgatctggcggtcacccagttccggggcggtgagcgccataaaggcaatcaggttggcggaggagccggagttgaccaggttggcgaactttacgccgatccacttggcaaactctttttcaaattcatccgcaaagcggccggtggtcagccagaaatccagcgttgcatcggtcagggcgcacatttctttttcatcaaacacgcgggatgcataagtaacgcggtcgccgggcttgaaatccgcctttttctccttaaagtcatggtaatattctgccaccagcgccttgatctgctcgcgggcttcggcctcattgctccaatttgccatcgtctgctcccttactcactcaaaaattccttgatctctttgtccatctccgccgggatatccccgccggaaagccataccttgctgaacgcaacggtcttttgcatacattccgccatatgccagcgcggtttccagccgaaggtggatttcaatttgctgcaatccagcttcaaaaagtttgcttcatgcggagcgtttgcctcagcgcggttttcccatgcggcaccatcgccccacgcctggcagaacaggtctaccagggtgccggtcgtcacacagtcgcagtcatccgggccgacgttataatagccggcgtaccggttatcctcatactggcgctgggcgatcagcaggtacgccgccagcggttccagcacatgctggtatgggcgggtggaatacgggttgcgcacaccgatgctctccccttttgccatcgcacgcacacagtccgggatgatgcggtcattggcaaaatcgccgccgccaatcacattacctgcgcgggcagtggagacggccacgctgccatccgcaaaaaagctgtttttatagctgtgggtcaccagctccgagcagcttttgctgttggagtaggggtcgaagccgtccaacggttcgttttcgcggtagccccagcaccattcattattctggtacaccttatccgttgttacgttcagcacagagcgcggtggggtttgggcggtacgcacacattccaacaggttcacggtgcccatcacattggtttcataggtatagcgcgggtccttgtagctgtcccgcacaatgggctgggccgccaggtgcagcacaatttccggccgagcggcatcaaaggccgctttcagggcggcaaaattgcggatatcaccgatcacgctggtcattttgccttccagccctgccagagagaagaggttgggggttgtgggcggttccaggctgtaacccgttaccactgcaccggaacccaccagcatgcggcagagccagctgcccttaaaaccggtatgcccggttacaaacacgcgtttgccgcggtaaaattccaagttcattgttggttccacacttcccagggcgcacagccagacgcccacattttttccagcatacttttttcgcgctcggtatccatgcactgccagaatccgcggtgcacatagctcatcagctggcctttggctgccagctcgcgcagcggggcctgctcaaaaatggtatcatcgccactgatggtatcaaacacttccggttccagcaccatatagcccgcattgatgatagccccatcgttgacgcttttttcacggaacgcctgaaccgaattgtcctggccgatatccagcacgcctttctgctgttcctgcaccacggcggtcagggttgccagcttgccgtgctgcttatggaacttgaccagttcggcaatgttcacatcgcagacgccatcaccataggtcatcataaaggtttcgttgccgatatatttctgcacccgcttgatgcggccgcccgtcatcgtgttcaggccggtatccaccaccgtcacgcgccacggctcggcgtgctggtcatgcacgatcatctcgttgccctgggtgaagtcaaaggtcacatcgctggtatgcaggaaataatccgcaaaccactccttgatcatatgctgcttgtacccggcgcagatcacaaaatcattgaagccatagtaagaatactctttcatgatatgccacaaaatgggcataccgccgatttcgatcatcggtttcggcttgaacttgctttcttccgaaatgcgcgtgccatagccgctggcaagaattacaactttcatatttttcactcccgtaagcctgcagcggaaccctgcttgcagtcccgcaaaaactgtccgtcccaccagcatttcaaccgccggacagtttggtacacacccagcctattttttattactatgatagtatatcattttcacgtattcagtgcaaccgttccaggaaacttatcacacctagtaggcttgctttttattccgcattttgctctttgttatcacattttaacgccgcttttgttgccgctgtgcaaacaatattctttacgttttttcgtgcgtattttgtccctgccaggcggcccactttacattagtaggcaaaacaggtataatagtttagttaatctgtgatattgcgccattttgccatattgcggatgcaggcggtcttattttatccttgctgcctgtggattttttgcggcatgccgcgcgttgcgcggtaccgctcctattaggtctggaggttgcgctcatggggctgcaaagcctgcaatactgtgcatttttggtggttgtggctgccgtttacctgcatctgccggtgcgcatgcagccggtgtttctgctgggagcttcgtgggtgttttatgcgctggccatgccggccatgctgccggtcaccattgcactggcggtgttcacctacctgtgcggccgcggccttgcctggcggggcggcgcacacaaaaccgcctttttgcgccttggcgtgatcggtatgctgggcattctggccttttttaagtataacggcctgttgggcggggtgctgcacggctggcgcgtggtggccatgccgctgggcatcagctttaccagttttgccgcaatcgcctacctgatcgacgccgcccgcggcgactgcgaggtggaaaccagctttatccggctggcgctgttcctcaacttttttgccaccgtcacccaggggcccatctgccgcgccggtgcgctgctgccgcagttgagcgccgagcaccgctttgatgccgcccgcacggtgcgcgctttgcggctatatgcgctggggctgttcaaatacattgccgtggcggatgtgctgaacatggtggtggatacggttttcccccactatgcggattacagcgcccccatgctgattttgaccgcggtgatgtacactttttatctgtatttcagcttttccggctattccgagatttcccgtgccaccggccttgtgctggggctggacctgccggaaaactttaagaccccgttttacgccaccaacttttccggcttctggagccgctggcacatctcgttttcttcctggctgcaggattatctctttatgccgctggcctgggcagatcttggccgctttggccgcctgcccaccgagctgtgcgtgttctgcgtgttctttgcttccggcttctggcacggcagcaccgcgccattcatcatctggggtctgctgcaggcggtttaccgcgtgggcgaagagctgctgcaccgccgctttggcaaacccaaaaagcgcggcaccccggcccgtgtgctgtggggcaagcgggttgtggtgtttgttttgtggaccatcagcatggtgttcttccgcgtggggtccggcaacctttccggcatggccgaaaacctgggcgttggcgatgctttcgcctacctgggccgctgcctgatgaacagctggtcccccgcccgctttgccggggagctgtacagcacagcgtataccggcttttacgccaataccattatggtagcggcttattgggcgttcgctgcgctggcgctggcgcttggcatctggctggatcaccggcgcaattttgcctgcaaaaacaaaccggctgaggttgccctggcaagcgccaagcaccgcaatgcgctgtatgttgttttgatcgtttttatcctggtggggtacatcatgcagagcggcggctttaatgccaacgcgttcggcccctatgcagggttttaatcttatggaaaaaaggagatttccggcgtgaagcatatcatcaaaaaattggcgctgctgttcgtgccggtctatctgtggtttgccttttttgtggcgtttgagccaaacaattattttggcatcaaaaaaacagcctcttccagccagccggtggcccgtgtgcgcgcctatgagcagagccccggcaccaacctgatcatcggggacagccgcctggcccactttgatatggaccttgtggattccctgaccgggcaaagctggcagaacctggcctttggcggtgcttccctgaaggaatgtgtggaccttgccaactatgtgctggattccggcaaccaggtggaccgcattctgttcgagctttcgttctacaccttaaacagcagctataacaccgaccgtttttcggcgctggaagctaccctgcgcaacccgctggcctactgtctgaacctggaatacaacgtgaacgccctgaccgtgtttatggacaccgtaaagggcacgccggacaccattgaatccggcgactggaccgcggcggattacctggatgatgccgggaacacgattccgctgcacaaaaagctatatgagtacccggcgctgatcaccacccgctgccagaactggacactgaacgaaaccgagctggcggagtttttggctatggcccagcgctgcgcagaccgcggcgtggagctgaccattgtgctgccccccatggccgccaatgtgcgcaccgaggtatgcgatgcctttggcattaccgccgtgatgcaggacgaagttctgccgctgttggaaaagcagaattttgccgtgctgaattacgaatggtgcaccagctgcattaccgatgatgacacccagttttttgacgggttccacctggacgaaaaatacggcctgccggactggacagccgaactgtttgatgatatgcagcgctgatgctgccccaccccaaaaaggaggtcccctgtggcactggactttttgattttgtacgaacacaccgttcgggaatatgagagtgatcttttgctcaaattggagctggagcgccgcggctacaccgtgcgcatccgccagctgctggatgccaaagatctgcgcctgtttggcaaagacaagccggaagttctggttgccagctgcatgtatgacaacgaagccatcaacagccatgtgtacaacaacattggcagatgcaacaagatcgtcaacctgcactgggagcagatgctctccgacacgcaggaggagggcgattggttcaacatgaacggcaacgccaagcgctgcgtgcagacttgctggggccagcgcactgcccagcggttacaggcccatggcatggatgccaagaacacccccgtgaccggcgctgtgatgatggactttctgcggccggagttcaagggctactttaaggataaggaaaccctgtgcaaggaattcggccttgaccccgccaaacagctgcacctgtacatttccagctttggctatgccagcatgaccgaccaggaagtagccgagctttccaaaatggcgggaacggatttttccggctttgcccgcaccaaccgcgtttcgatggaaaaaacgctggcctggtttgaccgctacctgggtgaccacccggaggtggaactggtataccgccgccaccccagcgaatggaaatgcaaagccctggacgagctggccgccaaacgccccaacttccatgtgatttttgcggattccgtcaagcagtggattgtggcggcggattccatctccatctggatgagcaccgctgtggccgaagtatacatggcgggcaaaagctgccatatcctgcgcccggtgcccatcgagcacgagtatgaccccgtcatctacaaggatgctcactatgtgactagctacccggagtttgccgctgccatggcgcagccgaacccgccgttccccattgcacgggatgtgattgagggctattttgacccctcccttgccccggcctacaagcggatggccgacctgctggaggaagtgtacaaaaatcccccgcgggatgaaccgatggggcccggctttacgccgcacttcaacctgctcaagttctgcgcactggcgggggtacacatgctgtaccgccacaagtgggaacccaaacgggtgtttgccttctgcccgccgctggccaactttgcccaacgcatttacggttatgtggacaaagcctatatcccgccggaggagatccagcgcatggaagcgcgcatccggccatatgtaaaataaagttgtttttccggcgcgctgcggtgcgcccgctgcaaatgggagcctgccatgtctgaaccgaaaaaaactgaaagctttgccggaaatgtgatgaaatactccattgccacctaccttggctttggcatttccggcgcagcgcttatcatcaagggcgtcctgcccgccgaaagctacgccgttcctgcttccttcatggcatacaccatgtcgctgatgaacgtgggcatgcttgggctggaccaaagcctgctgcgcttttaccacgaaccgcctgccggttccaccgggcgcagcatgtttgccgcgtgtacccggctttcggtgctggtcatactgctggtgggcggcatcggcagcatctttttcgccaagccgctggcggcggcctttggccttggggccaacggtgccgggctggtgccgtttttgttcctgaacgctgctctgtacatgctggtgcgttacctcaacgtgctgctccggctggaaaacaatgtgcgcgcctacaccaccgaaacactgtggatgcaggcctgcctgaacctgatctacctgctgcccggctttgttacccaggacgcccgcgcttttgtgctgggtgcggtgtgcagctttgcgggggtcgcagtgttctattggcggcgggcttctaaaggtcaaacgaaagaggcccctgtgcgcggcctgcgcccctatgcccacatttaccgggcggcactgccttacggcattgtgttggcacctgcggccatcctgatcccgctgtaccgcgccatctgcctttcttttttaggcaattacgcccccgcggcggagcagggttcgtttgatttcgcctacaccctggcccagcttgtcaccaccattcaggctggtttttccacctactggggcccctatgtctatgcgcattaccgcaccgagcaggagcgcattggccgcatccatgatctgctgaacctgctgatcttcggctttttctgcctgctggtcatgtttgaggatatcatcttcatcatcttcccggccaaatcggcctgcctgccctactttccgctgatgatgctggccgtggtgttctccatcctgtgcgaaggcacggtgtacggcaacaccattgcccgcaagccgttccatgatacgattggaaccgccgtgggcgttgcggccaacattgccgtgtgcgccgtgctggtgccgcgttttggcgtaatgggtgccgcggtcggcctggtagcggccaatgcaacgatgtttttgtaccgcactgtgaccgggcagtattactaccgcaccatccccagcttcagccggacgatctgcggctttttgctggcggtgggtgtggccgtgatcggcgtggtgttcgcccacaattttatcatcaagtttgttttgactgcggcaatcctgtttatttactgtaacatttaccgtgcccagctgtacaagctgtggcagatctctatgggctttgtgcggcggtatctgctgcacagccaagcataactactgcaaaggaaaggttgtatatcaagatgaagcattgcggcacacaagagttgaccaccgagcggctggtcctgcgtcgtatgacaaccgacgactgcgaaatgatgtttggcaactgggccaatgacccggaagtgacccgctacctgcgctgggagccccaccgtgactgggtggtaacgatggcatatctgaacgagatcgtcaaacaatatgaccgcccggatttttatgattggggcatctgcgataaagtgaccggtgtgctgatgggcagcatcagcattgcccccgccgaatcctgtgagcgtgaaaagccctatgcctggaaaaacgtgaaaaccgagctgctgggcggcatgtatgagatcggttacaccttgggcaaaaagtggtggaaccagggttatgccaccgaagccaccgctgccgtgcgcgattactggtttggcatggtaggtgcgccctggctggccgggttccacgccagccagaatgtggcaagcagccgcgtgttggccaagaccggcttccattatgaccacgataccgttctgcaccgctttgacggcaccgaggtgccctgcctggcctggtacctgctgaaccccggcagccagaaatccgatgaaccggcagccgctgcccccgctgtacaggcagaaccaacggaaccagcggagaatgccgatacaaccgtctgacattcactcccctgccccatacttttgctgacctggccgaatacggccagaaaggacccctatggacgaaatgaaggaccccatcaccctggactttaccgctacccaggccccggcagaggacgcccctgttgggcagaaggctctggacagcgagcgcccgccggtgcgcgttgtgctgctggcgctggaccagggcaagtttgacgcccagcgcagcctggatgagcttgccgccctggcggaagccaacggcatgcaggccgttgctaccgtgtgccagaagcgcagcacccccgaagccgccacccttctgggggaaggcaaagtggaggaagcgcgcctggtatgcctgaataccgatgccgaggccgccatctttgacggcgagctgaccggcagccagatccgcaacctgagcgcggctttgcaggtggaagtgctggaccgcacgatgctgattttggaaatcttccgtgcgcgcgccaccaccaacgagggcaagctgcaaactgagctggccaccctgaaataccgcatgccgcgcctgcagggccttggcgaggcgctgagccgccagggcggcggtggcggcggcggtggcggtgcccgccgcggtgccggtgaaaccaagctggagctggaccgccgctacctgcgcagccgcattgaaaagctggaaggccgcctgaaagagctggaaaagcgccgtggtgaaacccgccgcgcccgccagaaaaacggtgttccggtcatctcattggtgggctacaccaacgtgggcaaaagcagcctgaccaacgctttgtgcggcgcagaaatttttgaagccgacatgctgtttgccacgctggatcccaccgcccgcaaatgcacgctgcccagcgggttacaagtgatcctggtggatacagtcggctttgtcagccgcctgccgcatgatttggtggatgcttttaagagcacactggaagaagctgcctgctctgacatcatcttgaaaattgccgacgccagcgacagcgaagccgccgagcagctgagcgtgaccgatgaagtgttgaacgacctgggctgcggggatatcccgcaggtgacggtctacaacaagtgcgaccgcaccggtgttgccccctatgacccggatgtgctgctggtaagcgccaaaaccggctacgggctggacagcctgctggccaagattgacgagattctggcacaccgtgtgcgcaccattgaggtactgttgccctatgacaagctggccctggccgatgtgttccgcacccgcggcagcgttctggctgaagaataccgcgaaaacggcgtgtattacaaggcaaccgtaaaggtggatgacctgcaccggtttgaagcgtacctgctgtaagcgcaaccgttcgctttgtgcaagataacaaatactgattttattgctgattgtagacaaaaagacctccatccctgcacggttctgtgcttgggatggaggtctttggtttatttgtgtgtaccctgcgttacggcaaaattattccgccgtcagcagtttaacagcgcgggaggtacccaggcggtctgcgcccagatccaggaacttttccatgtcctcaacggtggaaatgccgccggctgccttgatcttgcagcggccgcgcacgcagcgggcaaacagctcaatatcatggaaggttgcacctgcggtagaaaagcccgtgctggtcttgatgaagtcggcaccggcttccaccacgatatcgcacatcttttctttttcttcatcggtcagcaggcaggtttcaataataaccttgagcaccttatgccccacggcccgcttgacggcggcgatatcctcgcgcacagcgtcatattccttgttcttcaggcggccgatattgatgaccatatccacttcctcggcgccgttttccacagcggtctttgcttcaaagcacttggaagcagtatccattgcacccagagggaagccgaccacgcagcacaccgcaacacggcccgccatatactgcacagcctgcttgacatagcaggtgttgatgcagacggatgcagtatgatacttgatggcatcatcgcacagggcctgaatctggggccaggtagcctccggtttcaacagggtgtggtcaactttggaaaggatttcctccttggtgtatttcat

SEQ ID NO: 374 - DNA, 8090 bp, unidentified
  source 1..8090: mol_type = unassigned DNA
gatggtctctaagtggtcgatctcttccttgacctggcaggtcagctcggacagcgcctcataagtgcgctttaatttgccgtatttgtcaaaatattttttcgcattttccgtggcggagagggtgggatccagggggatcgtcaccggctcatttgtataataattcacggcggtgagggatctgtcaccgggctttgcactgtaaccgtaggtgttgagcagttcaccgtagatgcggtatttttcccgcttctctgtgtccttcatctgtgccagctggaggtcatatttcttaatatcacgttccagggctgtctgcacgatacggcgcaggtcggaggatttctgacggatcctggttaatgtatttttctccgcataaaaatgctccagcagggcggacatggaagtgtaggattccaaatgatccgctcccgagccatacatcgtcaggggaaccgctgcatattccacggggcgggtgccggtgtaggcaatgcatggagagaaggcttcttccctgatagaagtgaccattttggaaaagattccgtataaagtatggtaatccgtgggtgtcagtgccgctgtaggacgttccccatcaagaccggcctcataacataattcctgtgccagtacgggcgagatgccggtgaagcttccgtagaccgccttgaagaccggctggggtttggcggcaagcatttcacggaacgtattctcgtcgcaggtcagggcatccagcttgtcctgggtgtgtgcaatgaagtagggacgtcccggcaagacttcccggacactgctgacagcggaggagacatgcttgatactgtcgatgatggtattgtcgtcattacagaagatcaggttactgtgtttgcccatcagctccatgaccagtgtcttgtgacgcagatcgcccatctcatccagatgttcaatgtcaatatgcacaatacgttccaaccccggctgggagatgttcacaatacggccgttctgcaagtgtttgcgcagaagcatacagaagttgggggccgccatggggctgggtttattggtttccgtcagatagatcagcgggagagaagcacttgcggataacagcaggcgcttctgcccggtgggctgtttgatcgtcagtaacagttcatcattctccggctgggcgatcttgtacagccttccgccgattagttcttttttcagttcagatattacacaggcaatggtaacgccgtcaaaagccataatttcctcatttccgctctcgtagaagctaaaaaaatagatgcgcggattgcattgcgcaacacacttattgtagcagattttaatcggaaaaggaagtacggtaaaagcagagtgaatattattccattatattgcataaaagcataaaagaagtatgaataagtgcataaatatacatatcaatccaaaaaacatgcataaaaatgaaaaaagtagtagacatttaggaagaaagtggtatcatggaactattcagagtcagatgaatatcggaaaagcgcagcagcgattttgcgaatggggttctgaacagttccaaagcagaattgcgggagcggcttgctgcgaagcaattcgatgacacagaaatgcaatgaaatgagtgtgaggtaaaaaaatgatcagagtaggaatcatcggagcaaccggttatgccggaggagaactggtacgtatcctgttgaatcacaaggatgccaaaatcgtatggtacggttcccgaagctatatagataaaaagtattatcaggtataccagaacatgtttcagctggtggatgatatttgtaaggacgacaatctggaggaactggcgaagcaggtggatgtgatcttcaccgcaaccccccagggattcctggcaggactgttatccgaggaaatcctttcccaggtgaaaattgtggatctgtccgctgattaccgtatcaaggatgtagctacctatgaaaaatggtacggcatcgagcataagtcgccgcagttcatcgaggaagcagtatacggactctgcgagatcaaccgtgacaagatcacggagaagaccagactggtggctaatcccggctgttataccacctgctcgatcctgaccgcttaccctatggtaaaagaaggtatgatcgatgtgaataccctgatcgtggatgccaagtccggaacttccggtgcaggcagaggagccaaagtgccaaacctgttctgcgaagtgaatgagaatatgaaagcctacggtgtggcaagtcacagacatactcccgagatcgaggagcagttaggctatgcgggcaactgtcaggtgaccatcaattttaccccgcacctcgtacccatgaaccgggggatcctggcaaccgaatatgcaacactgaagagaaaaccggacggcacacttcctacatatgaagaggtaaaggctgtctatgataaatattatgcaaacgagaagtttgtccgcgtactggataagggcagctgccccgagaccaagtgggtggaaggcagcaactacgtggacatcaactttgtcattgacgagcgtaccggacgcatcattatgatgggtgcactggacaatctcgtaaaaggcgctgccggtcaggcagtacagaacatgaacctgctgttcggacttcccgagagcgaaggcctggagctggttccctgcttcccttaaagcagacacaggacaaggacgaaaggattacatacatcaatgagcaaacagtttacgatcaaaccaatgaccatagaagattatgacggtctgcacgccctctggatgaccattcacggcttcggcatccggagtatcgatgattccagggaaggtgtggagcgttttatccaccggaatcccggcaccagtgtggtagccgtcggggaggacggaaccgtagtgggcggtatcctatgcggtcatgacggacgacggggctgcctgtatcatgtatgtgtgagagaagattatagaagacttggcataggaaaagccatggtggtccactgcatgaatgccctgaaagaggagcacatcaataaagtcagcctgatcgcttttacccagaacgatatcggtaatgctttctggaaatgcattggctggacaaagcgggaagacctgaactattatgattttactttgaatgaagagaacattacagcgtttaataaatagaaacggaatcgaaaggagagcattccaatatgaaacagatccagggcggtgtgaccgcagcaaaaggctttgaggcagcaggtgtggaggctgccattaaatatcagaatcgtaaggatatggcactgatcgtaagtaaggcaccctgcaccgtggcaggtacgtttacctccaacgtggtaaaggcggctcccgtgctgtgggataagcagatcgtggagcattcctcatttgcacaggcagtggtagtcaattccggaatcgccaatgcctgcaccggcagacaggggctggactgctgtgaggcagaagcaaaatgtgccggagaactgttaggcgtgcccacggatgcggtactggtagcatccaccggtgtcatcggtatgcagattcctgtagataagattactgccggaatcaaaaagctggtgacagctaaggcggacaccttagaggccggttccgatgcggcgcatgccatcatgaccaccgataccatttccaaggagattgccattgagaccgagattggcggcaagaccgtgacattaggcggtatgtgcaagggctccggtatgatccatccgaatatgtgcaccatgttaggctttgtaaccaccgatgtgaacatttccaaagagatgttgcagaagtgcgtcagtgcagacgtagtagattcctttaacatgatctccgtggacggtgatacttccaccaacgatacactgttagtactggcaaatggtatggcaggcaatgaggagatcaccacagagggtgaagattacgacaacttctgcaaggcattgcacgagatcactaccttcctggcaaaaaaaatggcaggagacggcgaaggggcaacggcgctgttcgagaccaaagtgatccatgcagccagcaaggaagatgccagaaccctggcaaaatccgtgatctgttcttccctgaccaaggcagctatcttcggacatgatgccaactggggacgcatcctctgtgcactgggatattccggagctaaattcgatccggaaaatgtagatctgtattttgagagtaagagcggtaagatccatattttcggtaatggcgtggcatgtgattacagcgaggaagaggctacgaagatcctctccgatccagaagtcaccgccctggtggatatgcatatgggggatgcggaagcgactgcatggggctgtgatctaagctatgactatgtgaagatcaatgcagactatcgttcctaagacagtgcgcgacatacggaagaaataagtgatgggcggatcagatatctgcggaaaggcatggacagaacaatggaaaaagatatggaacaggtaatgaaaaaagcagaagtgctgatcgaggcgcttccttacatacagaaattcaaccgaaagatcattgtggtaaaatacggcggcagtgccatgagcaacgaagaactgcagaaaaacgtcattaaggatgtgacgctgttgaagctggtaggcttcaaacccattattgtgcatggcggtggtaaggagatcagccgctgggtcggcaaggtcggcaaagaagcaaagttcatcaatggtctgcgtgtcactgacgaggagaccatggaaatcgcggaaatggtactgaacaaggtgaataagagcctggtgaccatggtggaagagctcggtgtcaaggcggttggtgtcagcggcaaggacggcggactcctccaggtagagaaaaaatattccgacggtcaggacatcggttatgtgggtgagatcaccggtgtaaatcccgatatcctctttgatatgctggagaaggattacctgcccatcatcgctcccatcggactggacaaggattatcatacttacaatatcaatgcggatgatgccgcgtgcgcgatcgcaaaggcagtacatgcggagaagctggcattcctgacagatatcgaaggcctgtacaaggatatcaacgacaagtccacctttatctccagactgacagcctccgaggcagagggactgatccacgacggttacatcggcggtggcatgctgccgaagttaaataactgtacttccgctatccgtaatggtgtaaaccgcgtacatatcctggacggacgtctggcacactgcctgctgctggagatcttcactaatcagggtatcggtaccgcaatcgtatccgatgaggaggaaaaataaaatgagtgacaccatgaaagaatatattgcagaagcggaaaaagatctgctgcatacctataaccggtaccagatcgttctggataagggcgatggtgtgtatctgtatgatatagacggtaaaaaatatctggattttgtagcgggtatagccgtatttgcactgggatatcagaacaaagcatacaacgatgcactgaaagcacagatcgacaaggtgatccacacttccaactattattataatgtgcccgccatcgaagcagcacgaaagatcaaaaaagtatccggcatggatcgggtctttttcaccaattccggtgcggaagcggtggagggcgccatcaaggcagccagaaaatacgcctatctgaaagacggctgtacagatcacgagatcattgccatgaaccattctttccacggcagaaccatgggtgctctgtccgtgacgggcaatcctaagtaccgtgaggcattccagcctatgatcggtcatattaaattcgccgatctgaataattttcagagtgtgctggatcaggtgacggacaagacctgcgctatcattatggagaccgtgcagggcgagggtggactgtatcccgcaacggaagaatttttgaagcaggtacgggatctgtgcgacgagagggatatcctgctgatcttagatgagatccagtgtggtatgggccgtaccggttacatgtatgcatggcagcgttttggcgtgaaaccggatatcatgacctctgccaaggcactgggctgcggtgtgccggtaggtgcttttatgatgacggaaaaggttgcacagcattctctgactgcaggagatcacggaaccacctacggtggcaacccattggcctgcaccgctgtggaaaaagtgcttgatttattcgaagaggaccatataatagaacatgtgagagaggtagctccttatctggaacagcgtctgaatgagctggctgaaaagtacgactgtattcaggaacgtcgtggtgtgggcctgatgcagggtctggtatttgatcatccggtgggagatatcattaacagagcattggagaagggattgatcctgatcaatgccggtgcggatattattcgttttgtacctcctctcgtcattaccagagaaaacgtggacgaaatgatcgctattttggacacctgtatcgaataagaggtttaaggtaattatgtttttgaaaaaaagaatgattgctacagcagctgtgatcgccatggctgctgcagctgtttacggaagtacgcaggaaatgagccagacgcaggataccggagaacgtctgcagctgtttcgggcgaaagagaccatttactgctggtattcggatgaagctctgtccggctatatcaacgcggcagcagtgtctttcggagaacagaacaaggtccgtgtgatcccggtgctgacttccgacagtgaatatctggaagcggtcaatcaggagacactgcattccgctcagataccggatatctatctgttaagcagtgactccctggagaaggcatatctggcgggtctggcgacaaaggtgccggatacggagggaatctgcgatacggatcatttttcacaggcagcactggcagcggtgacctatgacgataaaatcattggttatccagtgtattttgataccagtgcactggtatacaatgaagattatctccgcacctgggcgacacaacaggcggaaaaagagctgtccggtagcagtgacaatgacgaaccggtaggagaaggtgaggagatcatcgaggaagattctcttccggaggatcagaccacagatcaggttaccgcggacgaagcagcggtaaacgcgctggcggaacagtatttcgccaaggcacttccctctacggtggacgatctgttgaacattgcggatacattcgatgcaccggagggcgtcgaaggcgtcatgaaatgggatgtgaacaatatcttttacaactactggatcgtgggtaattacatgatcgtaggcggcgatcccggtgatgacagaaatgatatcaacatcaacaatccggagaccatacagtgtctggaagtatacaaggcgctgaaccagttcttcttcattgagtcagataccgtgacctatgattccgtgatccaggacttcattgatggcaagaccatgttcaccatcggaacgacggatgtggtaaagcggctggaggatgcaaaagcggacggcagtcttacatttaactacggaattgcccgtatgccggatgtcagtgccgagcttcagagcagatctttgtctgttaccggagcggcggtgatcaatggttattcggagcataaggagcttgcggatcgttttgcagcttatctgtcggaagaatatgcggatggactgtatgagcgttccggtaaaatgcctgcaagcattcatgcggcggagaatgcggataatggagcacttacgatttttgccgatgagtatgcggacagcgtatcgcttccgaaaatgctggagacagggaatttctggatgcagctggaagtactgttttccaaggtgtggaacggcgaggatgtgacgacactggtgcagcagctggcggacaatatgtcgcagcaattaggaaatacagagaattga

SEQ ID NO: 375 - DNA, 7903 bp, unidentified
  source 1..7903: mol_type = unassigned DNA
atggaacaagaattatttaacccacagtcctcttccgtaagctcctctcgaatcatttacaccccatcaacctttgcacggacatcgttgctccatctgcaggaggttggctctttgcaggctgttcatccgcatacatccacccgaacagaccttgtatcatttctatgctttgtggtcttatctggaaaaggcagtctgaaatacgaaggtgtggattacgaactgagaacaggagactgcgtgtttatcgactgccggaaagcgtacagccattctacatccgataatctctggtcgctccaatggtgccacttctatgcaccatcccttccggctgtgtatgagaagtacaaagagcgaggcggtcggcctgtgtttcacccagatgatttagcttcttttacatcaatcctgacagacctttatgacctcgcttcttcgtctgattacatacgagatatgcggatcaatgagaagctggggactttgcttaccttactgatggaacagtcctggcatccggagagcgttacaatatctcgaaaacggctggaactggcagctgtaaaggagtatctggacgagcattatacggagaaaatcgcactggattacctgtcagaacacttctttatcaataagttctacctgtccaaaatcttcaaagagacttacggaacaacggtcaacaactatttgacctcaaagcgaatcaccagagccaagcagctgcttcgcttcacaaatatgactgtagatgaagttggtgctgcggtcggcatgggagatgcgaattacttcagccggatgttccgcaaggtggaaggcatcagtccaagagaatatcggaaacagtggtgaccttgaggcacagcgagaaatcgctgtgttcttcttaaaaacatatagtttgaaatgaaaataaaaggagacttacaaaatgaacacaaagccaataatactcacagtaccgtcctttgaagacttcagaggataccttgccgtgccatatgaccaatctataaattttactgttcgacagatcaatcagggatacagcaagaaagcgttcacactgcgtggactgcattttcaggaaggggaacacgcccaggcgaagctggtgtcctgtctgcacggttcgattttcaatgtggctgtggatctgcgccaaggagaaaccttcggtcatgcttacagtgcggtgctgtcttttgaaaatcgaaagcagatgctgattcccagaggttttgcgcatgggtatctgacgttggaagataacaccctgatgcagtggtgtgtggataatgacttctgcggtgaggccgccaaggccgtgcggtatgattcggagttcatctgggaaggtgaaccgtggccggaagctgagtatataatatcggaaaaagattggaatgctgtgagattggagaatttttgtgggagataaaagaccatataaaccaagaaaatccggtgctggccggaaactgttgaagccgaactatgatgcggcagctatcctgcaggagcagatacaggccgtcgtggtcctctacgaagaagataactcccttcagacaatcgcagacacgctatctctcaatcccatcaaggtgcgaaagctattgatcacggccggtgtttatgaatcggaaattgcagatgcggtgaacgcttcttttgaggaaaaacagggaatgtcttataaagaagcattggaagcggtggctgcagaactgaatttgtcaaaagcatctgtgacttcttatttaccttataagaaaggcgtgtatttcagagaggattgtgatcgagaccagatcagcgttgtggcagaggggcttcgacgaatgcggcagaggaaaaaagcagttgaagcgttgcagagcagtcatgatgaacagcatctctggaagtgcatcgttgcttttcaaggataccgattcaagacgatatcaggattgccgttttcctataagattaagaccgggcggaatggggaactgaccaaggaactgtggatcgatcgtcgagaaagcagtaagagcctgacgtggagttcggtactgcttgcttttgaaaagacggaaggaaagccgctggtagagcggccaaaagcactgggagatatccgtggtgtgtcctatatttatgggatgtttaacaggtttggtctgatcgaggtaccacaggggaaagtttaagggatttttgagcagcactttccttgaatggatacagctaggtatatttcgtgaacgccaaaaaccaatattatgctaatagaacaccgcttttgccctttagagaaggcactctaacctataaaatataattgtacgataatattatacttagtctatcaaaagataaatcatttttcagagaggaataaaacacatgaaaaaagcacttatcactggtatcaccggtcaggacggctcttatctggcagagtttctgctggagaagggctacgaagtccacggcatcgtccgccgtgcttccatctccaacaccgcccgtatcgaccacctgatcgagaagaatgcaatcaccctgcatgacggcgacctgtccgattcctccggcctgatccgtctggtgggcgagatcaagcccgatgagatctacaatctggccgcacagagccatgttcaggtctccttcgacgcacccgagtattccggcgatgtggatgcactgggcgttctgcgtgtgctggaagctgtccgtgtctgcggcctgaccaagacctgcaaggtgtatcaggcttctacctctgaactgtacggcaaggtcgaggaggttccccagcgcgagaccactccgttccatccctactctccgtacgctgtcgcaaagcagtacggcttctggatggtcaaggaataccgcgatgcttacggcatgttcgctgtcaacggcatcctgttcaaccatgagtctgagcgccgtggcgagaacttcgtcacccgtaagatcacgctggcagccggccgtatcgccgagggtctgcaggatcatctggagctgggcaacatggactccctgcgcgactggggttacgctaaggattatgtcgagtgcatgtggctgatcatgcagcaggataagcccgaggacttcgtcattgctaccggtgtgcagcacactgtccgtgacttcaccgagaaagctttcgctaccaacggcatcaccatccgctgggaaggcaccggcatcgacgagaagggctatgatgcagctaccggcaagatgctggtctgcgtgaatcctcagtggttccgccccaccgatgtggacaacctgtggggcgaccccactaaggctaagaccgttctgggctggaatccgcagtccactacttacgagcagctggtggagatcatggccaagcatgaccgtgagcgtgcaaagcgcgaaaaggccctgaagaacgtctgatgcaggcaaagaatctctgcttttacctgtccgatcacggtttcgggcatatcgcccggaatattccgttgattgcagaagcggtgcgcagaaccaatggatttgtctacgtggtatgcgggaagcggcatctggaatttgcaaaagccaatctgctggagcttcttacgccggagcagtcttcccatatccggtatcgtgcagaacataccgacattggattgatccttcagcaaggtacgctgctggtcgatacggctgcgctgaccgatgcctgtgcgcagtatctggccgaacggccggaacgggcaaagcaggaggctgactggttacgtcaacacgatgttgcggccgccctttgtgatatgcccctttggtcgatttctgcctgtgagcaggccggtgtgacgctgctctatgtgggaaatttcacatggacagagttgtaccgggagtttttaccggaacatatctggaaagcatatgccgcagagtaccagaagatacagcacgggatgctttatgcactgcataatccggaaatgctggagtttctgcctcgggcagagttgagcgaaacttcgctggtggcgcgccccttccacccggacgaaattcgggcaattcgcgcacagcatacctgcccggtcgtgttcgtggctttgggaatgtcggcacagttcacacagcctgtctcggtagaaggtgtggaggctcatttctacgtcacagagggcgttccgctgacgggaagcaatgtgacggtgattccctattctacgctgcacacgcaggactatgtggcggcggcagactatgtaatcaccaaggctggctggggcacggtggccgaatgcctgctggcgcaaaagccaatggctctgtttgcgcgtgacagcgtgctggaagaccgcacgaccatccgtttgctggaacagaaaaaactggggataaaagtcacctacgagcaactgacggaaatgccagacctgcttgaacaaatgaaacagatcacctatccggcagtgccggaatatcacaacgcagcggccgaaattgtttcaaagctgctgacgctgactgaataaaggagcgtcttattatgatggaaaagaatgctaagatttatgtcgccggtcatcgcggcatggtgggctctgcaatcgttcgtgaactgcagcgtcagggctacaccaatatcatcactcgcacccacaaggagctggatctgacccgtcaggatgctgtggaagagttctttgcacaggagaagccggagtatgtgttccttgctgctgccaaagtcggcggcatcgtggccaatcaggaagctctggctgacttcatgtatgataacatgacgctggagatgaatgccatccactcggcatggaagaacggctgcaagaagctggaattcctcggctcctcctgcatctacccccgcatggctcctcagcccatgaaggaaagctgcctgctgaccagtgagctggaaaagaccaacgaggcctatgcactggcgaagatctccggcctgaagtactgcgagttcctgaaccgtcagtacggcaccgactacatcagcgtcatgcccaccaacctctacggccccaacgacaactatcaccccacccacagccatgtggtcccggcgctgatccgccgtttccatgaggccaaggagcagaatctgcccagtgttacctgctggggtgacggctctccgctacgtgagttcctgtatgtggacgatctggcaaacctgtgcgttttcctgatgaacaactactccggcaacgagactgttaacgccggtaccggcaaggagctgaccatcaaggaactgaccgagctggtcgccaaggtcgtgggctacaccggcgagatcaagtgggacaccaccaagcccaacggcacgccccgcaagctgctggacgtgtccaaggccaccaatctgggctggacctacaagaccgagctggaagatggtctgcgcctgtcgtacgaggacttcctgaacaacccgatgcgtgcagaacgctaaaatagaagaatcaacgattcacaaggtcgtgtgtccgtgcagggccgcggccttttttgttaaatgataggagaacaattatgaatttggtgttattgtccgggggctccggccagcgtctgtggccactttccaatgatattcgttccaagcagttcattaagatcttccatcgggaagatggtgagctggaatccatggtgcagcgtgtctaccgtcagatcaaggcggtcgatacggatgctacagtaaccattgccacttccaaatctcaggtttcggctatccacaatcagctgggcgaggaagtgggaatcagtgtggaaccttgccgccgggatacttttccggccatcgcgctggcagcagcttacctgaaggacatgcagggcgttggcgaggaagaatccgtggtcgtctgcccggtagacccctatgtggagaacgactactttgaggccctgaaagcactgggcgaccgtgccgccgtcagcagcgcaaacctggtcctgatgggcattgagccgacctaccccagtgagaagtacggctacatcatccccatcggcaaagagcaggtcagcaaggtgtccatgttcaaggaaaagcccacacaggaagtggcaaaggactacattgcaaagggcgctctctggaacggcggcgtgttcgccttcaagcttggctatgtgctgaaccgcgcgcatgagctgatcgactttgtggattacgatgacctgttcaataaatatgatactctgaacaagatcagcttcgactatgccgtggtggagcatgagccggaaatcgaggtcatgcgctttgcaggaacttggaaggatctcggcacctggaacaccctgaccgaggcaatggacagccacgcggtgggcgaggcactgttcaatgagaactgcgagaacgtccatgtggtcaacgagctggatgtgccgatcctctgcatgggcctgaaggatgtagtgatctccgcaagcccggagggtattctggtctcggataaggaacagtccagttacatcaagcccttcgtcaacacgctggaccaccgggtcatgttcgccgaaaaatcgtggggcagcttcaaggtcatcgacatcgacaaggcttccatgaccatcaaagtgaccctgaatgcaggccatcagatgaactaccacagccatcagcaccgggatgaggtctggacggtcattgcaggcgtgggcaagactgtcgtggacggcatggagcagaatgtgaaggcgggcgatgtcatcaccatgtccgcaggctgccgccataccattatcgccgagaccgagctgaagctcatcgaagtgcagctgggcgaagccattgacgtccacgacaagcagaaatttgagctggaatattgagccaccgcaggaggcagctatgcaaaacaagaacaagcctcttttgctccggccgtccggcaaggattatctctggggcggtagccgtttgaacgatgaatttgaaaagaacatcgacctgagcccgctggcagagacgtgggagtgttccacccaccctgatggccccagctacgtggtaggcggtgcctttgatgggcaggaactggcagaggtgctgagagcacacccggagtatctgggcgagcgccataagggcgagaacgctctgcccatcctcatcaaattcatcgatgccaagaaagatctgtcggtgcaggtgcatcccaccgacgcctatgcacaggagcacgaaaacgggcagcttggcaagaccgagatgtggtatgtgctggatgccagcaaggacgcaaagctcgtgtatggcctgaaacgggagcgcactgaacagcaaatgcgggatgccattgccaagggaaccctgatgaaggatctgcagtgggtcccggtcaaaaaggacgatttgtttttcattgaggcgggtactatccatgccatcggtgctggggcattggtggccgagattcaggaaaactccaacctgacctaccgcctgtacgattatgaccgtgtgggcaaggacggcaaaaagcgggagctgcacattgacaaggcgctggatgtggcgaacctgaagagcagcgcagagccgaagcagccccttcgggtgctgaaataccggcagggcattgcctctgaactgctgacccgctgcaagtattttgaggtgtaccggatgatcgtcaacaccgagcggcggcagaaggtgcactaccgggcggatgagatcgcgttccgggtgctgctctgcgtcaacggctgcggcacgatctcctttgaggacggcaatcttccgttctataagggagactgcatctttgtcccggcggattccgaggtgctgaccattcatggacaggcacaatttctggatgtaagagggtaa

SEQ ID NO: 376 - DNA, 9118 bp, unidentified
  source 1..9118: mol_type = unassigned DNA
ttatgtgatcgggaacgcgagcttcagcgccaggaacacggcgatcgccaccggtacggcgatgaggaagcgcttacagtttttgcgggcacgctgggacagcgcctcgtcctcctcgtttttccagcggacatagctccagccggcacccagaaggcacagaacggggacgaaatacaggccgatcgacgcgacgtaaggcataggtcatcctccctttttttgtgcttacagtatacaggaaacgggaggaaaggtcaaggaaaagacttgcggggacaaaaaagagacgccctcgggcgtctcttttttatattgtgctgggtccgatcacttggcggccttggcagccttgatggactcgatcagttcgggaacgaccttgaacagatcgccgacgataccgtagtcagccacctcgaagatgggggcggtgtcgttcttgttcacggcgatgatgcactcggagtcctgcataccagccttgtgctggatggcgccggagatacccagagcgatgtagaccttgggatggacggtcttgccggtctggccgacctgatggtcagcggagatccagccggcgtccacgcaggcgcgggaggaacccacgacgccgcccaggacctcagccagctcctcggccagcttgatgccgccctccacgtccttggagataccacggccaacggacacgatgaagtcagcgccgatcaggtcaaccagcttcttggcggccttgacggtctcggtgacctcggtgtggatgtcagcagcttccagaacgaacgcgggatgcaggatctccacgttcttcttgcactcgcgcttcttcataacgccggggcgaacggtcgccatagcggggcggaagcgggggcaaatgatggacgccatcaggtgaccgccgaaagcgggacgggtcatcttcaggtcgcgggacacatcgtggggctcacggttgatcatcacggtgcccagcttctcgatgcgctcctcgggcagggtggaggcctcgcgcaggaagcccttgtagttgggcatgtcgatgtccaggtgggtgcagtccgcgcacaggccggtgtgcaggcgggcggcgcagcggggagccagatcacggccgatgttggaggcgccgaacagcagcacctcgggcttcagctcctcaacggcctccacgatcaccttggtgtaggcatcggtagtgaagtccttcagcaggggggagttgtagacgtacaccttgtcggcgccgtactcgcccagctcagcggcgatgccgtccacgttgtcgcccagcaggatgccgcacagctcgacacccagctcattggccagcttccggccctcggagatcagttcgaaggtggtgggcatcatcacgccctggcgctgctcgcagaacacccatacgttcttgaaggcagcggtatcagcactattaaaagccattttcttttctccttccttagatgatgtgcttggcggccaggatgccggccagcttgtcggtggtagccttgtcagcgccctcgagcatcatgcccgcgcccttctgaggaggcgtgaaggaggtcagaatgttggtgggagaaccggccagaccgatggtgctcttgtcgatcagggggtgatccttcagggtctcgtaggtcatggtgaccagaggcttgctgtagcactcgaacgcgccgcccacggacaggtaacgcggggtgttcagctccttgatgcaggtgatcatgcagggagtcttgaccttgatggtcatgtagccgtcctccagcatgcgcttgacggtcagggtgtcgccgtccttggtgatctcgccggcataggtgacctggggcagatgcagcttctcagcgatctgggggcccacctgtgcggtatcaccgtcgatggcctgacgaccggccaggatgatgtcgtccttctcgatgccgtaggtgtcgatggcggcagcgatgatctgggaggtagcgtaggtatcggaaccgccgaactcacgggcggtgaccagaacaccctcgtccacgcccatggccatcagctcacgcagcataccctctgcgggaggaggacccatggtgaacgccacgaccttgcagcccagctcgtccttcagggacagggcggcctcgacggcgttcagatcgtcggggttgatgatggtctgcatggacgcacggtccagagtgccatcgggattgacggccaccttaccggaggtatcggggacctgcttaacagttacgagaattttcattttccttttacctcctaccttacttcacgcccagattgctggcgatgaccatgcgctggacctcgctggtgccctcgtagatctcggtgatcttggcatcacgcatcatgcgctccacgggatactcacgggtgtagccgtaaccgccgaacagctggacggcgcggcgggtcacatcggaagcggcctcggcggcgaacagcttggccatggcggcgtccatggagtaaggctcgtggttctgcttcttcatagcggcggagtagaccaggaactgcgcggcctgcatacgggtgtgcatctcagccagctggaactgggtgttctggaactgggagatgcgcttgccgaactgaacgcgctccttggtgtacttgatggcttcctcgacagcgccctcgcccaggcccagggcctgagaggcgataccgatacggccgccgtccagggtcttcatggcaatcttgaagccctcgcccttcttgcccagcatacggtccttgggaatgacgcagtcctcgaagatcaggtcgcaggtagaactgccgcgaatacccatcttcttctcgtgcttaccctgagagaagcccttgtcgtccttctccacgatgaacgcggagatctccttcatgctgcggccgcgcttgtcaacggtcttgccggtgacggcgatgaccacgaaggtgtcagctacgttgccgttggtgatgaagcacttggagccgttcagaatgtagttctcgccggactcgtccagcacggcggtggtctgctggccctgggcatcggtgccggcgccgggctcggtcaggccgaaagcgccgatcttcttgccggagcacaggtcgggcaaatacttcatcttctgctcctcggtgccgttctcgaagatgggggcggcgcacagggaggtgtgggcggaaacgataacagcagtggtaccgcagaccttggccagctcctcgacgcacatggcataggagagcacatcagcgccagcgccgccgtactccttggggaagtaaatgcccatcatgcccagcttggccatcttctcgacggtctccatggggaagcgctcttcctcgtcgatctcagcggccaggggcttgacctcgttctccgcgaaatcgcggtacatcttgcgaacgagcagctgttccttcgtcagatggaaatccatacttttttctcctttttctgattttacttgttgtagttgaagaagccttcgccggacttaatacccaatttgcccgcacgaaccatcttccggatcagcacgtttgcgcgatacttgctatcgtgagtctcgttgaacagcacgtccataatgttcagcaccacgtcccagccgatgaggtcgcccagatgcagggggcccatgggatggttgcagcccagctgcatagcaatatcgatatcttccgcggaggcaacgccttcctgcagaacgcaaacgccctcgttgcagtaggggatcaggatcttattgaccacaaagccgggggcctcgttgaccaccacgggggtcttgccgatctccacagacaggttcttgatatagtccaccaggtcggcgggggtgttgccgccggcgatgacctccaccagcttcatggcgggcacggggttgaagaagtgcataccgatcaggtgatgcttcaggccctgacccatctcggtgatggacagagaggaggtgttggaggcgaagatggtctcgtccttgcagatggcgtccagcttgcccagcagttccttcttgacggccatgttctcggccacgcactcgatgaccagatcggcatcggcggcagcgtcaaactcctcgaccagaacgcggctcatgatatcgtccgcggcttcctgggtcatcttgcccttggcgaccttcttgttcagggaggcggccagcttgtccttatgacgctgtgcgctggcggtgctggaagcatacatcagggcggtgtggcccttcgctgcgaaaacctgggcaatgccgctgcccatcgtaccggcgccgaatactgctactttcatgatagttcctcctacttaaatttttacatgaattgcttaattatcaggcggtgtgcctgtcaattaacttacttgttctgatagggctcgtgcttgcgcttctccaggaaggcggacataccctcgatctggtcggcagactggaagcagctgccgaagagcttttcctcgatgacgatggccttgtccatgtccacctgaaggccctcgttgatggcctgcttgcaggcgcggacggcgataggcgcgttcttggcgatggtctcggccagcttctcggcggcgggcagcagctcgtccaggggatagacggcgttgaccaggccgatgcggtaggcctcgtcagccttgatattcttggcggtatagatcagctgcttggccatgccggggctgaccaggcgggccagacgctgggtgccgccgaagccgggggtgatgcccaggccggtctcgggctggccgaagaccgcggtgtcggcgcagatgcggatatcgcaggccatgctcagctcgcagccgccgcccagggcgaagccgttgaccgcggcgatggtggggatgggcagcgtctcgatggcgcggaaaacgttgttgccgtgcttgccgaaggcctcgccgccctccttggtcagggtgctcatctcgccgatgtcggcaccggccacgaaggccttttcaccgctgccggtgatgaccagagcgcggatatccgcgtccgcctttacggcggaaaccagctcgtccaggtcggtcaggacctcggaattcagcgcgttcagcgccttgggacggttgatagtcgccacggcgatgaggcccttcttttccagcagaatgttggtcatatcaagttcctccttatggttcctttccgtgggcgcagcgcccggaaacggcacggggccggcaggtgggcatacgcctcctcatacatatcacattatagtggcccgttagaaatttatcaagtccaaccaaccggctttttacttttttagcggtttccacaaaagtgggcaccggaatttgcacactttttcgggcaggggcgcagcaaacaggggtatcagggaaaaacgtgcttgtatcccggcgcaagatggggtatgatgggagaaaatcgtaaaatggcgaggacatgaatatgcggatgcggaagaaaaaaaatctggcgccccggatggaagcctgcggcgcgtacctgatccgggacccgttcgccctgcgggggcgctggcgggagctgatgccggaggcacgggagctgcgggtggagctgggctgcggcaagggcggcttcaccgtggggaccgcggcggcagagccggaggtgctgctgatcgccgtggaaaaggttccggacgccatggtggtggccatggagaaggcgcgggacgcggggctgcggaacgtgtggttcgtggacggagacgctgcgctgctgcccgatatgttcgccccgggcgaaatcgaccggctgtacatcaacttctgcgacccgtggcccaagagcaaccagaaaaaacggcggctgacccacgggaactttcttaaaaagtatcggcaggtgctggccgagggaggacagatccatttcaagaccgacaacgacaagctgtttgagtggtcgctggaggaaataccgcagttcggattcgcgctgtcggaggtgacgcgggatctgcacgcggacgggccggtgggcgtgatgaccgactatgagcgcaagttctacggcgagggcaagagcatcaaccggtgcgtggccactatggtggaatggacggagccggagatagaggacgtcccctcccctgctgagtaaacagaaaaggcacccctgacggggtgcctcttctgttatttcacacggcgccggggtaagacaccgcggaaaacggtgtcagtcctcgcgctttttgcccacaaacgccacgccagcggcggaggtcagcgccatgccgacatacagagcaatgcccgcgtcgaaggtcttggggctgcccttggtggtggtagacgtggtggtatcgctggtggaggggtagtagtaataggagatcttggttaccgtccaggtaccatcatcattcttcgtcgccttatatccggaaggcacagtaggctgactggtataggtgccgctggtgatagcgccgtccgctacgaccttataagcgccgccgcccttctggacgatcttgtcggccgcaacataggcgtccacatcgctggagaaggtgccgccggtgatgaaaccggtcacaacacccgttgcattattgccaacatagctgccaacggcatttgcattcgtgctgctgaatgtgccgccagtaatgctcacagcgggatcaccgccgggatagttgcacttgtcaatgaccagggcttcgcccgtaggattgccgccatttccatagtacgcatagtccgccttagcaccattacccacgatcgtaccaccggtaacagacacactgccacacttcacgtagatgccggtcgcaccggtaatagtgccgcccttgatgttcaggttgctggtgttcggatagtaaatgcccagaccgccgtcgttcgtgttcgtgaccaccgcaccgtcctcgatattgatggtaacgccgccatcggaagcattgccaataccggaaatcgccgcaccgccggcagccgtcaccttaccgtacacggtgacctcggaccctgtgttctgaacggtaataccgcccttattcgcatccgtgctggtggcgttgataaccatgtccgcggcaaccgtcagcttcgcgccgctctgcacccacgcggcccacttcaggcactccagcgttccgtttttcagcgtcagatcgctatatacatcgaatccgccgccagccgctaccgtcatcgtgcatccgccgaaatcgattgtgagcgcctttttaacttcggtatagctgtcgccatccacagttaagtcattcacaagcgcgatagtatccccggcctgcgccgcagtgatagcctctgctatcgtcttataggttgcgtccgctgcgcgtgccggtgccgttgtgtagcttacacttggatcgaccttcaatgtgacagggtcatccgcccagctgacgctgcacagccctatggccatgaccagggccagaatggttgctaatgcttttttcattgttaacactccccaatgattttgatatttccgcagggtgcttcgttttaagcttgttaaaacgccaaagcaggagtactcctgcggatagggcaattataccacaaatttcttggttgtccagagggttttgtaaaatatgccggtttttccggttttggggcaaatagggggaggaattggggggaaatgggaggggggaagcgcgcggggcgcgcgacacctcatccgcccctgcggggcaccttcccctcgaggggaaggcatgggggttccgcgcctgcgggcgcgggggacggattgccacggccagtctgcggactggtctcgcaatgacagggacgcaagaaggcagattttcttggtaaaacctattgacattgtagggtttatgtgctaccatgcacttacctacaaaaaagatatgttaaaggagtgatcctatgcaggtctatgcagataatgcggccaccacgcggatgagcgacaaggccgtggcggctatgacgccctatttccagcagttttacggaaatccctccagcctgcacaccgtgggccaacaggccgcggaggcgctggtggacgcacggcggcgggtagcggactgtctcgggtgcagctttaaggagatcacgttcacctccggcggcagcgaggccgacaaccaggccatcgtctcggcggcgcggatcggcgagcgaaagggcaagaagcacatcatctccaccgccttcgagcaccacgcggtgctgcacacactgaagaagctggaaaaagagggctttgaggtgacgctgctgggcgtgggtcccacaggcaccatcaccccccagcaggtggcggaggccatccgggaggacacctgtctggtgaccatcatgtacgccaacaacgagatcggctctatcctgcccatcccggagatcggcaaggtgtgccacgagaagggcgtgctgttccacaccgacgcggtgcaggcggcgggccacctgcacatcaacgtgaaggagcagaacatcgacatgctgtccctgtccggccacaagttccacggccccaagggcgtgggcgtgctgtatgcccggcagggcatccccctgaccaatatcatcgagggcggcgcgcaggaacgcggcaagcgggccggcacggagaacatccccggcatcatgggtctggcggcggcgttggaggagtcctgcgggcacatcgatgaggacaccgcccgactgacgaagctgcgggacaagctgatcgcgggactgagtaagatcccccacagcgcgctgaacggcgacccggtgcaccggctgcccaccaacgtgaacttctgcttcgagggcatcgagggcgagagccttctgctgctgctggatcaggcggacatctgcgccagctcgggcagcgcctgcaccagcgggtccctggaccccagccatgtgctgctggccatcgggcggccccatgaggtagcccacgggtccctgcggctgagcctgtgccacgacaccacggaagcgcaggtggactatattctggaaaaagtgcccggcatcgtggcgtatctgcgggatatgtcccccatgtggaaggacctggagtccggcaagcggacattcattctgtaa

SEQ ID NO: 377 - DNA, 8071 bp, unidentified
  source 1..8071: mol_type = unassigned DNA
atgggagataccaacaggatgagcacaaattccaaagaaaaaagaaataattacatttatattttaaaggctcttgccatattcagcgtaatatgtgcacactctacaccactggttgatggcagcaccaaatggaatgttctcagttcacagctgctggattatctgggaacatttggggtacccatttttttcagcatttctggttatctgtttgccggaaacacgcgaaactggggggatttttggaaacgtaaggtgactacacttttttggccctggatctgttgtgagacactgttgtggttttatgtggtgctccgaaaaggcggcatcagcatagctgcatggctgttgtttcttctgggttatcatcatacgacatattatctcaccatattagtactgttttacgtgatctattggaaaatacgaaaccatggtgtcatttggatgctgaatgctgttttgatcataagtatactggagactggatggaatgtgggaatatttcatcagctgaatatgattctggacagttattacctgaacccgtttaactggatgcttttctttggaataggattactgatgtaccgggatccgcagaaagcaatacaaagttttaaaggatggtgggggattttatgcatatgtggcagtgcagtatactttagcgtccatctttacctaggattggaattctattatttttcaaagtatgcgttgattggtgatttattgagtctcggaaccgttgtatatctcgggcggaaactgatgaatgggaagaaaaaagaggtacttctgaaaataggagactggtctttttccatttatctgctgcaccagtttgtagcgggaattgtagtggctatcacaaatcgttgggatttctttgtacttacattgtgtcggccatggatcatattggctattacagcctgcatagtgatggtgatagacaggatcttccgggaaaagctgtcctgggtcaggacaattataggaatccgatgattctgccggcaaagtgaatagaccattaatgttggaagcttttcctgtgctgttggcgcgtcggcagataggcgagtgattaagcattggtagttgagaaaacagccctcacatgttataatatcagataatttgaaaatacaaaaataaacgttggaaaggttaagaaacgatggaagaacgtgaaattgatttactggatatgatagcagacattctgtcacattggagagggttggttgttgcattggtgattggtgcggttttgatgggaggtctgagttatgtgaaatcctatcaaaatatacagaatatacagaatgcacagccaatagaagaggagacaacgctggatgcagcaacggtggaaaaacagttgatgcaactggaagaaactttggaggaaagccagaaagcggcggttttgactacaatggatgacgagagagagtatatctggaaagagaattatgcagagaattccgtgtacatgcagttggatccttttaatattgcacagcgacagttggtataccagattaaggcaacggaggaaaaccagaaccagtccttgggaaccacttatggggatgtgctcgataatgtaggcatgtataattgggtggaagagaagaccggtgttccggcggcttatgtaaaagaattaataactgtcagtacaacatcagcaatttcgattgcaaacgatcaatttgcaggtactgtgggaacagacagactgaaaataacagtaatacaaaaagatgaagaatcctgcaaagaactttccgatgcagtaaaggcttatgtggaacagcagaaggcaacattggcaacagaagtgggaaaccatgaactgattttattatcggaatctgcaggaatgaccttaggcatggatgttatgaatcgacagatagattatggcaatcaggttagtaatctcagatctgggatcgcttctgcaaaagcaggatttactgcagaccaggcgaagtattatgatctgttgacttgggaagagggaatggatgaggcagaaatagtgcagaaggataccgtagaggaacaggctgtggcagtttcaccttccgtcagcaagaaatatatcctgttaggagctgttttgtttgcgtttgtttatgccggaattctgttcttggtatatattttcaacagtaagcttcgtgtgtccgatgaattacagagtttatatcacattccccagatcggtgtggtggtaaaggattctaagaagaagtttattctggataagtgggtagatgatcttcgtcactacggtaaacggaagtttgatgccgaacagtctatggagctggcatttgtggcagtgaagattgcagcagtgaaaaataaactgaatactatctgtctgatgggatgtaatctggaggccggtgccggcagtgtatgtgaaaaccttaagacagcattagagaaggaaggcatcaacgttacagttctggataatgtcctctataatgcagagtccatggagaaagtagaggctatgacgggagtggtattggtagaaaaagccggttctactttgtacaatgaagtcgcaaatgaattggcattactgaagagacaggatattacagttttgggtggaattattgtagaataagatatattaagcattgttaaagactgcagaattcttgtctgacgagacgatagtagccaaagtccttttatgaaaaggactttggctattttttctggaattatactgtctcagagaatatgcgtaacaattgcgtttttccatataatatgttatgatgattaggaattttaagtgttgaaagtgaggacattatgttattagataataaatccattttgattacaggtggtaccggcagttttggtaaggcatttaccaagtatgtgttggacaactacaatcccaggaagatcatcatttattcccgtgatgaattcaagcagtttatcatgcagaatgaattcaaacagtatgctgataagcttcgtttcttcattggtgatgtcagagacaaggaacgtctgaccagagcatttgaaggtgtggattatgttatccatgctgcagctctgaagcaggtgcctgcctgcgaatacaatcccgctgaggcgatcaagaccaatatccacggtgcgcagaatgttattgatgccgcattggataccggtgtgaaaaaggtggttgctctgtccacagacaaggctgtcaatccggtaaatctgtacggtggaaccaaactggtatctgacaagttattcattgctgctaacgcttatgccggaagcaaggatatctgcttctccatcgttcgttacggtaatgtggccggaagccgtggatctgttattccattcttccacaacattatcaagaacggcggtaccgagctccccatcaccgactatcgcatgacccgtttctggatcagtctgcagcagggtgtggaactggtgatcaaggctttggaagagtccaagggtggtgagactttcatctccaagattccttctttcaagatcacagatctggctcaggcaatgctgccgggatgtgagatgccggaagtcggaattcgcgaaggcgaaaagcttcatgagatcatggtaaccgtggaagattccatgaacacatacgaatatgacaagcactttattgtatatccccagatggtatggagtgaatccagacgtgctgttcctactggcaagagagtcgctgagggattctcttatagttccggtaataataccgagtggctgagtgtagagcagattcgtgaattgttaaagacaattgatttagaaaaataattttaaaaagatctgccggtatgagagcagatcttttgtttttattccaggggcttatttcttaaatagcaaatcgtagtaggaaaatgagcagactattagaaagaggactagcatatgtgtggaattgtaggatttacaggaaacagacaggcagcaccgatccttctggacggactgtcaaaattagaatatagagggtatgactctgcgggacttgcagtccgcgatggcgatgccctggcacaggtagtaaaggctaaggggcgtctttcgaatctggtcgagaaaacggacaatggaaatgctttgaagggaacctgcggtatcggacatacccgttgggcaacccatggcgaacccagtcagatcaatgcccatccccatgtctccggcaactgtagcagatccggttccggcgcggtagaatcggaagtggtaggcgtacataatggtatcattgaaaattacacggaactgaaagaaaaactgctgaagcatggttatacattttacagccagaccgatacagaggtagcgatcaagctggtggattattactacaagaagtataaactcggtcccattgatgccattgcgaaaaccatggtgcgtattcgcggatcctatgcgttggagctgatgttccgtgactatcccggtgagatctgggtagcccgtaaggacagcccgatgatcatcggtattgcggatggggagacctatgtggcgtccgatgtcccggctatcttgaaatataccagaaatgtgtattatataggcaaccttgagtttgcaaagctgactccgggagaagctcatttctataacctggacggggatgaaatcgagaagcagactacggaaatcaaatgggatgcagaagcggcagaaaaggccggttttgaacatttcatgatgaaagagatccatgagcagccgaaagcagttcaggataccctgaattctgtgatcaaagatggcaggattgacttcgaagcagtgggaattaccgaagatgagatcaagggctttgaacagatttatattgtagcctgtggttctgcatggcatgtaggcatggcggcacagtatgttctggaagacatggcagatatttcggtgcgtgtggaacttgcatcagaattcagataccggaaaatgtccctgaacccgaaggcactgatgatcgtggtcagccagtccggtgagacagcggatactttggctgcattaagactagcgaaggaaaagggcattaccactatggccattgtcaatgtggtaggcagtagtattgccagagaagcggataaagtattttacacactggcaggcccggagatttctgtggcaaccacgaaggcctatagtgcgcagcttgcagcaatgtattgcctggcagtgcagtttgccaaagttcgtggtaagatcacagaagagcagtatggttattatattgccgaactgctgacgattccggagaagatacagaaaattctggaagacaaggagcgcctgcaatggtttgccgcaaagtatgccaatgcgtctgatgtattcttcgtaggacgtggtatagactatgccgtttgtctggaaggaagcctcaaactgaaggaaatcagctacattcattccgaagcatatgcggccggggaactgaagcacggaaccatcagtctgatcgaacagggaacgctggtgatcggtgttctgacccagaacgagttatacgagaagaccataagcaatatgctggagtgcaagagccgtggtgcataccttatgggcatgactacctatggcaattacgaaatcgaagatcaggtgaacttcgctgtctatgtgccgaaggtggacgagcatttcatggccagccttgcggtgataccgctgcagctgctgggatattatgtcagtgtcgcaaagggactggatgtagataagcccaggaatctggcgaagagtgttacggtggaataaaaaattgggaacggaaacgccagagcttctaaaagctctggcgtttttgaaaagagtatttaaataggttttgcaagatctcccacatgaggattgtcaaaaggtatctgctcccggttatcatcctgaacaatttcttccacggtactgccggcccacatagtcatggacggtgttgtcttacggattgtctttttggctaccggtttccgatatgtgacggatgtgatggtgcacatcttatcctggacatggacgacctccccggtacccttcacaaattccagatatcctaaggattccccggtatccggatccacgatctcgtggtcggaaagagaatataccagaaatttgtccccttcctgcaccccattaatagaaccaacattaagagaaacatcacaattatcatcggatacatgtacgatcttaatctgtttactcattggaaacctcctgatttaatattttatagatataaggcacgatatcgcttgttatagtagggcgcacaataatattatttttattgtcattaatataagagacaaaatcggaaatttccgaagcggagacttggttcttgctccgcatgtcaccgggaacgatccgaatctgtgcggattttccgccgctgtttatagtttctactaatccgaatccaattaatttttcgaaattcccatccttcttataaaatgtaacaatcgagttgtatgtgataaaatcatgtgttttacaaatacagacattgtgactgcattcgatgatggatatcgtgggaacagccttatcgtttttggattctaaccatagctttgcacacatccagatggcaattaacagaaagaataaaacaatagaaaatgcccaaaaggggacagcggcatccggaggaaacaggtaaagtagaatggtgggaatcaatccgatggcaaatgcaatcagattatatttatccataataaatttccgcatttaagatcaggctcctttcgggatgttttataaaaagtataacattatctaatgagggagtaaagtttttgacggctaaagtgatttcgataaatcgagggaacttaagaatcgtggagcggagaattgcaattcataccatattatatggaaaacgtaatttctgcgaatcagaattccggcgctttatatatgaataaatattccttgcaacatatcttgaaagatactatcatcaatgatataatatgaaataacaaagtaatcagtaacatagaagaagggtatgaattatgaaagaaaacgatataagagaagatatgaatggcataaaatttgaaattttgcgagatgacgaggagcggaaaaaagatcagctaaaaagattgcaggcatatgtggaagcaatacagaaaaaagtgtcgagtcatacggatgaagttgtcaaggaattggtggcagagagacatcgacagggtttgacacagagtgatatcgcggatcgtacagggatgaaagcgtctaatattgccagactggagaatggctcgggaattcctacattggtggttttggaaaaatatgccagtgcattagggaaacatattgaagtaaaaatactgtgaaagaaagtaaacataagatgaaattatatcatggaaccaattatagttcagcaataaatatagttaatcatggaatcaatctgaaatatagtaaaccctatctggattttggcccgggtttttatacaacgccaagctatgatcatgcagcgctggcagcaataagaactactcagaaatataatgcgaaaaataataaaaacgaggaaccatacattgtagaagtagattataaaccgataagtgcaatggatttagtaataggttcctatccacgacattcggaaagatggggaaaatttgtcctgaataatcgattgaaaccacagatgctgtctgcatacaatatactagagcacaatcaggatggaaaatacgatatttgctatggagaaattgcggatggcaatataattaatatagcgtataaggttaacggaggcaaagtcataccggaagacattaattataaggagtttttgaaagataatggagaggtatatccgcaacagtattcctttcatactttaaaagcgatatcttgcataaaagtattatcttgtgatatgataaataacaagaagaaatatttgaacgcaaggggaagaaggtga

SEQ ID NO: 378 - DNA, 20140 bp, unidentified
  source 1..20140: mol_type = unassigned DNA
atgaaggaaagattacttcgaatcaaaaacaataagaagatgccgttaatactggctttttgcattccgttttttcttgcactgggagtctgtatcggccatgagatttatccttttggcaatcagtgttttctgcatattgatatgtatcaccagtatgcaccgttttttacagaattcatgaataagttaaagagcggaagcgggttattatatacatggaatctggggcttggtacagattttgtatccctgatggcatattatctttccagtccttttaactggctgttattattatgtccgtctaatctggtaatcgaatttatgacggtattgattctaattaagattggacttagcggacttacttttgcattttacttaaaccggcattataaagataatggatatcgcattgctttatttgcggtattctatgcgttatccgggtttatgtgtgcttataactgggatattatgtggctggatacggtagtgttattgccgcttattttgctgggtctggaaagattggtagaaggaaagaagatgacgctttatgtggtaacactggcggtttcgattctttcaaactactatatttccattatggtctgcatctatctggtgctttattttgtgattctgatattagatcagaaaagcggaataggaaaagcaattcttaaatttgcgaccggctctatcctggcaggcggtatgggagcaatactgattctgccggagattgtggcattaagcggaagtggttccggtggaatctcttttccggaaaaaatggagtggtattttggcctgctggatgaagcagcaaggttctgcattggtgtcgagccgtcttctacggtaggacatatgccgaatctttactgcggagcggcaattttattattattattcctttatcttttaaatcgcaggatccgaattggcacaaagattccaagactcttactggtggcatttttctttgtgagctttgcaaataataaactggattttatctggcatggctttcattttccggatggacttccggcaagacagacctttttatttgcatttttactgctgaccttaggttatgaagcagtgcgggaagaaagaggcaatagcatttttaaaatcctatttgcattcctgttagcggagctggtattggttttatgtttccggtttacagatttagagcaggtgacaccggagcagatgcttttaacaggacttttgattttaggttatgcacttctgctgttattctatcggcggaaggataagacgatgcggactatcgtatcgatatttgcggtgattctggtatgtgccgaggcaggcgtaaatcttgacacgaccagtatttctactaccagccggacgctgtatacccagcatttagaggattataaaacactggcggagacagcaggagcagaggatgacggtttcttccgtatggataagtttaaccggatgacgaagaatgagtcggcactttcaaactatgcatccgcatctattttttcttctcttataaataaagatgtggcagatttctaccgggagatgggaatggaaggcggtaagaattattactgctataatggtgcaacgatgcttacttcctcgctgctttcggtaaaatatatcctgacggacagtgcagaagaggaaagtccgtatcgaagtctgatatcagaacagaatggcatatacttatatgaaaatacttatacactgccacttggttttatggtagatagtgatttgacggaaaagtgggattttacccttggaacaccgataatggcacagaatgaactcgcctatgcccttggtgcaacggagaatcttttagagccggtggatgcagaattacatgatggcaaaaccgtgattcaggtaacggaaaccggctattattatggttattatacgatgaaggatgccaaaaccattaccgcaaccactggaaaccgcacgcggacattttctaaatgtgaccatgtctatttactggatttgggatattgtgaggctggggaagatattacgctgacttctgccgatacggaccagatactggtgcagggctaccggttaaatgatgcagcatttcaggcagcatatcatacattatcccagcagaccatggagttaaaatcctacagtgacagcagaatcgaaggcagcatcaacgtaaaaaaagccggaactcttttgctgtccgtgccggatgatgaaggctggcatgtctttgtggatggggaagaagtggattatgagcatttctgcgatgcgtttatcagcattccattaaaagaaggcagccatgatattatattaaaatatacaacaccgaatctgaaactgggagcattgctttccggtggagcattgttcttattcctttgcattatctggataccggttgttgtgagaaaacgaggagagagggcatgaagaaaaaaataacatttctgatatttacggtactggcgctactttgtgttgtttattcggggatggtactggcaacgggttccggaacatcattttttcttgtgtggattgggctggcggtacttttcttcctgtttgggtattctatctggaaatctttctggaagaaagttccccggctggttaagggaatctgtattgctgtcgttgcagtgggatttacagcatttttcatcgtagaaggctgtatcataagtcagatgcatgaaaaaggcgaagcgggacttgactatattattgtgctgggggcacaggtgagggaaagcggaccaagtgctgcgttaaaataccggctggatgaggcagtggaatatttagaggataatccaaagacaatctgtatcgtatccggcggacagggtgcaaatgaaccatattccgaagccgaaggaatggcacagtatttaaaagaacaggggattgatgcgtcccggattctcttagaggataagtccttaaatacagagcagaatatggagtacagcaaggcactgataaaagatggggcatccgttggaattatcaccaatgattttcatctgttccgggcaaagcagattgcacgaaaatacggactggacaatgtctgtggaatagcagcaaagtctacaccggtttatcttccaaataatatgctgcgggaatttttagcagagataaaatttttgctgtaattatgcggatgaatggaaaagtcaaagactgaccggagactttgatgtgtgccaaggcacattctttgttctaaatgggcttgcatcgggtggaagaatagaatagtataaaaagtaacaggagttttatggagaaagggtttatatagctatggagattaaatgcgaatactgtggctccatcattaaggaaacagatgagaaatgtccttactgtggagccaccaatcaggcagtaaagcgtactgcagaccatacgccaaagactattgaagaattgcagcagtggtatcaggcacggaatctgccgccgtatgaagtgacgagattctttatcggaatcaattacacacagcccaaagcctttggtatttacagggaaggacagaatgttattgtctataagaacaaggcaaacggcgagcgggcaatccgctatcagggaacggatgaagcctatgcggtaaatgaactgtatcttaagttaaaagaggaaatcttaaaccagaaggaacataatcgggctggaaatgtaagaagcagttatggaaataacagaaagccaatgtcaacaggaaaggtaataggaagaacctttgccgggattggagcattctttcttttcttctttggttcctttgtactctttgtgttagatacattataccggggaattggaactgcactttttattgcactgattgccgcagcaccggtggcagtgatattagaccttattgtttgtggtttaaggggaaaaagtacggtatttgaaaagatatatcagggatttgccggaaagaaattcttaacctgtgccgtttgtttcctgatgtgctttttaatcgttctgattccgatacataattacaagaaggcaagttattaccagtaccaaaatacggtctatgtacacagccacaataactggttcgagtatgatggttatgactatgataagatagacagtgatgaggtaccggatgatattttaaataaccgttctgattatgaaatgacttatcagaatggctatgactgggataacagcattaccaattttgaagacagcagatattatgaagagcattatggctcagacagctcggacagcagttcagacagtggatatgactgggattccaatgacagctgggattctaattcatctgactgggatagcgactggtaaatattaatatatcatttagaaatttatttttctgttaagaataatctaagaaatgaaatagaatatctttaagaacactcctttttcgtgtgctttactaaatgtaaagaatgaaaaaggggtgttttttatgatgcagtcagaacatgcaggacaacgaaatttacaacaatcaggagcagccggacagcggaatacacaacatgcaacgaacataaaaaagcggagcatgcgccggaaaaaagcaagaagaatgcgaagaatcaaaagaatatttgtggcagcaataattctgctggtagtttttgccgcgggcagaacatcatttgtgcaaggcttcttaaatcactggaatgtaaaatcagaggcaacacttacggcagaggggtatccggaaagccttgtacaactttacgagaaaaatgaagaagcaagacagtttgtgcttgattataagaagaatggaaacaacgagcagccgattgatatttcatcggatgtaacagatggtaaaataccgcttttccttcagtgggacgagcgttggggctatagaacctatggagataatttccttgcaattacaggatgcggtcccacggcattgtccatggtctatgtgggactgaccggagatacttccatgaatccttataccgttgcccagatggcacaggaggatggcttctatgtcaatggaagcggatcttcctggagtatgatgacggaacttgccacaaagcttggcttatccgcacaggagctgagtctcagcgaagacagtatccggcaggaattatcccagggacatccgattatctgtatcatgggaccgggagattttaccacatccggacattttgttgttttaacaggagtagattccgatggaaaaataacagtgaatgattccaatagtaaaaagaacagtaataaggcatggaagatagacgaccttatgagccagatccgggatttatgggtgtatcagtagaagtggcattctttacgaaaatctgctataattcttgataaaatgatttgaaaggcgagtgggaaagagatagacagtggttcttccgacagtgatgttgaaatatctggcttattctccaaagtgaggatgcctgataaggactgttagaggcacataaaatttcggatggagtccggcaacgctggcacatggaagtgccagcgaggtgcatatgaacatggatgtgaatttgcatcggttgccagaagaaaataaaaatgaaatcgaaattcttagtgcctcttgcagttcttatggagcatccgggttcggagaataagccagatattacatcgcacgaatgccggaagaaaaccggcatcacatttcccactcctttacaaatattttaacaagaagggagctatagaatatggaaacatggtattacgaagtcgtatccatcgatggagactatgcaaatttaaagaggacagacattgcttcagatgatttgaaacttgtggcaagagcacttcttccggcagaaattatggagggaagcaagttaaaatacgaactgatgcagtatgagattatagaatagcggataaaggagttagggaagatgaaaatcgaagcggcaaggcgggaggtttagcaaaaattatgaaaaaggaaaaggttattgaaattggggtactgcttggaattattattctggcagtgattgtagttgtagtggcaggaaatcagagaaaaaataaaacgaagactgagacagaaaataaaacagaaacagagacgcagatggaatcagactcagaatcagaatcggaaacagaaactgcacctgcggataaagagtctttggacgcagacgagctggtagaagagaactttcgccaggcaggaattacagaatatgaaaaaataaatctggaagattatgagagccaggcaggaatcgatttatcagaatatgtatcttatcggttttattatgatagcgatggactgaaaattgaaggatatttcagtgcaccaaaagatttactggatggacaaaagacttcctgtcttatttataatcatggtggaaatcaggattacggagcattggaaaatatagaaacctgcttttatgcctatcagcttcataccatttgcattgcatcaaactacaggggatgtggaagcagtgaaggagaagaccagtttggcggagcggatgtggatgatgttatccggcttttagacttgtgtgaacaattttcctatattgatgaggatgccataaatatgatgggtatttccagaggcggaatgatgacttatgaagtgttaagaagggatgagcgggtgcataaggcagttgtcgtatctggcctttccgattgctttatgtcatatgaggaaagaagtgatatgcagaccatattcgattctttggtaggcggttccccggaagagatgccggaggaatatgagaaacgttctgcaacctattggacgaatgaaattaatacaccgctgcttatcattcatgccaccggagatgaaaaagtatccgttgcacaggcagataaattaacagaaacattagagcaggcaggaaaaacctacgaatatattacctttgatggaaattcccacggagaaatccgggcagaggatggtgagaagataaaggcgtttctggaagggcaggagcaggaagaagatagtgaaaagaataatgtaaaatagtgaaaaaatagtgtaatatttccttcgcatggtactgttgtattcaaataaggtttgtgaattgtcggagagctcaaacgacgaaaaattggaaggaagcctttcatatctaaaaagtagagaaaaagaattgctcttgctgctcatgaagaactacaaaagagagttcacgcctatcgaagtcagcaaagaacttaaggttaccaataagacggtaacaaactatgcaaaatgggatgattgatttatatgtgagaggtaataattctgtagcttattcagagatatattcatcgtttgcatcagaaaaaatagttatatttctgatttgttgttgctggttatcaataatgacagctctaaggtacgaaaacatggagaaacatatgaagttgcaggtgttcgatttgcagcagaccagattcctaaaatagatacaaataagttattagaaataaaagcttgtaacaatataattgatttcggacagaatcattacttcaaatatgtttcttcagacggaaaagagcatgcattatttacaaatgacaagggtgttggggttccctactcggaacatatgcggggagcagagcatgatgcagttgctcagagatatgctcatttttggcggtatatgatgaacgatgatcctgtatatgtaggattgacttattctaatgatgatattgatgaatttatgaaacatgcaggcatagaaaatggcttctttactgttagaatggggaatcgggaagcaacacaatattataccaaaagcgaaaaccatactttggatattccatacggagaagatttgtggtgtttggaatacccgtcaaattatagattttgggaaaaaattgattaatctctgagagtctatttatatgtgttgtagttatcaagcaaagggatacttatatcgtgttacaggacatggtgtaggtatcctttttgcatattatctataatcattacataaaaaagtgcaaatgcacaaaaaatagtaatggttattgaagtgaaaataatttagtggtaaaataacattaccaaaattcgtgcaatgcacaaaaataaggagtgatactatggagattaagagagattcataccttgaacagttaaagataagaaaagataacggaatgattaagattatcacaggaatcaggagatgcggcaaatcattcctgttatttgtgttgtttaagaagtatttactggagagtggcatagataatgaccacatcattgagattgctttagatggcattgaaaatgaggaactgagagatccaaagaagtgttatcagcatattaaagagcgggtggaagatgaccggaagtattatctgctcttggacgaagtacagtttatgccacgatttgaggaagtgctgaacagtttgcttcgtatcagtaacattgatgtgtatgtaaccggcagtaattctaaatttttatctagtgacattgtaactgaatttagaggcagaggagatgagataagaatttatccgttgtcttttgcagagttctatgcggcttatgatggagattatgatgatgcttgggaagaatatatgatatatggtggtttaccacaagtggcacaattttctgtagaacgccagaaggctgagtatcttaaaaatatttttaccaatgtttatatcaaggatgtggtagagcgaaacaaaattcaaaatgttgatgagattggaactttggtggacattcttgcttctgccataggagcacctaccaatccaacaaaaatatcaaatactttcaaaagtgagagaggtatcaattacagcaataaaactatatccaatcatattgattatttggcagaggcatttttgatttctaaagcggaccggtatgatattaaggggagaaaatatgtaggagccaatctgaaatactatttttcggatataggacttagaaatgccagactaaacttcagacagcaggagccgactcatattatggaaaacattgtttataatgagttgcttgtgcgtggctataatgtagatgttggtattgtggatgtatttgcaaagaatagtgacggaaagagagttcataagcagctagaggttgattttgtagtaaaccagggcagtcagagatattacattcaggtggcttatgatatgacttctgaggaaaagcaaacacaggaacttaattcactccgaaatattccggattcatttaagaagattgttatagtaaatggaacaaaaaagccttggagaaatgaggaaggctttgtgatcatgggcatgaaatattttctgctcaatgaggatagtttggagttttagtatggaaggagataatatattccgatatagaaatatggatataaagttaggaggcagagaaatggcaacggttgtgtattctaatgaagaagatgatatgtgttctttggtgatagatggagaagaatatgttgaagatgaagaaagggcaattatccccaaagctgtattaaaacaaataagagttgaggatattcaggataatttccaaattgaaatatgtgagtcaaaagattcttcagtaataatggtatctgttcctatgacttttataaaagttggtaaaaatgagtttcaggttatttatgatgaacttattactagaaaatattgggatggatcagtaggacttgatgtatttaaaatctcttggttaccagcagaatgtaaaaaccaatggtgtatggaccaaaacaacagttaagtcaatattgacaaatcaggcatacattggttcggtggtgcatgggaaagtagtaattgagaaatacaataatattccactccatgcaacagatccaagtgaaaggagtgccgaggaaatgtggcactcctttcttctgcaagcataaatattgctttcaatatactgcaatagcaggtataatggaaagtgatatttgagggtaaaaaaaaatcagttttttttggtctagggttgacacgagcaggcaattatatgccaccggttgaaatgttggaagaactcagcaatatgtataatatgaccattttacacaatcgtatgatggcttacgttgaaaattgcatatatggtgggaaatgggatgagtataaaacgagagaaaaataatttgactttttccaaaaagaaaaatataatgacttttgaacgagtagcaaaattgcgtaaatccagttttgctgctcttttttgtaattttataatgcaatgaaaaagtgtgtagcttatcagcgtaagtccaacttataagataggtgcgcactttttatattaccaaatatccgtaagaagctgccagtggcagcttctgcaggtggaaaaaggaggattaagttaagatggcagaaagtaataagatgaagaaaatgccggtaaataagctcatggtgcagatgggaataccgatgattttatctatggcattgcaggcggtttataacattgtagacagtgcctttgtaggaaacatgaaatcaggaagtgaggctgcacttaatgcgcttacactggtgtttccggttcagatgcttatggtagcagtgggaatcggaacaggtgtgggaaccaatgcgcttcttgcgagaacactgggagagggaaaaagtaaaaaagctgcgaaagttgcgggaaacagcttatttcttggagtaattatttatgcagtatgtctgctgtttggaatgtttggagtaaaagcatacatctcatcccagaccgtagattcggaagtcattgcaatgggaacaagctacttaagaatatgctgtgtgatttcatttggaattattttcttctcgttatttgagaaactgttacaggcaaccgggcgttccatttattcgacaattggtcaggttgtgggagcagtggtaaatattattcttgacccaattatgatttatggcatcggacctgttcctgaaatgggagtagaaggcgcagcctatgcaaccgtaatcggacaggtggtatcagcggcattgttatttattttccatgtaaaattaaataaggaatttgagcatggtgtaaagtttatgaaaccagagggcagaattatcagggaaatctatgcaatcggacttccggcaattattggacaggcgcttatgtctattatggtttatgtgatgaatctgattttaaaattcagtccttcggctcagaccgcatatggattgttctataaagtacagcagtttgtactcttccttgcctttggacttagagatgcaatcacgccgattattgcatttgcctatggaatgcatagcaagaagaggattcaggatggaatcagatatggcttaatctatacgattgtgcttatgattgtgggtgtggcaattacagaaattttcccgggggcttttgcaacattatttaatgcaggacagtcaagagaatattttatcgaagccatgagaattatttctatcagctttattttcgccggaatcaatgtggcatatcagggaatttatcaggctctggacggtggcatggaatcacttgtgatttcactgctcaggcagcttgtaatcatattaccactggcaggtgttttctccagtttggtcagaaacggacagatgggcgtttccttaatctggtgggcattcccgataacagagattgttgcatgccttgtgggatatgtatttttaaagagaatccggaagaataaagtggaaagtttaagttaaggaggaagcagatatggcaaaaagaatcattacaatcagcagagagtttggaagcggcggacggtttatggggaaagaagtggcaaaaaaacttggtactgtattttttgcagtaccttttctttttctggaaaatgaagtatgatacagaggaagagtagctgcttgacgacagaagaattgggtaacataagaaaaatgtggaggtaaataaaaggcatgctgaatgtgaaaaatgctgaaatggcagatttagagcaaattatgaaaatttacagatatgcacaggattatatgataaagtccggaaatccgactcagtggggacatttttacccggatgcagacctgataaaatctgatattgataaaaatgcatgtaaggtaatatatgacaaggatggaatccacggggtattttcggtgtttgatggtacagaacctacttataagcatattgagggcggtaactggctgaatgaagaaccatatctgacgattcacaggcttgccggagatggtcaggtacatggcttgtttccgtgtgctttaaactattgtaaaaagatttctttaaatatcagggtagatactcatgcggataataaaactatgcaaaggctgattgaaaagaatggttttataaaatgcggtacgatatatgtaaaaaatggaacagcaagaatagcatatcaaaggactgattttcgggcggcaagatttgcaagcatatcacttaataccactaggtctgcggcaagaagcgtaagctcatcggtcgacaggcattcggacaactggcaggaaattgtggagaggtaaaaaagatttgtacagtttgacatagtggttgtccataagatatttagcgttaacggatcgtccctttacaaacagaataaaaaagcatataattcttttataaaatatttaataaaagaggacaaaaaaacggaaaataaagataaaagaaatatagcaagaaaaaaaatcatcaattatgtgctgaatcatccggttatgtccaaagcggagctcgcgaaagaattaaatctgagtatgccgactgtgttagcaaacgtaaatgacctgttggagaaaagactgttagaagaagtgggcgagtatgcgtcgacaggcggacgaaaggcaaaaagtataggaattaataagtcatattgtcatgcaatggggcttttgatcactgcgaatcatatcgaaatggtactggtaaatcttggagatgagatcgtaaaaaaagaccgcatccgtttaaaatttacggcagaattatcctactgtacagaggtggcacaaaaggttgaaacttttctggcagacgagcctgcgaaggagacactgcttggaattggtattgcgatcccgggaattatcgatcagaaagaacggattgttttaaaatcccacgcgttagggatagagaactatagtctccgctttttagagcaggctgtgggaatgccggtgtattttgaaaatgatgccaatgcagccatgcttgcagaaaaaaagcagaagtatcccaatgcgatatatctgtctttgaatcatacattaggcggtgctttctgcatagatggaaagttgtatcgcggacaaaaccagaaagcaggagagtttggtcatatgatacttgttcccggtggaaaaaaatgttattgtggtaaatcaggatgcgcggatgcatattgtgctgcaagtgtactgacggaagataacaggcagtcgctggatgcatttatggaaaatcttgaaagtggagataaaaaggttttacagatatggaatgagtatctggatcatcttgctgttttgatatcaaatctacggatggcatatgatatggatatcatactggggggcgatgtcggaggtgtactctcagattatatgatacctttgggagaaaaagtgatggcatataatggttttgaacatgatgtttcatacctgaagaactgttcgtacaggaaagaagcgtcggctgttggagctgcgaaatatttttttgcggaacatatgatggaaatataaattattatagtgtgaaaacagagtgaagtgtgagcaaaaaaacggaaaggaaacggtaagtgaggttttctttccgtttttttgtgcgttgattagaaaatatatacaaaaagcatatctgcaaattgtgcaatgcgtaaaattgagagaaatatattgacaaaatatgtttaaaggatgataatgtaattactttaataaaacatttaataaaacataaaataaaacagtataaaaaaggaggaagcaattatgttacagcaggtaatgacaaatccaggagaaattattttcagagaggttccggttccggaggcaaaggaaaatcaggtgttggtaaaaattatgaatattggtgtctgtggatcagatattcatgtttatcatggaaaacatccgtttacaaaatatccggtaacacagggacatgaggtttccggtgagatcacagaacttggaaaaaatgtcacagagtttcatgttggacagaaggtgacgatagagccacaggtatattgtggacactgctatccatgccgtcatggaaagtataatctctgtgaggaattaaaagtaatgggatttcagacgacaggaacagcatctgagtattttgcagtggatgcatctaaagtaacacctattccagaagatatgtcctatgaagaaggagctatgatcgaacctcttgctgtggcagttcatggtgtaaaacagatgggcgatgtggctggcatgaatattgcagtccttggagcgggaccgatcggaaatcttgtagcacaggcagcaaaaggaatgggggcagcgaaagtgatgatcacagatatcagtgatcttagactggcaaaggcaaaagaatgtggaattgatgtgtgtgtgaataccaaaaataaagactttggtgaggcaatgatcgaagcatttggaccggataaggcggatgtaatctacgactgtgctggaaacaatatcacaatgggacaggcaattaaatatgcaagaaaaggaagcacgattgtactggtggctgtttttgcaggaatggcagaagtagatcttgcagtggcaaatgaccacgaacttgacattaagagcacgatgatgtaccgccatgatgattatatagatggaatcagattggtaaatgagggcaaagttcatttgaaaccgctcatctcaaagacatttgcttttaaagattatctgaaggcataccagtatattgatgataaccgcgagacaacgatgaaagtaattatcaacgtcagtgaaaagtaaggagttcgtatggaaaataaatatggaattgtcggagttgcccatgtcgggcttccgacaaacgatttacagaaaacagttgagttttataggggtcttggatttgaagtaattatgcagacttataatgaaaaagcaggggaaaaagtggcatttttacagataaaaaattactgtatagagacttttgaaaatgggcaggcggcaatgtcagacggtgcataccagcatgttgctcttgatgtggaagacattgagagtatatatcagaaaatctgcaatgaaaaatacacagttatcacagacggaatcgaagaactgccattttgggaaaatggtgtgaagttttttatgattaagggaccaaatgaggaaagaatagagttctgtcagaaactctgataaaaacaggagggacatatgggaagcgaaaacaaaaatggaaaagtaccgctgatcagtaagattgcatatgggtttggtgatgttggatgtaatttcagctggatgtttgtcagtaattttctgatgatattttatacagacgtgttcggaatcagtatggcggctgtgtcagcacttatgcttttttcaagattctgggatgcaatcaatgatccaatcgtcgggggacttacagataaaacaaaatcgagatggggacggtaccgtccatggttgttagtagcggcaccaatcacagcgattcttcttgttatgacattctgggcaagacccgactggccgcagaatggaaagattatttatatggtaattacatattgtctgctggttttggggtatacctgtgtgaatattccatatggaaccttgtgtggtgctatgacacaggatattgatgaacgtgcaaaaataaatacatcccgttcggttgcagcgatgattgcaattggtgtgttaaatattatcacagttccactgctcagcaaattcggcagtcatagtgcaaagacaggatatctgacggttgcggtcatatatggatgtatttttacagcctgtcatttcttctgctttgcgaagacgaaagaggcagtgattactccggaaaaagaaaaaatttctgtaaaggttcagttgaaagcggttatgcagaacagaccatatcttcttgcattggcaggacagatattatttggatttacactgtatggtagaaacgcagatattctgtattactttacatatgtggaagggaatgcctcctactacacaacttattcgatgtgcatcattattccttctatcatcggggcagcctgttttcaaccattattccgcaagttgaataacaaaggaagaacagcatctctctttgctttatttacaggaatttccatgttgtctatgtttttctttaatgccaaagaatcaccggctattttttatgctttatctggtctgacacagtttttcttctctggatttaatactgcaatctatgcaattattccagactgtgtggaatatggggagtggaaaaccggacttagaaatgatggttttcagtatgcatttatttcacttggaaataaaatcggaatggcagttggaacagcacttttagcaggattacttggaaaatatggttatattgcaaatcagacacaaaatgcaattgtactttcaattatgaaacatgcatttacgacgattccgggtgcactgtggattgtgactgcggttgtattatttttctaccggttaaataaaaaacgttataacgagattgtggaggaactgaaaaatggaagaaaaagttgatatcgtggcattgggagaattgctgattgattttacggaagcaggacacagtcaggatgggagaaaattgttcgaacagaatcccggcggtgctccggcaaatcttctaaccgttgcaagccactttgggtatcgcacatcttttattggaaaagttggaaacgatatgcatggtaaatttttaaagaagacattgcaaaaggaaggaatcaatacagatgctattgttgaagacccgggttattttacaacgttggcatttgtggaaatcggtgaaagtggagaacggaaattttcttttgcaagaaaaccgggtgcagatacacagttaaaaaaagaagaactggatcagacattaatttcaggttgtagaatttttcattttggatcattatcgctgacagatgaaccggcagaaagtacaacgattgaagcggtaaaaatggcaaaagcagcgggtgcacttatttcctatgatccgaattatcgaccgtctctttggaagagcaaagaggatgcagtgaaaaaaatgagatctgtcatagaattggtagatgtcatgaaggtatcggatgaagagagtattttgttgacagaggccgaaagttatgagcaggccgcagaccaactccttgctatgggaccaaagctggtagccattacattgggagaacagggtgttcttatggcaacaaaaagcagaaaagaaatcatcaaagcatttcagatacatgcggtcgacacgactggggcaggtgattcattctggggaggcgtattatgcagtatcctttccatgaataagaatgttgaaaaaatgaaatgggaagaaatcagaaagtgtgctgttttgggaaatgcagttgctggattgtgtgtgcaaaagagaggtggcatccctgcgattccgacaaaagaagcagtgtttgaatttatgcagaaataatgaatgtatatgacaaaattggggctataaaaacgcccctatttttaacaaaaatataagcaggacaactttcgatatttgctcctgcctgtattttatgtaaattacgataagttttattccctgtgttcttcgccccatgtacagtctgattctggtgtagtctttaaatgcttttctgattcccaacaatcaatgcggagcatatagccagcagatatataaacatcaatactattaagctgtggattgtattctgcaaatattattctcgtcgtattttatctccttatcattcaatcaatcatttgttacaaaaatcagaagcatttcaatcagttcactatgtcactttcattttgtgttataatgtgttatcagatttcttggtctccgctgccgcttcggtcggcacagagcagaggtccactggacctcttgtgcccttgtatttgcccttatcagagttcgtaaacactggtgcgatgatataatacaagggaaacaataagggaaaactcacctgcgataaattcagtattttcaagggtttgcggagaatttaataacaaaatataacagttattaaatctcttaaaacaggtgaaatctcaattccagtttgtaggaacaatatggtacgaaaagcagaaaaacagaatttagaaatactggcaaatttagcagtacaatagaatcatttgtttcgcaaagacattataaaagaatgcagagaagtagtttatagagatacttctctgcatttttgctgtcgggcatccgaaaggggctgccggtggcaagtccggtaggtaagttatggtacatcttccgcagaagcagcaggctcacagattgatttccgggcggcaagatttgcaagcatatcacttaataccaccaggtctgcggcaagaagcgtaagctcatcggtcgacaggcattcggacaactggcaggaaatagtggagaggtaaaaaagatttgcacagtttgacatagcggttgaccataagatatttatgatatgttatgcaactgtcagagaaaatgtgtataataaaagaaaataacttcaggataatcatttgtaaaaaggaatgaaaggaatcaaatatgaaaacactgattgtagtagatatgcagaatgactttatcgatggttcacttggaaccagggaagcgcaggcaattgtaccgaaggtaaaagagaaaatcaaagagtatcaggagcgcggggacgagatcatttttacccgggatacccatcagtcagattatcttaacacaccggagggaaagaagcttccggtggaacattgcatcgaaggcacaaagggctggaaaattgcagaaggtttagaggtgccgggatgcagctatattaataaaccgacctttggatggacacactggtcggagagaaactttgaagaaatagaattatgcggtctttgtacggatatctgtgtggtatccaatgccctgattttgaaagcagaatttccggatgtagagattacggtagatgctacatgttgtgccggagtaacgccggaatcccatgaggcagcgcttaccactatgaaaatgtgtcagattcatgtaattggagagtagaaaaggcggaataattccaaaagaatccctccgacgcttgaacgtcgttcgttttttgagtataatcgtttcgtaaggaaggtgacagatatgaaggatacaagagttgatatttatcatggagtaacaccaattaaggtaaaaccgtatgagcataatgtaaaatattatgagacagaccagatggggattgtgcatcactccaattatatccgttggatggaagaggcacgcatggacttgatggatcagatgggcttcagctataaacagatggaagaccaggaaattatcagtccggtgctttctgtacagtgtgaatataagagcatggtgcgattcggagatactgttgttattgaaacagccattgcaggttacaatggaatcaaactcagtgtccgttatcgtatgacagacaaagagaccggagaactccgtactattgcagccagtgagcactgcttcttaaatcgtagtggcaagccgatttccttgaaacggtcataccctgaaatagatacaaaattcttccagatgatggatgaggaaagttag

SEQ ID NO: 379 - DNA, 15868 bp, unidentified
  source 1..15868: mol_type = unassigned DNA
  misc_difference 10708: note = a, c, g, or t
  misc_difference 10709: note = a, c, g, or t
  misc_difference 10710: note = a, c, g, or t
  misc_difference 10711: note = a, c, g, or t
  misc_difference 10712: note = a, c, g, or t
  misc_difference 10713: note = a, c, g, or t
  misc_difference 10714: note = a, c, g, or t
  misc_difference 10715: note = a, c, g, or t
  misc_difference 10716: note = a, c, g, or t
  misc_difference 10717: note = a, c, g, or t
  misc_difference 10718: note = a, c, g, or t
  misc_difference 10719: note = a, c, g, or t
  misc_difference 10720: note = a, c, g, or t
  misc_difference 10721: note = a, c, g, or t
  misc_difference 10722: note = a, c, g, or t
  misc_difference 10723: note = a, c, g, or t
  misc_difference 10724: note = a, c, g, or t
  misc_difference 10725: note = a, c, g, or t
  misc_difference 10726: note = a, c, g, or t
  misc_difference 10727: note = a, c, g, or t
  misc_difference 10728: note = a, c, g, or t
  misc_difference 10729: note = a, c, g, or t
  misc_difference 10730: note = a, c, g, or t
  misc_difference 10731: note = a, c, g, or t
  misc_difference 10732: note = a, c, g, or t
  misc_difference 10733: note = a, c, g, or t
  misc_difference 10734: note = a, c, g, or t
  misc_difference 10735: note = a, c, g, or t
  misc_difference 10736: note = a, c, g, or t
  misc_difference 10737: note = a, c, g, or t
  misc_difference 10738: note = a, c, g, or t
  misc_difference 10739: note = a, c, g, or t
  misc_difference 10740: note = a, c, g, or t
  misc_difference 10741: note = a, c, g, or t
  misc_difference 10742: note = a, c, g, or t
  misc_difference 10743: note = a, c, g, or t
  misc_difference 10744: note = a, c, g, or t
  misc_difference 10745: note = a, c, g, or t
  misc_difference 10746: note = a, c, g, or t
  misc_difference 10747: note = a, c, g, or t
  misc_difference 10748: note = a, c, g, or t
  misc_difference 10749: note = a, c, g, or t
  misc_difference 10750: note = a, c, g, or t
  misc_difference 10751: note = a, c, g, or t
  misc_difference 10752: note = a, c, g, or t
  misc_difference 10753: note = a, c, g, or t
  misc_difference 10754: note = a, c, g, or t
  misc_difference 10755: note = a, c, g, or t
  misc_difference 10756: note = a, c, g, or t
  misc_difference 10757: note = a, c, g, or t
  misc_difference 10758: note = a, c, g, or t
  misc_difference 10759: note = a, c, g, or t
  misc_difference 10760: note = a, c, g, or t
  misc_difference 10761: note = a, c, g, or t
  misc_difference 10762: note = a, c, g, or t
  misc_difference 10763: note = a, c, g, or t
  misc_difference 10764: note = a, c, g, or t
  misc_difference 10765: note = a, c, g, or t
  misc_difference 10766: note = a, c, g, or t
  misc_difference 10767: note = a, c, g, or t
  misc_difference 10768: note = a, c, g, or t
  misc_difference 10769: note = a, c, g, or t
  misc_difference 10770: note = a, c, g, or t
  misc_difference 10771: note = a, c, g, or t
  misc_difference 10772: note = a, c, g, or t
  misc_difference 10773: note = a, c, g, or t
  misc_difference 10774: note = a, c, g, or t
  misc_difference 10775: note = a, c, g, or t
  misc_difference 10776: note = a, c, g, or t
  misc_difference 10777: note = a, c, g, or t
  misc_difference 10778: note = a, c, g, or t
  misc_difference 10779: note = a, c, g, or t
  misc_difference 10780: note = a, c, g, or t
  misc_difference 10781: note = a, c, g, or t
  misc_difference 10782: note = a, c, g, or t
  misc_difference 10783: note = a, c, g, or t
  misc_difference 10784: note = a, c, g, or t
  misc_difference 10785: note = a, c, g, or t
  misc_difference 10786: note = a, c, g, or t
  misc_difference 10787: note = a, c, g, or t
  misc_difference 10788: note = a, c, g, or t
  misc_difference 10789: note = a, c, g, or t
  misc_difference 10790: note = a, c, g, or t
  misc_difference 10791: note = a, c, g, or t
  misc_difference 10792: note = a, c, g, or t
  misc_difference 10793: note = a, c, g, or t
  misc_difference 10794: note = a, c, g, or t
  misc_difference 10795: note = a, c, g, or t
  misc_difference 10796: note = a, c, g, or t
  misc_difference 10797: note = a, c, g, or t
  misc_difference 10798: note = a, c, g, or t
  misc_difference 10799: note = a, c, g, or t
  misc_difference 10800: note = a, c, g, or t
  misc_difference 10801: note = a, c, g, or t
  misc_difference 10802: note = a, c, g, or t
  misc_difference 10803: note = a, c, g, or t
  misc_difference 10804: note = a, c, g, or t
  misc_difference 10805: note = a, c, g, or t
  misc_difference 10806: note = a, c, g, or t
  misc_difference 10807: note = a, c, g, or t
tcagatcgccacatcctgccactgtccgccgatcagttcgcgggtggatttgaacccggcctttttcagcagttcgaatgcttccgcacgtccgtcgttcaccaggtcgggatagtggcagtctgagtttaccatcaccggaatatccagctcacgtaagcggtgcagatagtcggtatgcgggtagacctcctgtttcttcacgaggtttttcgtgttgacttcgaccatcagtcccttttcggcgatcaggtgcagacagtcgttgaatggtttttgataccagtccgcttgcaggtcgaagccttcgcatttgtgcccgttcatgtatatcttgtccatgtgcccgacaatgtcgattccgcctgcctcgatcattcgccgtgtggaactgaaatagtgggcgaccagcttgcggatatctccgtcgtagtaggcgtcgacagacttctggtactcccggaaaggaccgtcgatacacaccatattctcttccgcaagcggctgtgcgatcggaagaaagtggatggaaccgatacggtaatcgagcggcagattgcggaagtaggggatggacgcgttgtagctctcgtctaagaaatcgatttccagtcctacgtatatttccaaccggtcactgtatttctttttcagtcgttctatttctgtcagatattcgggcatatcgtctttagacatgttccagaatgtttcgaacggcagtggtgaatgggatgaaaaaccgtaggcgcggaacccgtgcgcaacagcgaatttaatgaagtcttccggcgtgctccgaccgtcacagaatgtacaatggctatggtagttactgagttgcataaatttttacttgtaaaagggcaaagataatttttttatcccgaaagacaacctgtttgataaaaaaaggcttgattgctgcctaagggttagcggcagaatcaagccttgaaaaacacgtgaataatgaaaaatcgtatgttttattttattacgttcagttcttttccaactttgataaatgcagcgattgctttatccagatgttccgtttcgtggcctgcggacaactgtacgcggatgcgggcctggcctttcggcactaccgggtagtagaagccggtaacataaatgccttcttcctgcatcttggctgcgaaatcctgggataatttagcatcatacagcataacggcgcagattgcggactgagtcggcttgatgtcgaaaccggctgctaacatcttttcacggaagtagctgacgttgttcatcagtttcgtatgcaaagcatcgctttctttcagcatcttgaacatttccaggctggcgcctacgatagcgggagcgacagagttagagaacagataaggacgggagcgctgacgcagcatgtcgatgatttctttctttccggttgtgaatccgcccatggcgccaccgaatgctttacctaacgtacctgtgaagatatcgactcttccgtatacattatattgttcagccacaccgtgtcctgtcgggcctactacaccggcagagtgggattcgtcaaccattaccaatgcgtcgtatttttctgccagttcacagattttgtccatcggggccacgtttccgtccatagagaacacaccgtctgttgcgatgatgcgatgacgttgtgcctgggcttcttgcaggcaacgttccaggtcggccatgtctgcattggcataacggtagcgttttgccttgcaaagacgtacgccgtcaataatggaggcatggtttaaagcatcggagatgatcgcatcttcttcagtgaacaacggttcgaacagaccgccgttggcatcgaaacatgcagcgtacaggatcgtatcttcggttttgaaatagtcggagatagcggcttccagttgtttgtgcagatcctgtgtcccacagatgaaacgtacggatgacatgccgtatccgtgtgtgtccatagcttctttggcagccttgatcagacgttggttgtcagacaggcccagatagttgtttgcgcagaagttcaaaacgtcgcttcctgcgtttactttgatgtcggctctttgaggagtggtgatgatacgctcgttcttatacaatccggcagctttgatgtttgccaattcctgagtaaggaaatctttcagtttaccgtacataactttgttttttgttagtatttttaattaagttgacaattatatctctattatcgcagacaagtggcaaaatattattcttgaaaccatttttttctttgtctctgatttgtctgccgatgcggcaaaggtcatattttttttgaatatataggctaaaaaatacaagaaattcataccggaatgtttttattctctatacctttgccatcgaaaaaacttaaaagaacatcaaacgcaatgaagaatgtattagtaattggttctaccggtcagattggatcagagttaaccatgaagttgagaggtatctacggtggaaacattgtagcaggttacatccccggacaggagcctaaaggcgaactgctggaatcaggaccttctgcaattgtcgacattacaaacgaacagcagattgctgagactgtgtccaaatataaggtagatacgatttataacttggctgcactgctgtcagccgttgcagaagcaaaaccgcagcttgcctggaaaatcggtatgggcggtttgtttaacgtattggaagttgcacgtgaaatgcattgtgctgtattcactccgagttcaatcggtgtgtttggcaataacacgccgaaagacaagactccgcaggatacgatccgtaacccgcgtactatgtacggtgttacgaaagtttcaggcgagttgttgagtgactactacaacatccgtttcggcgtcgacacccgttccgtacgttttccgggacttatctcctatgtgacacctccgggtggtggtacgaccgactacgcagttgatatctattattcggctgccaaaggtgagaagtttgtatgtccgatcaagcagggtacattcatggatatgatgtatatgccggacggtctgcgtgcagctattgaaattatggaagccgattcgacgaagttcgttcatcgtaattctttcaacattgcatccatgagctttgatcctgaaattatctacaacaacatcaaaaagtatgttcctgacttccagatggaatatgatgtggatccgttacgtcaggctatcgcagaatcatggcctaactctttggatgacacgtgtgcccgtgaggaatggggctggaaaccggaatatgatctggattccatgactcaggatatgttggctaaattgaaagaacgtttcaataagtaagaattaattttccgatcattagcagatcggtaggaaagaggcgactgcccggtgcgggcagtcgcctctttgtttggatcgtttttattcagtattgtaggctgtttcaatcataatgtgtctgttgcttgtgcagggaatgactaagtcaaaagtgtatgaaaaattatgttgtaaaacatgaaatggttaaatcaggttaagagaaagcttttttttgtggaaatattatgctgcataacataaactctctatatttgcactgtgtttttcatggtattagatttaaggttaacaatgaagattggctgtccgtgaggatagcctttttttatttatacccggttgatgttgtttcctccgagaagcgatcattttatccgaattgcccgttcttttggtattcttgattatatttgtatatctgaaaagattcattgtaataaaaatatctttatatggaaatgtacaaagcaaatgataaccggtatgccgatatggcttataggcgttgtgggcggagcggattgctattgccggtcatctctctgggattatggcataatttcggcagtgtagatgtgttcagtaactttattcagattgcgtatgccgctttcgacaatgggattacacattttgatcttgccaataattacggtcctgtgtatggatcggcagaggaaaatttcggccgtatcctgaagaaaggtctggggcaatatcgggatgaacttgttatttccacaaaagccggatatgacatgtggcctggtccgtatggcaactggggaagtcgcaagtatctgatggcaagccttgaccagagtttgaagcggatgggattagaatatgtggatattttctattcgcatcgtccggacccacagacgccgatcgaagaaacgatgggagcattggctgacatcgtccgccaaggaaaagccctgtatgtcgggatatcgaattacactgccggacagacggaaaaagcacttgccgtattgaaagaacatcgtgtgccttgcttgatccatcaagcgcgttattcgatgctggatcgcaggatcgaaccggacttgttgcctctgttgaagcaggaaggagtagggatgatcgccttctcgccattggcacagggcatgttgacggataagtatctgaacggtattcccgataattcgcgtgcggccaaatctacaggccatcttcaacgtgaacaggtgacggaagaaaaaataaataaagtaagacaactgaatgaccttgccaaacaacgcggacagacgttagcggaaatggcgattgcctggctgttgaaagacgaccgggtgacgagcgtcctggtgggagccagttcggttgcacagttgatagataacctgaaggcgttacaaaatacagccttttcagcggaagaaatacaaatgatagaaaatatattacagtaatatacactgataaatcatcatttattaatccaaacaattaatgaaaccattcttatatcaggttgcatcccttttttattctgaatacggggcggaagtgagccgtctggcctttgttttcccgaatcgccgtaccgggctgttcttccagaaatacttgtcggaagtatctgagaagcctcttttctcgccgacgatcctgacgatcaacgatctgtttgtacagttgagcggaaagcaggctgccgatcggatcagcatgctgtttaaactatatgatatttatttgagacatagcggttcttccgaaacgttcgacgagttcttgtattggggggaaatgctgctgaatgattttgacgatatcgataaatatatggcagatgcccgtatgctcttcaccaatgtgacggacctgcgtgagatagagaatgattttagttttctgagccctgaacaaattgcggctatccggactttttggtcttctttttacccgaaaggagatacgcccaaccaggaacaatttctggcggtctggcagattttatatgccctatataccgatttgcgggaagcgcttgccaccgaaggcaaaggatatgaaggtatgatttttcgggaagttgtcgaacagatggagaaagacgaatgttgcgacctgccctatacaaaggttgtatttgtcggactgaatgccctctcggtggctgaagaacgtttcctttccgggttgcaaaaacggggaatagctgatttttactgggattacgcctctccgaaagtgacggatccggataataaagcctcttacttcgtggagcgcaatttgcggcaattcccgtcgcaattaattgaaaatggacaattgactattgacaatgaagatgacgacaaaaagaagatcgaggtgatcggcatcccttccggaatcggacaggcaaagcaagtgtgcagcattctgaacgagctttgcaaggaagacgaaatgagtgcggaagaagcgttgcggacggctgtgattctgccggatgaacatttgttgattccggttctgaatgccattcccgaacagatcaaacggatcaatgtgacgatgggatatccgttggccggtacaccggtcgcatctttgatggaatatattctggctttgcaaaagaatattcgttatgtggaccggaggccggtgttctatttccgggatgtcttgccaatcctgaaccatcggtatatctcgactacttctccggagatggtttctaatctggtaaaagatatttcagaaaacaacaagatttacatatcgtatgacgatctgaataagacgccattgttgtccatcctctttactccggtgactgcggtggaaactttctccgattatttgattaacgtgttgcaggaactgaataaagcagttgaaggtggaaagttgaaagttgaaagtgtaaatagtgacacggagccactttcaactttcaactctcaactctcaactattaacgacatcgaacaggagtttatcttccattatttcgctacggttaaccggatgaaggaagtcatgcgggaggcgaatgtagaaatgaaaatcgacacctatttccgtttgctgaaacgtgtgacggacacaattacgattcctttccaaggtgaacctctttccggtttgcagatcatgggtgttttggagactcgtgcgcttgactttgaccggttgattatcctttcgatgaatgaaggaattttcccgttgaggaaagcggctaattcatttattccttataatcttcgtcgtggattcggtttgccgacatacgaacatcaggacagtgtttgggcgtatcatttctatcgtttgatttatcgtgccagccatgtcagcttgctttatgatactcggagtaacggattgcagacaggcgaggttagccgtttcgtgcatcagttgcattatcattatgaggagccgatacagaataagctggttgtttacaatgtctcttcttccaagactcctgccttgcaggtagctaagacggaggaagtcatgaaccgtctggctgatttccggagtggtgggacgcgggcgatatcggcgagtgcagtcaatacctatctggattgtccgcttaaattttatttctccgttgtcgagggaatacgtgaagaagaggaggtaagcgagacgatcgaaagtaatgtttttggaagtatcctgcataaggtgatggaagaattgtatcagccattctgcggaaagatggtgacggctgatctgctgaaagcgatccgaaaagatacgcctatgttgacgggagcagttgcccgtgcctttgccgaaattttctttaaaacggacattgttcgtccactcaccggacaaaacttcctgatcggcgagatgattcgcaaatatgtggagaaagtgctggaacgtgacgcaaaacagactcctttccgttatatcgaatcggaaaagaagataaaatgccttttcccattgacggataaaagcaatatccagttgaaaggatttatcgaccgtatagacgaagtacgcgatgtcgtccgcattattgactataagagtgggagcgggacgacgcagtttacctctgtagaagctcttttcgacaaagcagatacggatcgttccaaagcggttatgcaggtctttatgtatgcatggatgtttaacaggtcagttcagctttcaacagctattcagccgggtatctattatatgaggaccctcttttcttcctctttcgatcctggaatttaccatcgtacagaccggttcaaaacagaacaggttttggacttcgccaactattgcacggattttgaagacagcctgcgaaattgcttggatgaaatcttcgacacagaaaccccattcgtgcaaaccccgaacggcaaagcctgcatgtattgtccgtttaaggatatttgcggaaaatagtgtttttacagatttcccatatattcatccacaatttcattcaggaagcggttgaatggaagaagctttcgaaaacaatcgatggtttcttccatccagtccggctggctgaaaaaactgtcgggcttaatacctataacgctgaagtctttgtgccttaatatatgaccgtaaggagaatcggaggggaaacctgccgggatacgttttagcatgtccccttcgagtgacgggtacagagctttgaaggaaggctcttcgatgatggaaacaaattcatctatgttattgtatatttcacgtcgaaggactttcaatatttccggtttgggataccagataccaccggacagtacgcagtattccggttcaagatgaaagtagtaagctccccggatactatgacgtcctccttgagcaatacaggctgacatataagtcttgtaaggcgacttgtcgaggctgaagcggatgtcgcgattaatacggaacagacatttccgtgcatccaatccccgtatatcaggatcaaatacgctgattcgttcgattaactcttgtacttcgttgataaaagcacagcgaagtttgtcatatcgttctctattttcatggaaccaaacggtattattgttgcgtcgtaaatcgtctaagaatcggataatttctgcattcatattaggatattctttttttattgtattttgtatctccattgtttcggagtcatctgtttcatctttttgaaatagcgattgaagtagggaatgtcggtgaagccgcattgccaggctatttcgttaatgtccttatccggaaagttgcggagtaaagtgccaacggcctctatccggtattcgttgatgaagtttgtaaacgttttgcctgtttcacgtttgaaaaacgagcagaacgccgttgtgctcatgctgattacgtttgcggcgtccgaaagagttattttctccttgtaatgctcgatgacgtatttgaagatcagttgcatacgttgcatgtttttggtaatgccgttgaataccgtttcctgcaaaccgatagggattaaatcggttgtggttccgatttgttgcaggatgcggatcaacatcagcatcctttcgcttgcattcaggaggttcatttcttctaagcaggatttgatctttccggctgtttcgcctgtcagcaggatgccttgctggattgccgataaccggtgagcggcatattcccattcggtaaaaaaagacaggccggtttgtagcaagtcgggattgaattgcacaactatgcatctccgttttccatcaggctcgcagctttcggggttatacatccaacaatgtggttggttggtcgggaccagtacgacttctccctcctcgaacggctccagaaagtcgcctatcatccggtagcctgaacctttcacaacataacatatttctatttcgggatgaaaatgaagaggcatttcgtctttcgggtacaagctggaataatcgtagcgtaatgaggcacaactatcttttttgatttgttcgaattttagtttctcgtgcatgtcggatgaactttctgataaaacacagtaaaattagacaataattgcataatctgcgacaattacacttaataattttgttgtttctttgcggccggaaaaacagaaagattgaataggttatgaagaaaggtttgtatgcattgtcttttggcacatttgggttggggattgcagagtttattatgatgagtatcttgccggatgtggcggcaggatttgatatttccttatccgaagccgggcatcttatttcggcttatgcgttgggggtatgtgtgggagcaccgttggtagtggtggtggccaggagttggccgctacgtacgatcttgcttgctttggttgggctttttgttgtcgggaatctgcttatggctctgtcggccgattattggatggggttgtgtgcccggtttgtatcggggttgccgcatggggcttatttcggagtcggttcgattgttgccagccgtttggcggagaaagggaaaagcacttctgctgtagctattatgataatggggatgacgattgccaatttgttcggtgtcccggccgggaatttcctggggcactttctgtcctggcgtttggtttttgtgattgcagcgttgtggggtggcgtaacgatttggtttatccggaggtgggttcctgttttgcccgccctgccggcgacgaatctgaaagggcagtttcgttttttgagaaggccggaaccgtggatgctgattgctgctaccatgttaggaaacgggggagctttttgctggtatagctatgtcaatccgttaatgacggaggtgtccggtttcagtgtcgggacaatgcctgtattgatgttgctggcgggtgcgagcatgtgtgtcggtaactatttgggagggcatttgtctgatcgttttacacctggtatcgtagcgatgtccatgcagtttctgatgtttgcatcacttctgctgatttatttttttgcttcgtacggctttttgtccgctttgctgatgtgcgtttgtactggttgcctgtttgcagtttcttctccacagcaattgttgttgcttcaatattctcctggcggagagatgatgggcggggcgatggtccagcttgcttttaatttggggaatgccgtgggggcttattttggaggattgtcgatcgaacatggggcagggctggaaagtacggcattgatcggttcgttttttgccctgttaggaactacggtgtttctggtattcaactatatggtgtttaaacctcagaggaaattacttttaaaggggggaatataatttccgaggatcaagacggtgtttttggagataaaaaacagccgtcnnnnnnnnnnnnnnnnnnnnnnnnnnnnnnnnnnnnnnnnnnnnnnnnnnnnnnnnnnnnnnnnnnnnnnnnnnnnnnnnnnnnnnnnnnnnnnnnnnnncgaaatcgggacggtgtttttggagataaaaaacagccgtccgaaatcgggacggtgtttttggagataaaaaacagccgtccgaaatcgggacggctgtttggatttataatgtctcttgtttcagttgttcgacgaaacgatcgattcgctgtagttctttcggaatatcgattccctgcggacagtgtggattacattggttgcaactagtacaatgatccgcttggcggagtttcggtacactgcggtcgtacccgatcagataagcccggcgagcttcgcgatagttttcatcctgtccgctctgagggacattcccctcgttcacacatttattataatgaagcaaaattcccggaatatcgataccgtaaggacaaggcatacagtatttgcagtcgttacacgggatggtcggatactgcatcatcaagtcggcggtgtcgaacaagaaacggttttcctcttccgtcaacggttgcaacgggcagtaggtgcggagattgtcttgcaggtgctccatgtaagtcatgccgctcagcacggtgagtacgccgggaaacgagccggcaaaccggaaagcccaggaggcgacgctccgtcccggttcgcgttgcttcaggcgggcgacgatatggtcgtgcacgttcgaaagccgtcctccgaggagtggctccatgatgatggcgggaatcccccgtttctgcaattccccgtacagatattccgcgtcggtgtttcgcgggttgatctctttggcatgtttccagtccaggtaattcaactggatctggacgaaatcccattgatattcgtcgtgtttcgaaagcaaataatcgaacacctctatatctccgtgataggagaaacctaagtttcggatacgtcctgccttgcgttcttcgagcaggaagtcgagtatgccgttcttgacataccggttttcataggcttccataccacccatgccgatcccgtggagcagcatataatcgagataatcgacttgcagctccttgagcgaattgttatacatcgcgatagaggcttcgcggctccatgtgtcgggagagaagttcgaaagcttggtggcgatataatatttgtcgcgcggatagcggctgagggcgatccccatagcatgttccgaacgtcctttgcaataggcgggcgaggtgtcgaagtagttcacaccgtgctcgatggcatagtcagtcagccggttgaccatctcctggtcgatttcgtcatcgctgtctcttgcgctgtttttggcaatggtcggcaggcgcatgtatccataaccgaggatggaaactttgtcttttgtggacggcgtcgtgcggtatgtcatccggtccgtgggaataggggtggagcttcccggacctgaggccatcccgctgtccgaactgcacccggagagcaacggggcggtagttgccgtgctgattcctacaatcttcaggaaatcgcgacggtttatcgcttgatgattgtcttttttcatatatgatgattcttttatttcttgatcaaatattccggtgttgttcgtgtccttccacatatatggcgctgaacggacgcgacgggcacaggttttcacaggctccgcagccgatgcatttttcctcgtttacgaccggcagttgaggcgaatccgggtcgttcgggtcttttgccaccatcaagatcgcctgggtagggcaatggcgggcacagttgccacaagtgacgccgtcccggttgacgatgcaattttcctgaatcagtacggcatgtccgatctggatagccgtcttgtccgctttcgtgatcggacggatcgctccggtcgggcaaacttccgaacatttgacgcattcgggacgacagtatcctcgctcgtacgatacttctggctgcataaatgtttgaaggttccccgaaggacgcagcacatggttcgtacaaaccgatacacaaagctggcacgcggtgcaatgctgggagaaattggcagcgctcagcgagcccggaggagtgatcggggttgtccggtccggtttctttttatcttcgatgatggccagtccgccgtcgactttcttgtccgggagttgtactttttcctgggctttcagtgcggctgaagtggcaagtaatgccgatacggtaaagaatttgcgacgatcgggcttgtctacggccggttgggcggtctgtatttccgccttgtttgtttttctgcgtgtatatcggatggctccctgccggcatttgtcgatacaatccatgcaggcgacgcaacggctgtaatcgatctcgtgtgctttcgcattgatacaggctgctttacaattgcgggtacacaaaccgcaaccattgcatttggacgtatcgataaccggcttgaaaacggaaaaacgggagatcaatcccaaaaacgttcctaccgggcagatcgtgttgcaataggttcgcccattccgccaggcaagtatgatcagtataatgaaagtaactgtggcaatgataaaggttgggaggctccgtagccagacttccgtctcgtagaaagcataactgcccgcccgttccgccaagtaggccagaaagttgttcccccattgccagaggggtgcgaataagttagaggcgatacgcccgtaagcgctgtagggtgcgatcaaggccgcccatgcccctaacccactgatcatggcaaggataaagatcaccatcaccccgtatcttaaccaggacaaggcgggggaataccggaaacgatttttcttccgtttccccgccagccatgaaacgacatcctggaatataccgagagggcagattacagagcagtaaacccgaccgaaaatccaggtcaatgcaatgagcaacagcaccacgccgaggttgagtgccaataccgccggcaggaactgtattttcgccagccacccgaaccatgtatgcaacgtccccgtgaaatcgagaaacagcagggtgacaagcgtaaaacagataagtgcagttgtaagtctgatcgttcgcaacataataaactctttttagatagtctgttattttatgttgcaaacataataaaaggaaatggtttgcaacttacaggaattacggattgatgtaccaatattacggttttgtcaacttctgcaaaaagtctggctgacaaaccttagaacttcaggcaaggccgtccgccaataggtccagctatggccgccgtctcgtactcggaattcatgcctgatccctttctgcttcatgacctggtgcacctgcatgtttccgtccagcaggccgtcgtcatcaccgcaatcaatgtaataacgaattttgggcaagttgttttgattccagtcggaaaggatcttcaagacattgttttgcttccagtgttcgtctcccggcccgaacaggcggttgaataaatccttgtgcgatttgttttttcttgcctccatgactgtgtcgtcgaaaacggcggcactcaacggagcacatgcgcagaacatgtccggatgatgcaagctgtacaggaatgatccgtagccacccatcgacaatccggcaattgcccggctttctttgtcactgcgaatccggtatgttttttccatataggggataagttcttcaaaaaacatgtcttcataaggtacttttccatcatactggttgatataccaagtgtcccatgcgtccggcatgacgattatcatcggcacggcttcctcgtttgcgatggcacggtcggcaatcgttttcatttgtcccatctgtatccagttggtttcattgtccgtataaccatgcaagaggtagaggaccgggtaattccttttcgaggtgttgtagtcggaaggcaggtagatggagtaggaaactttcctacctaatttgttactttcgaaagagagcgattcgaaaactgtactttgcgaatatcctgcaacgttgaatagaaagcacaggatacaatagagataaaatttgtttttcatatactattaataattagatttgtttgtctggacagagtaagaataagagaagagagcttgccggaaaacccattaggtttcgacatactctctttcccttattgggaaattaatccgccaccggatagggaaattcggtcaaccctttgtacatgaattgataggtcggaacttcgattcccaattcttgggcagttcgtacgacatagcctgtcaatgtttccacttcggtgcgattgcctttttgaaaatcactgtgcatggaggttgtggagttgttaggcatgatcttctgggcgtcgatggcggagaatacttgaccgtccggcagacgaatccctttggcttctgccacgcttttgagttcataacctaatgtgatgaacagatcgatatggttatttaccacttcgccaatcgtttcattgaaataggaggtgatagtggcggcggtcgagatcatgaagaatttcttccagatttccaagtcaatgtcatccggtattgtggtaaggatacgggcgttggccaatatatcctgtaagtctttctgtcgtttcttgtttccttgtttacttccgaagaacatccggtcctttatggtgaacttttccactcttcccggtctgaccaagcgggaaccgatgtaaacgcatcctttccaaacctcattgttcggtaatagcttttgtatgcgttccgctatatccgctccgttcagcaggggaatgataaccgtattagggccgatgatcggagtcagctgaactatattctcctccaagtcgtagcttttggtacagcaaaacaggtaatcgactggtcctatttcagcaggattgtcggttgcgagggttggttttgctttgatcgtcaggaatgtatttttgacttcgatgccgttcttacgtatctcttccaggttttcaccccgggaaatgaaatagatgtcaatatcttcagagtctttgtaacgggcagctaatagtcctccgtagtagccgcctacagctcctataccggaaatcgctattttagttttattcat

SEQ ID NO: 380 - DNA, 14337 bp, unidentified
  source 1..14337: mol_type = unassigned DNA
  misc_difference 11820: note = a, c, g, or t
  misc_difference 11821: note = a, c, g, or t
  misc_difference 11822: note = a, c, g, or t
  misc_difference 11823: note = a, c, g, or t
  misc_difference 11824: note = a, c, g, or t
  misc_difference 11825: note = a, c, g, or t
  misc_difference 11826: note = a, c, g, or t
  misc_difference 11827: note = a, c, g, or t
  misc_difference 11828: note = a, c, g, or t
  misc_difference 11829: note = a, c, g, or t
  misc_difference 11830: note = a, c, g, or t
  misc_difference 11831: note = a, c, g, or t
  misc_difference 11832: note = a, c, g, or t
  misc_difference 11833: note = a, c, g, or t
  misc_difference 11834: note = a, c, g, or t
  misc_difference 11835: note = a, c, g, or t
  misc_difference 11836: note = a, c, g, or t
  misc_difference 11837: note = a, c, g, or t
  misc_difference 11838: note = a, c, g, or t
  misc_difference 11839: note = a, c, g, or t
  misc_difference 11840: note = a, c, g, or t
  misc_difference 11841: note = a, c, g, or t
  misc_difference 11842: note = a, c, g, or t
  misc_difference 11843: note = a, c, g, or t
  misc_difference 11844: note = a, c, g, or t
  misc_difference 11845: note = a, c, g, or t
  misc_difference 11846: note = a, c, g, or t
  misc_difference 11847: note = a, c, g, or t
  misc_difference 11848: note = a, c, g, or t
  misc_difference 11849: note = a, c, g, or t
  misc_difference 11850: note = a, c, g, or t
  misc_difference 11851: note = a, c, g, or t
  misc_difference 11852: note = a, c, g, or t
  misc_difference 11853: note = a, c, g, or t
  misc_difference 11854: note = a, c, g, or t
  misc_difference 11855: note = a, c, g, or t
  misc_difference 11856: note = a, c, g, or t
  misc_difference 11857: note = a, c, g, or t
  misc_difference 11858: note = a, c, g, or t
  misc_difference 11859: note = a, c, g, or t
  misc_difference 11860: note = a, c, g, or t
  misc_difference 11861: note = a, c, g, or t
  misc_difference 11862: note = a, c, g, or t
  misc_difference 11863: note = a, c, g, or t
  misc_difference 11864: note = a, c, g, or t
  misc_difference 11865: note = a, c, g, or t
  misc_difference 11866: note = a, c, g, or t
  misc_difference 11867: note = a, c, g, or t
  misc_difference 11868: note = a, c, g, or t
  misc_difference 11869: note = a, c, g, or t
  misc_difference 11870: note = a, c, g, or t
  misc_difference 11871: note = a, c, g, or t
  misc_difference 11872: note = a, c, g, or t
  misc_difference 11873: note = a, c, g, or t
  misc_difference 11874: note = a, c, g, or t
  misc_difference 11875: note = a, c, g, or t
  misc_difference 11876: note = a, c, g, or t
  misc_difference 11877: note = a, c, g, or t
  misc_difference 11878: note = a, c, g, or t
  misc_difference 11879: note = a, c, g, or t
  misc_difference 11880: note = a, c, g, or t
  misc_difference 11881: note = a, c, g, or t
  misc_difference 11882: note = a, c, g, or t
  misc_difference 11883: note = a, c, g, or t
  misc_difference 11884: note = a, c, g, or t
  misc_difference 11885: note = a, c, g, or t
  misc_difference 11886: note = a, c, g, or t
  misc_difference 11887: note = a, c, g, or t
  misc_difference 11888: note = a, c, g, or t
  misc_difference 11889: note = a, c, g, or t
  misc_difference 11890: note = a, c, g, or t
  misc_difference 11891: note = a, c, g, or t
  misc_difference 11892: note = a, c, g, or t
  misc_difference 11893: note = a, c, g, or t
  misc_difference 11894: note = a, c, g, or t
  misc_difference 11895: note = a, c, g, or t
  misc_difference 11896: note = a, c, g, or t
  misc_difference 11897: note = a, c, g, or t
  misc_difference 11898: note = a, c, g, or t
  misc_difference 11899: note = a, c, g, or t
  misc_difference 11900: note = a, c, g, or t
  misc_difference 11901: note = a, c, g, or t
  misc_difference 11902: note = a, c, g, or t
  misc_difference 11903: note = a, c, g, or t
  misc_difference 11904: note = a, c, g, or t
  misc_difference 11905: note = a, c, g, or t
  misc_difference 11906: note = a, c, g, or t
  misc_difference 11907: note = a, c, g, or t
  misc_difference 11908: note = a, c, g, or t
  misc_difference 11909: note = a, c, g, or t
  misc_difference 11910: note = a, c, g, or t
  misc_difference 11911: note = a, c, g, or t
  misc_difference 11912: note = a, c, g, or t
  misc_difference 11913: note = a, c, g, or t
  misc_difference 11914: note = a, c, g, or t
  misc_difference 11915: note = a, c, g, or t
  misc_difference 11916: note = a, c, g, or t
  misc_difference 11917: note = a, c, g, or t
  misc_difference 11918: note = a, c, g, or t
  misc_difference 11919: note = a, c, g, or t
atgaaagaagactggaaacccggaacaatgatttatccgctgcctgccgtattggtgagctgcggaagcactccggaggaatataacattctgactatcgcatggacggggacgatttgtacgaacccgcccatgtgctacatctccgtacgccccgaacgccactcctacgacatcatcaagcggaatatggaattcgtcatcaacctcaccacgaaagatatggcacgggccacggactggtgtggcgtacgctccggaaaggactacaacaaattcgaggaaatgcatctgacaccggggaaaagcaccgtagtcagcgcgcctctcatcgaggaatcaccgctttgcatagaatgccgggtaaaggagattatggctctcggttcgcacgacatgtttatagcggatgtggtaaatgtacgtgccgatacccgtaatctgaaccctgaaaccggcaaactggaactggcggaaacgaatccgctggtctatgtgcacggtggatattatgagctgggagaaaagataggcaaattcggatggtcagtagagaaaaagaagtaataatgcgataaaggttttaagagatggagttgcgacgaatcttgatgggcttatatctgttggccttccccgccatgatgtggggacagactccggttgtgcccggtactgccgacgaagagcattccggacaccgcaaggaaactccggtcaatttcggtttcaaaggcggtttcacctcttccttgttccttgtatcccagttcagcgtcaacggagtgcccatcgacgaagtgcagaacaattacaagataggatatttcggctcccttttcatgcggataaacttcgatcgccacttcctgcaaccggaaatatcctacaacatcaaccggtgcaacatcaccttcgagaaacctctgcccgaagacgccgcatcaggagcccggctggaggaagcctccatgacatcgtccatccacagtatagacatccccgtcatctacggatacaacttcatcaaggaggggccgtacagccttgccgtctttggaggacccaaagtgcgctatatatgggacaggaaaagtgacatcgacttcgagaatttcgaccaggtgaatatccgtgaaaggctgcgtccgctcaatctcagtttcaccgtcggcgtatccgtcaccatctcacgcgtctttttcgacttccgttacgacatggggctgcataacatctccaaaagcgtgacatacgatattccggccgacaacaacgctgcagacgaaaacacgaaaaacgaaatccgttttcaccgcagggacaatgtgctgagtttttctttcggagtgttcttttgacagtaaatttcttccttttctttcaatttattcatttatttcccgtaaatttgtgcgcttaataagagaacacagatttatcaaacttatctaataagcagaatgaaaagagatgatttaattttcgaacttatcgaaaaagaacaccaacgtcagctcaaaggcattgaactgattgcatcagagaactttgtaagtgaccaggttatgcaggcaatgggctcctgcctcaccaacaagtatgctgaaggataccccggcaagcgttactatggtggttgtgaggtagtggaccagagtgagcagattgccatcgaccgcttgaaacagatcttcggcgcagaatgggccaacgtacagccgcactccggtgcacaagccaatgcagccgtattcctcgccgtgctcaatccgggcgacaaattcatgggactgaaccttgcacacggcggtcacctctcccatggttcactggtcaacacttccggtattatctatactccctgcgaatacaatctgaaccaggaaaccggacgtgtggactatgaccagatggaagaagttgccctgcgcgagaaacccaaaatgattatcggcggcggttctgcttattcccgcgaatgggactacaagcgcatgcgcgaaatcgcggacaagataggtgccatcctaatgattgacatggctcatcctgccggactgattgcagccggtgaactggataaccccgtgaaatatgcccacatcgtgacctccactacccacaagactctgcgtggtcctcgcggtggcgttatcatgatgggtaaggacttccccaacccctggggcaagaaaactccgaagggagaaatcaagatgatgtcccagttgctggattcagccgtattccccggtatccaaggtggtccgctagaacatgtcatcgcagccaaagccgttgccttcggcgaaatcctgcaaccggaatggaaagaatatgccaagcaggtgaagaaaaacgccgctgtcctggcacaagccttgatagaccgtggcttcaccatcgtttccggcggtacggacaaccactccatgctggtagacctgcgcagcaaatatcccgatttgaccggtaaggttgccgagaaggcgttggtatctgccgacatcaccgtaaacaagaacatggttccgtttgacagccgctcggctttccagacttccggtatccgtctgggtactcctgccatcacaacccgtggtgccaaggaagacctgatgctcgaaattgccgagatgattgaaaccgttctgtccaacgtagacaacgaacaagtcatcgcagaggtacgtgcacgcgtcaatgcgaagatgaaagaatacccgctgtttgcttattaataagcaaacagaattaaaaattaagaattaaaaattaaaggctgcgcaatgttcgctttgaactgcgcagcctttaatttttaattctaaacgcgctccgcgcgtttagctcagcccttctatatttccgtccacaatatcaatgtgttcggcttgtggtttcttgggtaatcccggcatacggagaatttcaccggcgatggctacaatcatttccgcaccgttattgaccacaatatccttgatgtggaactcaaagttgttgactgcaccgtatatcttcgggtcggcagagaaggagtactgcgtcttggcgatacagacggggtaatggctgatacccatctgctctatcagtttgataaccttgcgggagtggagactgtaagtcactacgcttgccccgtagaggttgcaggctaccttttctattttacgttccacgcaatcgctctcttcgtaggtgaaggtcagcggttcggatggtttgttctcgatagtatctactaccagattggcaaggtcaacggctccctctcctcctttggcaaaggcgttgttcacggcaaaacctacctcaagcttttcttcgcaatggcggcggatagcttccacctcctcgtccgtatcactggcaaaacggttgaatgccacgatgacctgctggccgaatgaacgcaaattgcgtacatgtttgtccagattgccgaagccctctttcagtccttccatattgggttccttgatgcggtccagactgacaccgccatgcatcttcagtccttgtgcggtagcaacgattatcgtcagcttgggctgtaggccgctcttgcggcacttgatgttgtagaacttctccgcacccaggtcagctccgaaaccggcttccgtcactacataatcgccgaatgtcatggccatttttgtggcaagaatggagttgcaaccatgggcaatatttgcgaacggtcctccatgaacaaaagcagcagagccttcggtagtctgtaccaagttggggttgatagcatctttcaacagtacggtaatggcaccggctactcctaactccttcactgtgaaaggagtaccatcgaaacggaatcccagaataatattttcaatacggcgacggaggtcgtcgaggtctgttgccagacagagaatagccataatttcggaagccggggtaatatcgaagcccgactcctcagtaatgccgttggtgctcggtcccaatccggtgacaatgctccgcaaggaacggtcattcacatcaagtacgcgccgccagatgatttctttcagtccgaagccgtctgcctgatgctggtacaagtaattgtcgagcaaagcggaaatcatgttgtgtgcggaggtaatggcgtgaaagtcgcccgtaaagtgcaggtttatcttctccatgggaagcacctgggcatatcctccaccggcagcaccgcctttcatgccgaagcaaggacccagcgagggttcgcgtaaagccacaatcgctttcttgccaatcttgttcagccccaatgccagcccgatggacacggttgttttaccgatacccgctttcgtagccgtgatagccgtcaccagtatcagattgctcttcttcactttctcttcatcaatcagatgcgtaggaatcttggctatgtaacggccatagttctctacttcgtcacgcgggatatccacactttcagccacctgctttatcttcttcagctctatgctgcgggctatttcaatgtccgatttcatacagagtcttttctttaaataacaactttaatgttttgaaagttgcaaaagtacgaaagatgtggcaaagtacaaaagaataccgtattttcacctgaccacctgcatcttctatctatttgaaccgcgacgtatccactgcctcccgttgcttctccttatatccaccgaatttataggtgaacgatacgccgaattcgcggaagcatgagtaatgattcgtcacattctgcgtcttgaaacggatgcggggagaaatctgtcccgtctcaaaaatatcgttgcaatagaggttgagaatggctttgttcttggcgaagccgtagcgcagggcaatattcacattgcccgacgtaggcaggtcgtagatgccctgaatggctttactatgcacaaatccggtcaccgtcagcttcaagtcgggtttggtggagagagtaaaagtattgttcatctgggcaatgccatagcattgctttctgtcgaaaggaatatcccagaaatcaccatccttttcgcgatgccacaagccgatgagggtaaggcgagaattcaaccaatccttcaccttaaacgggatagaggcttgtattcctgcttgttgctgataatcaaaattgagtgtcttgtagatttcaaccagacgttcggaggattggtagagtgtctgtacagagtagtccttggtatggttgaaccaagcgctgaagatgtatttgctcttcaaaatataggtcattttaagctcatactcttgcgccggtttcagcaacggattaccatgcagctcagagtatccgccaccgatgtaagagacggcatcctgcaccgcccagtagtcgggatagtccttgtcgctgctcagagagagctgaaggatatgtcccggtgccggcatatagttcaagttgacgatgggataccagtcccactggttccagacgggagtcttgtaatgctccacagccagagaagcgtccaaagcaagtttgtcgccgaaactcttgctgaaacctgcatagatattccaggtctgctcgcggcggcgggacttcatattgctcaaggcatccgatgaggtcagttgtccaccggtttcggggtcataataatattggtagctgttgtcgatgctggtagtatagatggctccgtaattcaaatcccaaccttttcccagactgtgctcctgggccagaaagaatttccatcggttgatgcgttggcaatcttcggtgtagaagtcgagttcctcgtcctgcatgcggctatgcagcaactggtcggacggggaacggtagtaggtcagttcggcaccggctttgaggccaaaaggggtacgatagtccagacggccgttgtgcagccagtcggtgctattgccatgagttgtggacacctgcgtgcccgtcacgcccttccagttgtgggaggtggaatagccaccgttatagacgaaactcagctgatggttcttggcgatattatagtccgcccctacccggaagctatgggtatggctacggccacggcccacctcatctgttgtcatggggtgaaccgagccgtctgccagagtgtgcacagcctctttgtcggtagtagagtagccctggccatggctgtgcgagtaaagaaaatctgctgagaatttatttttgctgaagagcaggctggcgcgttcctcaaagccttcgttatgcttctggcgatacttggcatagagttcgccttgccaggagccggggccgcctgccgattgtttcagggtgatattgataagtgcgccacgcacctggtagcgtgcaggggcgttgtacatcacttccgccttctctatgcggctggcagggatgctgcgcagcaaggaatagagctgctctgtgctgagggtggttactttgccgtccaggataacggtgactccctgacctgccaactgcagccctccattcatctcgatgacgccgggaagctctttcacggcatcgtaggcattatctacggggaggttccggataaggcggggcaggtcgtacaccagcttgccttgcgctgcctttacgatggggcgttcaccggtaatcatcacttccggcaaggtctgataaaggctgtccagacgggcatcggtcgtaataaggctgtcggcgctgaggatgcggttgtcgtccgcaccggaggtggttgcagtgccgttgttctcttgtgccgaaaggctgatgctcaaagcacagcatacaatagggagtaaatagaatcgtttcatgttcttctttttatttatgtttatattcttcttctgcaaatcttcgtctgcaaagtacggcagaatcagcagaaacttgtgttatcagcggcttaccaagtgttatccagtgttatcgggagtgttatttagtcttatcggatgatagggttcacaatattaatcttacctttgtatgtataaaagtaaccggaaacaaacatgaaactgccattcaaatatattgccatacttgtcatcgtctccctggccggcatcttcgcctaccaagcctactggctgacggggctctaccataccatgcacagtgaaatggaaagggacatcaccgaagccatgcgcatgagcgactataacgaaatgatgatacgcgtggataaaatgaagcaggacgacataaaccacggtgaagtcagcgtatcagccggatacagcgatgacggaaaatcatttgtccgtagcagtaccaccatctcccgtgaagattctttggacaacaccaccctgcacgaaaccttcatgcccaaaggagacagtgtttacgtgacccacccgaacgattcaacccgcgtggaagtcagtgtcaggaagaacgttcctttgctcaccaaagaggacagtgtgcttttcatcgaccagcacagagaaacggataaagtccgttggatgtctgccgattctgcccgagagcgtctggaagaagcagtcaaggactcagacagctctccccaatccgcattgagtgccaaagagggactggatgtgattttgcgcgaccaaaacagtatgctggaactcgccacctacttccagcgcggactgcattcgggactggacatcatttccgaccccgacgtactgctttatgacagcctgctgacttcattcctgcatgaccgtaacatcaatcttccccataggctgctacatcttcacaaaggcagcaaatgggactctaccattctctatatagatacattggtaaacatcggtacccccggctatgtgcctacctcaaaagccgtggaatataattattctttcgacatcaatacaagtcaaagctaccgtctcatcatggaaccggccggcacgttggtcttgcgacagatgtcgggcattctcaccacatcattcgttattctgatcgtactcgctttctccttctggttcctgatacgcaccatcctgaaacagaagacactggaagagatgaagagcgatttcaccaacaacatcacccacgaactgaaaacccccatcgccgtagcatatgccgccaacgacgctctgctcaacttcaaccaagcggaggaaaaggcccaacgcgacaaatacctgcgtatctgccaggaacagcttcagcgcctcagtggactggttgaacagatactttccatgagtatggaacgccgcaggactttccgcctgcacccggaggaatttgcaatacgtgatattctggaaacgctcatcgaacaacacaagctgaaagcggaaagctccgtccacatatcggtggacatcgaaccggaagatttgagcgtacttgccgaccgtacgcatttcagcaacatcatcagcaacctgatagacaacgccatcaaatattcgcacggagaagccgaagtgaccatccattgccgcaagatggccgtcgaagggcagaatgaacagaccgaaatctctgtcagcgaccacggtatcggtattgctcccgagaagcagaagcacatcttcgacaaattctaccgcgtacccacgggtaatctgcacgatgtgaaaggctatgggctgggattgttctatgtgaagaccatgatagagaagcatggtggcagcgtatcggtaaagagtgagttgggaaaaggaagtacctttacgataaggatatgataacattatttgttagggtactttacattacttgttaaggagctttacattacttgtaacaaaagcgacaattatggaaaagataaccgtacttctggttgaggacgaacagaccctcgccatgattatcaaggacacattggaagggcagaacttcatcatccacaccgcagcagacggtgaagagggattgcgcaagttcttcgacctccgtcccgacgtgctggtggcagacgtgatgatgccccgcatggacggctttgagatggtgcgccgcatccggcagaccgacaaacagaccccggtactgttccttaccgcccgttccgccatcaacgatgtggtggaagggtttgagctgggtgccaacgactacctgaaaaagcctttcggaatgcaggaactcattatccgcataaaggccctggtaggcaaagctttctcctttacagaggaaaagcccaaggaaaccaccgtttttgaaatcggtgactaccgtttcaattccgtcactcaacgacttgcttttgcaggcagcaccccgacttcacctaacgcggatacggaagtggaactctcccaccgcgagtccgagatactgaaacgcctttgcgagaaccgcaaccaggtggtcaacacccagaacgtattgctcgacctctggggagacgacagcttcttcaactcccgcagcctgcatgtgttcatcaccaaactgcggcataaactggccggagacgagcgcatccgtatcgtcaatgtgcggggaataggatataaactaatagtgaactaaactaaaactaaactactatttatgagaaagttattattcattacttttatctgttcctcactctgcgcctatgcacagagcgagattccggaagacacaataaagaaccggcctcccgtaaagaaagagcagattcccttttctccaaaagagaacaagcgtacgggccttgatgaaagccagccccaacaaagtctgcagggcgaacagcaggaagagataaatctccatctccctccctccgactatgtggagcccctgccctggacggacatgaagaagatacactttcagaaaaacatctttgaatgggacttccagcgtttcgccgatttcctgctctcgccggaagtcgtactgacgatgtacggcagccataacacctatcctgcaatgggctccatcatgcaggctggcgcaggagttacttattacagtcccgacggacattgggaattgagcggaggggtatatgccgcccattattccatctcccaaccttcatccattaccggtgcccagtatgccaaaagggatgccccccgaggtactcaatgggacataggctacaatgcctccgtatcctaccgcatcaatccctacatgcgcctgcatgccttcggccagtattcgggctacgggagaagtaactcctttcatggatatatgaacccgatgtatccgcaaagcggttatggcatggtactggaactgaaagtgacggactggctcgacctcaacggagggatggaacgaagatacgaccccaccaaaatgaaatgggtaaattcgcccattttcgcccctaccattcgtataaagaaatagaaataatacaaagatatttccggaaatagagggaaacgagtatctttgttcagtctgcccctatgcggcagacagcaactgaaattgtgaacaaagaacaatgaaacgaatcttcttctgcatcatcattttacttgcaggcatgtcatccgtcagcgcacagagcgagatgcctgccgatacggtacgtactgcagtacgtggcaaagcgtctcccgaaggcatgtctccgtctgaaaaggagcttctgccgggcgtgaagaattacgacggcttcctgctggatatggggctgatgaatctgtccacccccactcttcccaaattcactttggagataccggatgccagcaaagactatagccgcatcttccagttgaacccgaacgtgacttattcacaaggtctttcgaacatattctcactcagcaactcccggtatttcagttcgaatcccttcggactgacgggcttctggggctctaccgacaacctgcaaatgggaagtttcactttgaagaacggcatgcgcatccatacgtacggcgaatatgacaaggacggctggaaagtacccaacccttccgcactgccttgggaaaagaacaatttcaaaggggcgttcgagctgaaatcagccaacggagcctttggcatacgcatcgaggtacagcagggcagacacgtgccctattgatgcccatcacttaacaacagaatcaatgacaagaaagaaaatactggtgataggcgccaacggttttaccggcagacgcatcctggatgatttgtcccacaacgtgttttatcagacaacgggctgttccctgcacgacgacatctgtccccattcgggcaactatcgctttatccgcacggatatatgcaaccgccaggcggtggaaaaacttttccaggaagtacagccggatgttgtaatcaatacctccgccctctccgtccccgattattgcgaaacgcaccatgcagaagcggatgccgtcaacattactgccgtggagcatctggcagaatgctgtgaggcgggaggcagccgttttatccatctttccaccgacttcgttttcggtggtgatacggaccgaccctatacggaggaggatattcccgctcccgttaattattacggctacaccaaactggaaggtgagaaacgtatcgctgccgtttgcagggattatgccatcgtgcgcgtagtggtggtgtacggtgccgccctgcccggacagcatggaaatgtgctccaactggtggcaaacagattaaggaacaatgaggaagtgttcgtcgtatccgaccaatggcgtacgcccaccttcgtgggagacgtgtcgcaaggagtggagaagctgataaatcacccacaaaacggcatctaccacctctgtggcagcgagtgcctgaccattgcagacatcgcttatcgggtagcggacgtattggggctgaatcgctcgctcatccgtcccgtcaccacgaaggagatgaannnnnnnnnnnnnnnnnnnnnnnnnnnnnnnnnnnnnnnnnnnnnnnnnnnnnnnnnnnnnnnnnnnnnnnnnnnnnnnnnnnnnnnnnnnnnnnnnnnnacgtattggggctgaatcgctcgctcatccgtcccgtcaccacgaaggagatgaatgaaaagacgccacgtccccgtttcagcgggctgagtatagaaaaggcaagccgggaactggggtatcagccgcgcacgctggaagaaggaataaagcagatgttcggatggtaaataatgcaggtgcggatggcagcagattcgactacagcaactccggctctgccagtcctttctctttgcgatacacacgtaccatctccagaatcacatctccatatttctccacccctttttttccgaaatacggaatgcgtacaagcatggccttatccgaaggaagcagattgctgatgcctagaattgccttctgctgaatgacggtgtatacgggcagccctaatgcggaagcttctgcattgcgccatgctaccaagcggttgtaaagttccggatgcagcacatccgtgggtacttcaacagccgcagcatcgcgtttccgctcacgcggacgtttctctttatcagcttgcttactgcttccctgcccttctttggcagaagcacttctccctttgcctttacccttctgcgaagccgaatcatcaatggaaagcagtgctttctgcttcaagtatcctgccatatggaaaccattctccagcacataatccagcaaatcagtcttcatgtcaaacacttcctccagctcctccatggcatcccggagcttcttcttcaactctttattatcagaagttaccgtactcgccatcaccgcatccagcggttgcaactgctcttgaaaataagtggcggcagagtgtatgcgcccctgcaaagtcgggtcggctgcatagtcctgcgcagtatcaatcaggcgggtatactggatactgaacttctgggctactttcgtcactttgtcgtgaaaacgttccatttcctccttgcaggctgcgagttgcttgggaaagagcttgtacaagtgttcgtctatcagccgcacataccgccgcaaagcctgctccatgggctggaaatcgaacaagcccgacagcagttccaggaaataggtctgctgcaaggaacggaagcgtttctcgtccggctcgtttctccgtgcctccatcgtgaaggtatctactgcatggtcactgataacggcctttgcagaaagcggggcactgagcaccactccctccaatgtcttgcagcggctcagagccacataggtctgcccatgcgcaaaggaggcactggcatcaatcacggcacgttcaaacgtcagtccctggcttttgtgaatggtaatcgcccacgccagcttcagcggatattgccggaatgttccttcaatatcttctgtaatctccttggtttcctcatcaagcacgtatttggcattcgtccactcttcctcctgaagtaagaaggtagcgtcgcttcccttactgcgcacttcaattacatctgccgacacggctgtcacctctccaatcatgccattgtagtaacggtgctcaccggaggtgtcgttcttcacaaacattacctgggcaccgcgtttcagttccagtacttcatccgtgggataggaatattcgggaaactttccgtcaatcttggcacgaaaggcatacgagcgtcccggaagttgttccagctcatggtcattaatccgttgggcctgataattgtgggtcaccaggcggatgtatccttcttctttatctggtacgaaattgggaatataccggcggttcaaggcttccagcacttgcccgtcacaacggttttcgcgaatgcggttcagtaattcaagaaaagtcccatcgttctgccgatagactttctttagttctatggtgcaatattccgtctgcttcaaggcctggctggagaagaaataaggcgtgtcatagtatttgcgcagcatctgccactcatcgtctttcactacgggagacagctgctgtaagtcgccaatcatcagcagttgcacgccgccaaagggtttgttccggtcgcggaaccgcctcaagacggcatccaccgaatcgagcaagtcggcacggaccatactgatttcatcgatgaccaataaatctatgctgcgtataatgttaattttctctttcccgtaacgaaaacggtaggttgccttgccatctgcgctgaatgagctttcgggcacataaggagcgaaaggtacttggaaaaaggagtggatggtgacaccgcctgcattgatagcggcaattcccgtcggtgcaagtacaatcatccgtttcggactctctgccctcagttttcgcaggaaagttgtcttaccggtacctgccttgccggtcaaaaaaagatgagtgcctgtgttttcaatgaattgccatgcaagcgctatttcgggattattctccat

SEQ ID NO: 381 - DNA, 10239 bp, unidentified
  source 1..10239: mol_type = unassigned DNA
ttattttgcctcttctactccgccgtcttttttcttgttgaatacgaacagcttactgaagacataattgccgatgatgaccagaactgcggagatcacagttgcaatcaacagatttacacccactgcggtcagtacctgcatcactaccatatccaggatcagtgtggatactctggacagtacgaacttcggtgcttcggacagcatcggtgcatgactcttgaatacatatttccgattggtaaaatatgcgaaaatgacacccgccgtccagttgataatacttaatacaatgttctggaaaggtgtgggaaacatcgtgttatcaaataacaggaagtttgccaggaattttgctgcccaggatacgaccgtggtcagtccgcctacgatcaggtatgcgatgatctcttcatacttgacccacagcgcctttattttttctaccatattgttcctcatttctctgtgttaaggttaacaaaactattcagaaccccattcgcaaaatcgcctctgcgtggctttctttttgctcatgtggttacttcgccctataaatagttaactacaaataacaaatatacacaaatatccccttaaatgcaagcattccaaagacatttgtgtatatcttaatcactgtttatgaaattctataccaccgtatggcttataaatttaccacgttacggttctcaccacgcataaatgccttaatgttctcgtagacgccctgtacgcaacgggtacgtgcctccacgctggcccatgccaggtgcggtgtgatgatcagcttgttactgtcttttaactggcttaaaggattagataactccaaaggctccttttccaggacatccagacctgctgcctgaatctctccggccaccagtgcttcatacagatctgcattatttaccacgggaccacgtgccacattgatgagaattgcggtcttcttcatcttgcgaagtgcttctttatcaatgaagttgcgggacagatcactcaacggacaatgcagggacaggaaatcactctcttttaacagggtatccttgtccacctgcggatattcggtacaggtactcttaccagtgatagaatagaaaattactttacaaccgaaagctgttgcgattgctgcggctctcttaccaatattgcccattcctacgataccccaggtcttgccttccagttcataaaaaggctgggcaaaattggaaaaacgatcctgcgcgctgtaggcaccggacttgacatatctgtcataatacggcagtttctggctcaaagccagtgccagcgtaaaggtatgctgggctaccatggcggtggaataatcgaccacatttgccaccttgattcctctggacctgcaatatgccagatcacagttgtcgtatccggtagcaagctcacagatcagcttcacattggggcaatccttcagggattcctctttcatgggagccttgttgcagacaatgacatccgcatcgcccacacgctctgccacttcctgtgcagtaacggtattcgggtaactggtcacttctcccaattcattaaagcagtccaccggcacatccgtgccggcgctgtttctctccagtaaaacaatcttcatctcttgcaatttctcctgtcttttgttttcttttcgtaatagcataataacatagtagaataaacgatttctccgggctatcgccctacttacttattccatcatacagcaacagcgtaatgaaatcaattcattacgctgtccttttcttcttttgaaacatattactgccggagtgatcccgcctctgtggcttacaatctcttcagcagttcttctctctgtgcctcataaccgggcttgccaagcagagcgaacatgttcttcttgtagctctctacaccgggctggttgaaaggatttacacccagcagatagccgctgacaccacatgcgaactcaaagaaatagaacagttcaccaaggtagaactcatttacttcaggaacggtcaccatgaagttaggtacctggccatcggtatgtgccagaatagtaccgttcatagcgctcttattgacgaaatcaacggtcttgcctgccagatagttcagaccatccagatctacaggctcctcgccgatggtaagctcctctctcggagtgtcgatattgatcacggtctcgaacattacacgggaaccgtcctgaatgaactgacccatggaatgcagatcggtggtcagatccacgcttgcggggaacagacccttgttgtccttaccttcgctctcaccgaacagctgcttccaccactcacttacatagtgaacagcgggctcataattcgccaggatctcaacactcttacccttgcgcagtaaaatgttacgcagagccgcatactgtaaagcatcgttctcttcaaaagcattctccagggcacgctttcttccgctggctgcaccttccatcagcttgtcgatatccgcaccgctgacagcgatcggtaacagacctacagcggtcagtacggagaaacgtcctcctacatcatcgggtactacgaaggtctcgtaaccttcctcatcggacagatgctttaagcttcccttcgccttatcggtggtagcataaattctctctgccgcacccttcttgccatatttagcttccagcttctccttgaatacacggaaagcaatagcgggctctgtggtggtaccggacttggagatcatgttgatggagaaatctctgtcgcctactacatccatcaggtgcttcagataggtggagctgatggagttaccacagaagtagatctccggagtcttacgtacactcttatccagtacattgtagaagctgtggcttaagaactcgatagctgctctggctcccagataggaaccgccgataccgatgactaacagtacgtcggaatcgctctggatcttctttgctgctgccttgatgcgggcaaactcttccttgtcgtaatcaacgggaaggtcgatccagcccagaaaatcattgcctgcaccggtcttggacaccagggtctccttcgcatccagggtaagcttcttcatgtaaccgatctcttcttcagaaataaaagagccggccttggaataatcaaatgtaacttgtctgctcataatgctcctccttatatcttgcagatatatcacgcattcttgcgttacttacttaaaaaatccgtttttattttaacaaagttacatctcattttcaagacatatctatagatccggggaatgttttctgaattctttcggacgtctgacattttccgctatactgtaagtaattcctgaagcaatgcctgtaattcttcctccgtgactctggcgggatcctccggtctctgcggcagcactttttctcccggcttttcatgtgcggcattttctacggaaaatacttctctgtccagacgatctcccgtttcttccggctgcgccattctgctgctgatcggcatcagttccaccgtccgcctgccggaagctctctgctgtcgtcctctcgttcttccggccgcactgatctcctcccccaggcttcccggtccgtagagtctttcataatcctgttccgtgacagagatccggcccgacagatgattttccagataatctatgagattcgtcttcagaaccctgcgtttccccttgatatccatcatggccgacagagaaaaatacagatacatccctaaaaaacttactatgtaaaaaggcaggatttcccccagcatccttccgcccatgatccccttgcagatcccgataccggcaaacacaatggaaaacagcatgcactggccggacagatgataccaggcatcaaaggataggtgtccaaacgccagccggttgaggaacttgtccacaaacaccggaatgtttgatactccaccatttaactggtaacaatttgcaaattttactttacactgtttcaacaggcggttattcgtcgttgccatattatctgtctcttttatcatcgtatggtaaaatcctgccagaagcagacgcaccagaatactaagtcccagaaataccagaattccggttgtgatcactttttcttctttgaaaatcgtaaacataacctgcgctcctttctatcgcttccttagagtataacgtattagaggcttgttttgtacgttttttcatcgtcattcttctacgttgccgaacagaaaaagtatttcttttacatttttcgtgaaaagaaaaccttgtacatattgttgtataaatgccgaaaatctgctataatcactccttagaaattcagtttgaaaaggatggttttacatatgatatacaagacaaaaggtacctgttccacttcgatcgatgtagaattaaaggatggtgttattgattccgtaaaattcaccggtggatgcaacggtaatctgcagggaatcagtgctctggtaaaaggaatgaagccggaagaagcaatcagccgtctcaaggggatccgctgcggtttcaagcctacctcctgtcctgaccagctggctcatgccctggaagaaatgatcgcacagtaatctcaccgacaagaaggattttattatgaaaaaaatcgtattgaccggcggcggaactgccggacatgtaacccccaatattgctttattaccggcgttgcaggcggccggctatgaaattgcctatgtgggatcttatgaaggcattgagaaaaagctgattgcggatttcaacattccttacacaggcatttctacgggcaaattccgcagatacctggatccgaagaacttctccgatccgttccgtgtcatgaagggatttgtggaagcgagaaattacctgaaaaattaccagccggatgtagtcttctccaaggggggcttcgtaagcgtcccggtcgtccgcgctgcagcttccttacatattccctgtatcatccacgaatcggatatgacaccgggactggccaataagctgtgcattcccgtggcagaaaaggtatgctgcaatttcccggagactatgaaaaatatccctgccgacaaagctgtcctgaccggttctcccattcgtgcggagctggcacagggcagccggctggccggactgaacatgtgcggctttactgccaataaacctgtcatcatggtcattggcggaagtctgggtgcagctaacgtgaacaaggctgtccgcgatgcattgccgaagcttctggaggatttccaggtagtacatctctgcggtaaggacaaaatcgacaacctgttgttaaatacacccggatataaacagtttgaatatatcaaggcggaactaaaggatattttcgccatggcagacgtggtgatttcccgtgccggagccaatgccatctgtgaacttctggcgctgaaaaagcccaacattctgatccccctgcctgccgccagcagccgcggagaccagctgttgaatgccgcttccttcgaagcgcagggttattccattgtgctgaatgaggatgatattacgacgaatctgctggtggataaggtgcatgagctgtacttcaaccgccagaattatgtagaagccatgagccgcagccaccagatagatgcgatcaacacaatcatgttgctgatcaatgaagccgcaaacaagagtcatacgcaataatgtcatgtattgattgaggggattattttgaaaggattattggaaatctgctgcggcagcttcgaagatgtgaaaaccgcctggcaaaatggtgccgacagggtggagcttaacagtgcactgtatctgggtggtctcacaccttctaccgccaatctgatctgtgcaaaagagcagtgcagcatccctattgtaacaatggtccgcccaagaggaggcggcttctgctattcccaggatgaatacgagaccatgctcttagatgcccgcatacttttagagcacggagctgacggtattgctttcggcttcctgacagaggaccatgccatccataggaaccggacgcaggaaatgatcgacctcatccatagtgccggaaaagaagctgtatttcaccgggcgtttgattgtattgcacaacaggaacgtgcggtggaagcattgatcttacttggcgcggaccggatcctcaccagtggtggtgcacccgatgtatggtcgggcagaacgcaattgcaaaagctgcaaagccagtatggtaaggatatcacatttttagccggaagcggtgtgaatgcacaaaacgtaaaagctctgatggaatatacgagcatagagcaggttcatacatcctgcagaagctggcagccggatgcgaccgcctccctgcaggacgtggacttctcttatgatagaaaccgaaagaatgcatatgaagcagtggatgccggaaaggtgaaggaaatgcgggcagcaatgcctatattgtaatcagcccatgttctaagcaaaaatcgtagactccgtcttcttccaccgatctgcacgtgcaggtggcgtgggctttgatctcatccttcgcattccccatggccacaccggtgccgactgcttccagcatctcgatatcattgacgccatctccaaaagcgatggcttcctcctttgtaaagccaaaatgctgaagtaccgcgcgcacagcgtttcccttcccacattccagaggaatgatatcagccgctctatcccaccacgctgtaatctgtgtatggtgcgtaccatagagaatcctctcatactcttcttcccggcaggcacacatcatctgatagatatcctcacgaacccgttcatcgaattgtttatcgattttcagcatctcattaccgaatctgaaatactgctccagatccggatctgtaccgttggtgatgataaaatgttcgttacttatcgctactgccctatgcatgcctttcagattctgaaggatctgaagcttgtccatccaatcaagcgggcacttaaaaataatctcgtctcctactgttacataagaaccgttaaaggtcagaagagcatcgaaatcaattcccggaaaacgcggtgccgacagatatcctcttccggtcgccatacacagcttcaccccgttctgacgaagagaaattaatgcatgcagcgtccgctcacttaattctttatgccccatcttcagaagtgtcccatcgacatcaaaaaatgcaattttaatcatgcctgccacctccgtccggctcacaggatatattccatctgccgttcttttgtcttcattcccatcttttcataaaagtgctccgccgaagtgttgcctgcccagacgttcagggttacttcatagcagcccagttcttttgcctgctgtttcacatattcaaacaggctttccccgatatgctgcccccgtgtctgcttgtcaacgcaaaggtcatcgataaacaatgatttgaagggcaccatattagtggaaaagggctgctccctgagttggcagaatgcatagcccatgcacagatcgtcctcgtctacggcaacatagatagggtgatcctcctgttccaatagctctgccagctcgcagggggtgtatttcgtagtacccggtataaaaatatccggacggatctctgcatgtatctgtaatacctgccccagcagcgcaagaattcttggaatgtcctttttctctgccttgcgaatcttcatttctatttcgctcctttattcgacaaatcccgttttattacttctcccagtgttataacccttccatgtctagatccacgattaactttccaattttccgttcttttaaaagatagcacatatagataggaagatataccacggatccctcctgttccatatttgctaccgataaaacatatgctttctcaatatgataatcagaaattttcataaagttatccaaggatttgtgtgccttgtaagctttcccggatttcacctcaatgggaaccactttcccatccatttcgaccaaaacatccagttcccctatatttttctttttacagaaataaggttccaaaccattggctgttaattgctgtgccacagcattttcaaagtgagcaccgttatttacttcgctgtttttattgatcagttccagtttggtttccgccggatatgcactggtaagcaaaccggtgtcattggaaaaaagtcggaacacattactgctcttgctcgctttgagaggaataacaggagcttccacgttatacaccggtaacgcaactccggcatctttcagccataaaaagctgttttcatatctgtcaaactttaactctttattcagcattgtaaatacaaattttttattctgtttgttcaattctgccggaatgatatcataaatagatatcaatttcagttttttatcttcactctcatattgagagaaatcctctttatatagcgcaacgatatcccgttgtaccttatccacttcccggatatcttttgtagcaatatagatttttaccgcatccggcatgcctccgacaattagatagataaaaaacagagacaatagcttctgatgtatgaattcatccacgggctgacatgtttcaaatttcgctttcaacatttccaaagttgtttttgacacattatttgctatcatgaattcttcaaaatccatcggatacattctcaaaacagttaaatatccaaccggaaccgacgttattcccttaagctctactcctaataaggatccgctcattacatatttgaagctgccttcttctacaaggaattttatttttgtcactatttccggacatttctgtatctcatcaaaaaagacgaccgtttcctgcggcttacaatcctccggcataatcatttttaatttcaccagaaactcattcgcactcatttttacattgagataatccaccaaatccggctgatctataaaattaacttcaaacttacgatatccgcttttggcaatttcctctcttatcagccaggtctttccaatctgtctggcgcctgttaccaataatgctttatccgatcttttcaaccattcttctatgataatagagtcttttctatacataaattccctcctccctttttaacagtatctcttttgccccgttttttcaatatgatttgtaatattttgccccgttttattcaatttaccattccaaaggtatttttttctttctcgtcgaattcttttttccatgcaaaaataattgttgtatcatccctataaactggaatttacttgcttttcttctctttgctgcgtctcactaatgcgataaatagttcaataactccgccacatagccatatgatacctaacgcaatattttctgcccagaaccaaaacggtgacataacaatccatgtaatcgctaaaataaaaattcccctactgctcatgattttcctcctgaaacttcgattgttgcttacattatacttcgtccatctctctaaggacagtgggatgttgtgatgaaagtgagagagatcgcttacctgtcagacaatttatcttactatattttttgcacgataaatttactgatttaatatctctgcaatcgtgtttggtgcatatttattgagttcatgtcctgcatttggaacgatgtgcaaagtagcttggggtagcaattcttttagccttttagaagcctttagattggcagtatcctttttgccacacaaaattgttactggacaacgaatattatttaattgcaaagtaaaatccaatgaccgcatagagtgagccaattttatggtgctgctttttgatagtcccatactttcaaaaaccttgtttggcatacaacggaagataagattttgaaaatctatcagtaaacttggaactttatattgtgcgccaatcaaaaccagcgaatccactttttcctcatgtcgaatagcaaaatcaatcgcaagaagcgcacctaacgaaagaccgcagatacgaagcggctcttttacttctgaataccgctgttctaaatcacccaaaatctgcgaataggatatttcatcttctgttgaagaaaaaagttctgggcaatcgacatcagaaattgatagttgttggactacttctttccagtcctgtgcagtttgtcccaacccatgtaaaaaaacagttttcat

SEQ ID NO: 382 - DNA, 13277 bp, unidentified
  source 1..13277: mol_type = unassigned DNA
ttacttcttatcgttttcgcgaatctccacccggcggatcttaccgctgattgtcttaggaagctcttctacaaactcgatgacacgtggatatttataaggagcagtcactttctttacatgattctgcaattccttaatcagttcttctccggcacgtgctttatagtctttggatagaacaatcgtagcttttaccacctgaccacgaatctcgtcgggtactccggtaatggcacattccacaacagccggatgagtcattaatgcactttccacttcgaatggaccgatgcggtaaccggagctcttgataacgtcgtctgcacgaccgacgaaccaaaggtaaccgtcttcgtctttccaggcaacgtcaccggtataataaataccatcgtgccaagcttcgtgagtgcgttccgcatcccggtaatattctttgaaaagtccgagaggtttacctttgctggtacggatcacaatttgtccttgctccccggcttcaacggaacggccttcatggtcaatcaaatctacgtcatattgaggattcggaagtcccatgcttcccggtttcggttccatccaaggcatggtggcaatggtaagggttgtttctgtttgtccgaaaccttccatcagtttgatacctgtcagtttcttgaatgtttcaaatacggcagggtttaatgcttctccagcaatggtgcagtatttgagtgaagataaatcgaattttgtcaggtcttcgtgaatcaggaaccggaagatggtaggaggtgcacagagagaagtgacatgatattcctggattttttccagaatagctgccggggtaaatttctcatgatcgtaaacgaagatgttcgctccggcaatccattgtccgtaaagtttgccccatactgcttttccccagccggtatcggcaatggtgaggtgaagactgttctcgttcaggttgtgccaaaaactaccggtaacgatatgacctaacggataagtaaagtcatgtgccaccatcttaggttcgccggtagtgccggaagtaaaatacatcagagagatgtcgtcgttagtgttcgcatggcgtggacgtacaaacggagcggcattttcgatgccctgatggaaatcttcgaaaccttccggtatttccggtccgacactgaccaacttttctacagtgggacactcggggagagcatctttgatatgttgcaggatgattccttcaccggcagctacgatcattttgatatcggcagcgttgcagcgatagataatatcttttttggtcagcaagtgggtggccggaatgacggttgctcccagtttgtgaagggcgatggtgctataccagaactcataacggcgtttcagaatcagcatcaccatgtccccacgaccgatacccagactttggaagtaagatgcggtcatatctgtgtaacgcttcatttcggcaaatgaaaattggcggctttcacctttgtcatttgtccaaagtaaagccttcttgtcgggttgttcggctgcccaggcatctactacgtcataaccgaagttgaagttctccgggacgtttatttttaaattcttgttgaagtcctcttgtgagctgaaagaggtctgtgataaaaatctttctaccatgatattgttacataattactgccagaaaacgtaccgttttgccatcgagcgctttcatgccatgtggaagtttagagttaaaataaatactgtctccttgattgaggatgatttctttgccttcgatgttgataagcatacgtccttcgatgacaaggttgaattcctgtccattatgtttgttataatggatcggctcgtcgattgctttcggttcaacggtaacgatgaacggatcggcggtacggttcatgaatcctgaagccagtgactggtatttataagctttggtacgttcgatgctgatacctttgccggcacgagtcacaaagtagctgctcattttaggttcttcgccaaacatcagagcgtcgagggctacattatacgtacgggctattttttgtaacatgctgacagagatgtcgtaatctccagtttccgcaagccggtattcttcagcagaaatgtcactatcgcgggcgatatcctctgcggtcagttccaatacatcacgtaatccgcggaggcgttccgctatctgtttaatttgttcattcatacaaatggttagtattttatgattaataattctatggtgttatttggaagctttcatggctttgataatagcagaggtgaagccgttgtgttctaattcattgatacccttgatggtgattccgcccggagtggttactttgtcgatttctacgctggggtgggtgtcgttgttctgaatcagtgcggccgctccttttaaggattgggctatcatctgcatggcatctttagggcggagtcccatttcgattccggcttgcatggctgcctgaatgtatttcagtacgtaagcgataccgcaggatgccaatgcggtggctgccgctattttatcttcggggataagcatcactgttcccatctcgctaaataaccggaggatgaagttgtcttgttcatcattcgtgttacgcgcggcaacaagcgtcatgctttccagttcgctgatagcggtgttcggaatcagacggaacatgggcatttccggtgctacgacataatgagccagttcttcaaaactgatgccggcagctacggagatgagtatctgtttgctttttaatttcaactcgcgcatcaccgattccataaaccacggtttgacggcaaggatgacaatgtctgctcctgtggctgcttccagattattgttggtggtggagatacacggaaattcttttttcagtttctctagttttccggcactgggattggatacaatgatatccgaatcgtctatcagacttccttttgccaggccacgggctattgaaccgcccatgtttcctgcaccgataatggctattttcatatacgcttgtttttaatgagttgttacagacaaaggtaacagttaattacgaaaaaacaaaaagcagccagaataagaaataaatttctaataaaggctgcttttattgttggctgtttattaatcaaatgagcggttagagtacttttttgaaccgggcgaggaactctttcgcttcctccatgctgagacagagaggaggtaacaggcgaagtacattcgtgccgcttgctccggtaaatacatgctcgtcatagatgagacggctgcgtagttccttaatcggttcttcaaattcgaggccgatcattagtccgcgtccgcgcacttctttgatttgcgggaattttttcagctcttccagtaagtaatcacctattgccttagcattttctaccagattttcctgttcaatgacatccatcacagcgagagctgccgaacatgccaggtgatttcctccaaaagtagttcccaactggccatataccggtttaaacatcgggctgattaagacacctgccatcggaaagccgttaccgattcctttggctacagtgatgatatccggcttaatgtcattatattgatgagcgaagaatttaccgctacgtccgtatccgctctgaatttcatcgagaatcaggatcgttcctgtttcgctgcaagctttgcggagttcctgcataaattcggtggttggtatcttgataccgcctacaccttgtattccttcaatgataacagcgcatgtgtctcctttagacaattcctgtttcatcgcttccacatcgttgagtgggagataggtgacatgaccgttattgttgataggagcgataatagaaggattgtgagtcgcttctactgcaagagacgtccgtccgtggaatgctttattgaaagatacaatcttagtacgtccgttgtggaaagaagcaagtttcagagcattctcgtttgcttcggcaccactgttaatcagaaacaggctgtagtcttcgtaaccggaaatctttcctagtcgttcggctacctcttgttggagcttattgataacggagtttgagtagaaaccaagtttagccacctgattactgatcatcgctacatagtggggatgtgcatgtccgatggagataacggcatggcctccgtagaggtccagatattccgttccgtttttatcccatactttacagccatcacctttgacaatgttgatattgtataaaggatatacgtcgaataaattcataattcttctgtttttaaaaagctgaaggcttcaaacgtagtcctacggtttcttccagattgaacatcaggttcatattatgaacggcttgtccactggcgcctttcagcaaattgtcgatacaagagataatcaatagcttatcaccatgtttttccagatgtatcaggcacttattagtattaacgacttgtttcaagtcaatattcttgtctacgatgtgtacaaaggagtcttttgcataatattcctcatacatacgaacgatttcttccagcgctactttggtcttgactaccagcgtcgcgaagataccacgagcgaaatctccacggtacggaataaagtcgatgtccgaatcgaagctgttttgcaactgtttcagcgattgcttgatttccggaacgtgttggtggtcgaatgctttgtacacactcatattgttgtttctccaactgaaatgactggtagcacccggtttcactccggctcccgtacttcctgtaatagcatttaccattacatcatctgtcagcatcagattcttggcaagcggaagcaaaccaagctggatgcaggttgcaaaacagccggggttggctacgtgcttcgccgtacaagtggcgcgacggttcagttctggcagaccgtagataaagtcgtggtcgtcacttttgatacggtagtccatggagaggtcgataatcttcaggttttccggtatgttgtgactttccatgaatttctttgtatctccgtgggcggtacagaagaaaagaacgtcgatttcgtccagaggtaactggtcggtgaacgttaaatccgtttctccatacaagccttcgtgtacgtcggtaattctgtttccggcattactgctgctgttgataaatacgatttcagtttccggatggttgagcagcagacggattaactcgcctgctgtatatcctgcgccaccaatgattcctgctttaatcatatctcttcgtctttgtggttattatagtaaacacgtagcggagtagaagttactttgataaagccttttgcgtcttcagctgtccagcctttctgcatttcaccgtattctccgaatttagtcttcaccagatcatcttccgattctacacctaccgtagagaaggaaagagggcgaagctcgaggatagctgtaccgtttacgttgcgctggctttcctgcaacatggcttcgatgtcacgcatcaccggctccaggtattgactttcgtggaggaacataccgtaccagttagctacttgatccttccaatattgttgccatttgcttaatgtatatttctcaaggaaacggtgagcgccgataatcaacatcggggcagctgcttcgaatcctacacggcctttgataccgataattgtatcgcctacgtgcatatcacggccgataccgtatgctgcgccaatctcttccactttctggatggctttgatcgggtcgtcaaacttctcgtcgttgacagctttcagttcccctttttcgaaagtcaggcggagctgttcgctgccttctttttcaacgtgcttgaggtaagctgtttccgggagtccttgcgcggagtcgaggatttcgccaccacagatagaagtaccccataagcctacgttataagagtattttagtttggtgaagtctgcactgaaaccatgcttgttcagatagtcgatttcttcctgacggctcaatgccatatcacgggttaatgtgatgatttccacattgggagccagtacgaggaaagtcatatcgaaacgaatctggtcgttacctgcgccggtagaaccatgtgcaatggcgtctgcaccaatttcgttagcatagcgtgcgatagccaatgcctggaaaatacgttcggaactaaccgaaataggataagtaccgttacgcagcacatttccgaaaaccatgtatttcaggctcttttcgtagtattcctgggtaacgtctattgttacatatttcgtagctcccagtttataagcattttcttcgtttgttttcagttgttcttcactgaaaccacccgtattggcacaagctgcatatacttcgtaacctttttctttggcgaggtacatgacggtgaacgatgtgtccagtccgccgctgaatgccaccactacttttttcttcttttcttccatagtgctgtatcttttaaatgttatttctttcttgttcttttttgatgttccgcggctctgtcggatcgtatagcatggctgtacagatgcagaacttgcggtttttcgctaccaggatatcatggttgatacatccttcgcatcctttccagaaagcttcgtcgtctgtcagttcgttgaaggtgacaggcacataacccagttcggtgttcatcttcatgacagctgctccggaggtcagactgaatatttttgctttcggccatcggagacgtgccagttggaaagaagcctgtttgatgcgttttgccagtcctaacccacggaaatcgggatgaacgatcagaccggaagtagccacatattgcttgtttccccatgattcgatgtaggtgaatccggcaaaagtatcgccacaaagagcaataatcgccttaccttctttcatctttgtcgctacgtattcgtgtgtgcgttccgcaattcctgttcctcgtacggcggcagcatttctgatagtttccaaaatagtgtcaacgtaaacctcatgtgaggcgtcggctaccataacatctatttgttgagtgtccatttctttattatataataataggtataattattcgatattgggaatgatgagtgacaaaagctgacgtattttactggttgcaactccttcacgcaacaccaacatgatcgtatcgtcaccggcaatggttcccagaatttcactgaattcattgttgtcgatgtcataagccatgctgctggcataaccgggacgggtgcggataacggcgatgttaccggaaaactgcaaagagataaatccgttgttgcgtaacatttcaccggcactctggtcggtagaacgtttatacataatgttgttcggcagtacatatacgtactttccattcatactggcagccttggctactttcaattgtttcaagtcgcgggaaagggtggcctgtgtcagttcgaagccttcgcggttcagctcttgcagcagttcttcctgcgaaccgacctccttgcttgagataatcattttgatggcgtctaaccgatttgctttcttcttcattgtataattattctaagaatggcgcaaaagtatgcattattttggaaaaaagatgcataaaaccaaagtttttttgcataaaagtgaaaatactttagaaagggatagtgatataatcaggatatatgtgggtatatgtaacaaagttgtttctttattgcttcattttgtgctgactttttttattgtctattaaaaaagatgcaattgtttgtttagggatttttaaatatataaatttgtaaagtgaataaggagacaaatcgtatgatagatgaagatattgagctttattctctttttagaaaaggagatagaaaggcttttgatactttatttttgaagtattattccatactatgtgccttcgggaagtactatattcctatagaagatgctgaagaagttgttttggatatcatgacatggctatgggaaaacagagaattccagatcatagaaacttctttgcgaagttatttgtttatggcggtcagaaacagatgcttggatttaataagtaagaatcagacaaaaagacgttgttatgagcatatgtttgctaaagaaatgcagacaagttttgaagatcctgatttttatgtagtggaggaattgatggcgaaaatagaaaaggccgtgatgcgattgccggactcctatcgtataacttttgagatgagccgttatcaagataaaacatataaagagattgcgaaagaattaaacgtttccataaaattagtggagtatcgtatccagcaagcattgagacttttacgtgtagaactaaaagactatttaccgttgattacaatcatattcccttattttctctaaggatagccgattcgtttttgagtcttaaaataaaaatgcagcttttaattaaaaaagttgcatttttgtttaggggctaattgaagtattccgtcttcttaataaaatgaacataaaagatgatggaattacatgaaaatatagatgaggctcttttactcctttatttttccggtacactaggagagaaagaaaaagaagaggtagaaaattggatttccctctctgaagagaacagaaaaatagctaaacagatttgttacatacaccacgtaacagatataatagataccgtgaagcagatagatcctaaacaggcattggtgaagctggataagagattgtcaaaaaggaagaaaataaactggtgggaatgggggataagagcagcagctgtgttatttattcctttattcttatctttcttctattttgtatttaatcaagataaaaattatgatcgttatgtcgaaattcggtctaatccggggatgatgacaaaagtggagttaccggatggtacttgggtatggctgaattctgcttcttatctaaaatatccagtgtcttttgaaggagaatatcgaaaggttgaattgctcggagaagcttatttttcagtacaaaaggataatggacggaaattcttagtcgatgtaggaaaggggattgaattagaggttttaggtactgaatttaacgtggatgcttatccggatgataagtttgtagttgctactttggtgacaggtagagtaaaattccattgtcagcagaaaggcagggaggttacttatagtatgcaacccggacagaaggtgatttataatttattggatgagaaacttttgtgtacaactacttttgttgaatctgatattgcttggaaaagtggaaggatcatttatcgagatactcctcttgaagatgctttaagaactttgagcaagcgttttgacgtagagttccgtattgttaatccattattaaagaaatattgctttacaggtacttttattaatcaacgtctggataagatcttggaacacttcaaaatagcttcaggggtgagatacagatatcttgaatcggcattggacaacggtgttgtgaaagagaaaacaataatagaaatttattaaacaaaaaagaactatgaaaacactccctccttaaacaaaaaatatgggaaaaatatagcactattcttcccatataaaaaatcatttagccttacttgtttgccgacaagtgtagttaactttatttttaatttaaatcacaacaaatttatgcaaaaacattgtagtatccaaattcttgggattaaaaggctactgaaagcaactttaaaaggaattccattgcctatgagattattaattattatgctatgtgtttcgataggatgcattcgtgcgacaaatacttatgcgcaaaatgcgatccttgacttgaaagtcaataatcaaacgattgaaaccgtcttgaaaataatagaatcgcggactgactttgtattcttctttaacagtcagcaggttaatgtacataaacgtgtctctattaatgtcaataaacagaatatttttaaaattctagatgaggtttttaagggaagtgacgttgtttattcagtgcttgataaaagcataattttgtctagtaaaagatttgcgcctgatggaaatttgaagaagattacaggtaaggtcgttgatacgaacggtgaaccgttgattggtgttacaattgctctgaaaggaagcaatagaggaacggtgagtgatgtaaacggaaatttttctttaaacggagaagaaggaaagcttaatgtgttgaatatctcatatattggttataaagaccaacaggtaaaagttgaggatggtaaaactttgattattacattggaagaggataccaaggttttggaagaagtagttgttgtgggatatggtacacagaaaaaaatcaatttgacgggtgctgttgctgtggttgacgataaacaagtaatcggacgttcggccgataatttgtctaaactacttcaaggagctgttcctaatatgaatgttactgtttctaacggtcgtccgggacagggtggtagcataaatattcgtggtatcaattctatcagtagtagtgccacgcctttgatattagttgatggtgtagaaggtactatcgatgctgtgaatcccaatgatgtggagtctattagtgtattgaaagatgcttcttcggctgctgtatatggggctcgtgcagcttatggagtaattttggttacaacaaaatctggtaatgatggtaaaacacgtgtttcttataacggacgttatagctttggctcacctacagtttccagagattttgagactcgcggttattattcggcggctatcaatgatatgttttattctacctatcaaggttctaactatacgaattataatgatgaagattattatgaaatgtggatccggcgtaatgataaaacggaaaatccggaacgaccgtgggtggttatcaaagatggtgaatataaatattatggtaactttgattggtataactacttcatggatgagtctcgtcctacatgggaacacaatattagtgtcagtggtggcaataagaaagtgcactatttcctttccggtgcttattatgatcagaaaggagttattcggaaaaatatggatagtttcactaaatacaatttccgttccaaggtaagtattgagattgctccatggttgaagataagtaataatacgtcatacaaaaaggattcttatccatttccggggccaggtgctattaacaatctttttgatgcgataagtaagcatgccttagcttctattgttccaatcaatccggatggtacatatatggggaatgcaacagttattacaggaggatatcgccctgctaatgatcttagtgcaattcttgaatacggtaaacacaagaatgaggatactaattacttttttaataccacctttgaggcggtaatgacacctgttaagaatgtaacggtgacggctaattattcgtttgctcaacatgaatatacggcaatgaatcgtagtgctaattatccatattcacgtgtacccggagaagttctttggaaaacagatggttatggccttaatactctttatgaacgttctaatcatgattggtttcattcatacaatatttatggaaattatacaaatacatttgccgatgtgcaccatgtaagtgcaactgccggtgtcaattatgaaactaaattttttaaagacatcaaaatacaacgtaatgatttattgtccgaagatttaactgattttaatttagctaatggtgatgaaatgagtattgcgggtggtaaaaatagatatgctcttttcggtcttttttatcgtttgaattatgactataaaaatagatatttatttgaatttagcggacgctatgatggtagttcacggtttgcccggggacatcgctatggcttttttccttcagtttctgccgggtggagaattaatgaagaaaagttctttgcaccattacgtaaacaaattagtaatttgaaattacgcttttctttgggagcattaggaaaccaacaagtcggatattatgactatttgcagactatatcttctggtggtacaatttcttatgcttttggtgataaaaataaagcgtcaggtgctagtatctctgctccgaatgcttctgatttcacttgggaaacggttgttacaaaaaatatcggtttggatctcggactattgaataatcgtttgaatatgacggctgatatatatgtacgtgatacgaaagatatgttgatggcttccaaggatcttccgaatgtatatggtgcttcttctccaaaaacaaatgctgctaacttacgtacgaaaggttgggaagcatcgattagttggaatgattcttttaatctaaagggaaaagcgttccattattctgtcgtactaggcttggctgataatacgactaaagtgacaaagtataacaatgataacaaaacattgggcactccatatgaaggacaacaactgggagagatttggggatatgttgttgatggtctcttcaaaactgatgaagaagctgaaaactatccggtaaatcagagttacgtaaataatatattgaatatttctgtaaaatctcaaggtctccatgcgggggatgtgaaatatgtggacttggatggcgataatattatttctcctactttatcggcaaacgatgtgaaggatcagaaagtgattggaaattctttaccaagatatacatattctgtcagattagctgcagattggaatggaattgatttttctgctttgttgcaaggcgtcggtcgccaacattggtatcccaatggtgaaactagtctgttctggggtccctatgcccgtccttattgtacttttattccgaaggatttcttgacagatgtttggtcagaagataatccggatgcttatttcccacgtccgagaggctatgtggcattggatgttaatccacgtgagttgtctaaacctaatactcgctatttgcaaaatgtggcttattgccgtcttaaaaatgtaacagtcggttactctttgccacgtacttggctaaaggctttgcatatggaacgtgtcagggtttattttagtggagagaatctttttacattcagccctttacatagtaattatattgatccggaacatgctggggcttctacgagctggaaaagtggtcatacgaacgtgacttcttatccaatgagtaagacctattcatttggaattgatgtgactttttaa

SEQ ID NO: 383 - DNA, 13319 bp, unidentified
  source 1..13319: mol_type = unassigned DNA
atgaaccaacctcttatcagactgactgagattgccgctgcatacgaccagaaaaaagtgctggaacatatcaacctggaaattgcagaaaaggattttcttggagtaatcggcccgaacggaggaggaaaaaccaccttgatgaaaattattttaggcttactaaagccttcggctggaacaattcagttttttcatcagggaaaggaggtgaatgagattacaatggggtatttgccccaatacaacactatagataagaaatttcccatctcggtgtacgaagtggtcctttctggattaaataaacaaaaatcattgttccgctcattctccaaggcacagcatgacaaagtacgtgaaaccattgcccgcatgggactggaaggcttggaacaaagagctatcggacaattaagtggcggacagctgcaaagggctttattggggcgcgcactcgtctccaatccagaagtcgtcattctggatgaacccaacacatacattgacaagcgttttgaggctcgtctttatgctctgttggaagaaatcaacaaggaatgcgccatcgtgctagtgagtcacgatatcggcaccatcctgcaaaacgtaaaaagcattgcctgtgtaaacggcacgctggattaccatccggatacggaagtttccgccgaatggctggaggcacattttgaatgtcctatcgaactgttaggacacggcaacctgcctcatcgaatattaaaatgccatcatcacgaagagtagaaggctgcttttaacgccttttgcaacattatcatttacttttgggacttgattagcaaatgtttgctatctttgccgcattgaattttaacgagaaactaaaaataattcatgaaacagtacaacaagattaacaatctggtaggctggcttacttttgcggtggctgcatttacttactgcatgaccattgaaccgacggccagcttctgggactgtccggaattcattactaccggatacaaactggaggtaggacatcctcctggcgcacctttcttcatgctgacagccaacctgttcagccaatttgccagcgatgcgactcaagtggctaaaatggtgaacataatgagtgccctgatgagtgcggcatgtatcctgttcctattctggagtattacccacctgaccaagaaactgatttgccccgatgacaaagagatgactacgggcaagctgattaccatcatgggagctggtctggtaggggcactggcttatacatggagtgatacattctggttcagtgcggtagaaggtgaagtatatgcgtattccagccttttcactgccgttgttttctggctgattctgaagtgggaaaaccgggctaacgagcctcacagcgaccgttggctgattctgattgcttacctcacaggattgtctatcggtgtacacttgctgaacctactttgtattccggccatcgtactggtatattattacaagaaaaaccccaacgccaacctgaaaggcagtctgatagccttggctggttccatgattctggtagctgtcgtattgtatggcatcgtaccgggtatcgtgaaggtaggcggatggtttgagctgttgtttgtcaacgacttcggcctgccatttaatacaggtgtcatcatttacatgattattctggccgcaagtatcatctggggtgtgtacgaaagctacaccgtgaaaagccgcaagcggatgaatatctctttcctgaccactgtcggtttgctgggtattccgttctacggacatggctggagcagtgtcttcatcggtatcatcgtactggctattttagcaatttacctctttgccaatatcggtgaaaaataccgtgtcagcgcacgcacgctgaataccagtctgctggccatgatgatgattgtggtaggttattcttcgtatgcagtcattgtcatccgttcttcggccaatacgccaatggaccagaactctccggaagacatctttactttgggagaatacttaggccgtgaacaatacggtacccgcccgttattctacggacaaacttatgcttctaaaccggcattgaaacctactgaaggaggatgcgtgtacgacgtggaagaaggggctccggtataccagcggaaagaaaaggaacgtccggatgaaaaagacagctacgaaattgtacgtcataaaacagagtataaatacgctcaaaacatgttgttcccacgtatgtacagcgatgcacatgcacaagcctacgaagactggctgggaggagtagaaggacgtcaggttccctacgaccagtgtggagagatgattatggtgaagattccgacacaatgggataacatcaagttcttcttcatctaccagttgaactacatgtactggcgttatttcatgtggaactttgccggacgtcagaatgacattcagggacagggagaaatcgaacatggaaactggattaccggtatttcatttattgataacatgttgataggcgaccagacgctgctcccaagtgaactgaaaaataacaagggacacaacgtattctactgtttaccgttgattttaggacttatcggtctcttctggcaggcttataagggagaaaagggtatccagcagttctggattgtcttcttcctcttcttcatgaccggtctggccatcgtgctttacctgaaccaaacaccgcagcagcctcgtgaacgagactatgcatacgccggttcgttctatgcatttgccatctggattggactgggagtggcagccatagccgaatacctgagcaagaaaatcaatgaaaagcctgcggctatcttagccagtgtggtctgcttgctggtgcccgtgcaaatggtaagccagacatgggacgaccacgaccgcagcgaccgctatacatgccgcgatttcggacagaactacctgaactctgtaccagaaaagggaaatccgattctttttaccaacggtgataacgatacattccccttgtggtataatcaggaaacagaaggtgtacgcacggatgtacgtgtctgcaacctgagttacctgcagactgactggtacatcgaccagatgcgccgtccggcatacgactctccttcagtacctatcaactgggatcgtattgactatgtatccggtcacaacgaagcggtgtacgtacgtcctgatgccatgccgaccattcttgaattctacaaaaagaacccggaagaggcagccaaggagtttggagataatccatacgaactgaaaaacatcctggaacactgggtacgctcaccgaaagaagacttacagatgattccgaccgacagtatcgtcataaaactggataaggaagccatcaaacgttcgggtatgctgacacctgattctattccggaatacatgcatatctcgctgaaaggaaaacgagtgctgtataagagcgaactgatgatgttggaaatgttggctaacaccaactgggaacgtccgatgtacatggctatcactgtgggttctgacaatcacctgaacctgaccaataacttcttgcaggaaggtctggcttaccgcatcactccgtttgacaatgcgaaattaggcagacgactcgacagcgaaaagatgtacgacaacctgatgaacaagttcaagttcggcggcattgacaaccctgacatttacctggatgaaacggtattacgcatgtgcgatactcatcgccgcatgttcgtacagctgaccagccagttgattaaggaaggcaagaaggataaggcactgaaagcattggattattgcgaaaaagtgattccttcgaccactgttccgcacgactacctgatgagcagttccaaggaaatggcagaaaactacctggcattaggacagccgcagaaagctgaaaagattctcaatgaactggccaacaacgctgtagaatatgctacctggtacttgagtctggacgatgcccgtttcgcaagttcatacgaaaactgcatgcgttatttctatattctggatgatgtatgcaagaccatggcgcaaatgaaagacagcaagacaggtgaagaaaacaaatctgctttgcattatgctcaaaagttcgaccagctgtacaaactgctggaaaaacgagtaggtaacagcgctcctgctcaataatacagaaattgaatgattagatacagaatgtcattctgaacaccacagagaatatcaccacctttgcaggttcagaatgacattctttcttttaattctttctgcaaaacaaacctcttaaaacgacgaaaaacatgttcatagaacaacctccacaatttatccgtctgctttatccaaaagctctctggcgcatggataaaaacgaaagagctgtctacctcacttttgatgacggccccatacctgagattactccctgggtacttgatttactggacaaatatggaattaaagctaccttcttcatggtgggtgataatgtaaggaagcatcccaaagaattccaaatggtagtggaacgcggacatcgtatcggaaaccatacttttaaccatatacgaggattcgaatttttaagccagaactatctggccaataccgataaagccaacgcttatttgcagaccaacttatttcgtcctcctcacgggcacatgcggtggatgcaataccatgtgttgaaaaagaaataccagattgtgatgtgggatttggttacgcgagactacagcaagcggctcaatggtccgcaagtatttgagaaggtaaagaaatatgcccggaacggttctatcatcacgttccatgactccctgaaatcggaagaaaaccttaaatatgcccttccccgctccattgagtggctgcttgcagaaggctacgagtttaaggtatttccttaatatcagccgttgaaaaaaagactctccttcgtcatgccagtacttccttgaaagtactggagtacactgccgaaagtactacagtactgccctgaaagtactgcagtattttcagtatagtactgacaaaataaaaaccgacagaacccaatctccccaaacggtcattcggcactgtcggttttccttatatctttatatctttcctgttacagacttttatttctgaacggtcaccaccagcggattacgtactttctcagcataatccttcaagtaattggtccagtcttctgctttttcgaaaccatatttgctccagcctgaaccccagtaatatacaaaatcattacccggttcatacgtagaaatacccaatacatgtcccagtgcatcgcctgccggtttttcaaacaactgtgtagtagtctgtaccgaagcagggaataccgctcctacatatacaataccgttgccagcttcagcattcgtcgtggggtctgcataagagatatatcctttcgctgcatcatacgcatatccttcaggatttgccgcatgaagcaccaaccctgctgctaccggagtagcctgcgtcagatattcgtatgaaaccgtagtcttgttcagctgagagcctttatcaagctgtatgatacgagtttctaccacatttgaatcgttctttaccaccaaaggattgaataccagtttcacggtaaaacgcaaaggtccgttatccaaaatctcataatctttgtagcaataaggatatacaattgcagagtccggcatcagagctgcagtaccgcctcccaaagtaggaccaaccgcatagcagtccattccgttaccatggtctatatgataagaaatagcacgcgacaaactgtctgcttcctccttctttccggcttctctcaacgccttgatttctgcacgtgaagcagaatccagctccattgcataacgatcttctacaacgagctcttctacgctctttgtaaagacatcatatccataagctttttctccgctcttctgcaaagccgggccgtatgcacgataagccgcacggtcattctcccaggcaatgtcatccagacgttccggatagcaacggccatacactaccgcattaaccagtgaaggtgttccctgctgcactgtatagtttacagaagcttttgaagcgatagacacgggaaatatcactttctcatcgtatgtcagctgataaggaatctcctgggctttctcatcatagattacaaactgtgcagtgtcagaaagattcagctgcgtataaatatcatttacgggaatttctaccatttcccctgtacgttctatagccaaggggttggcaattgtcacagtgacagattctgatttactacatccggtccacaatacagtggcacaagcagcggcagcaaacaaagtctttctcataatattatctttatctattaccaaaaagtcattctgggaaagtacaaaccctcccagaatgacattctatctacaaaataaatgtaatttatttaggctgtttaccgatataagccaaaataccaccgtccacatacaatacgtgaccgtttacaaagttagatgcgtcagaagccaggaatacagcaggacccatcaaatcttccggagttccccaacgagcagccggagtcttagccacgataaatgcatcgaacggatgacgagaaccgtcagcctgacgttcacgcaaaggagcagtctgaggagtagcgatgtaacccgggccgataccattacactggatattgaattcaccatattcagaagcaatgttacgagtcaacattttcaaaccaccttttgctgcagcgtatgcagaaactgtttcacgacccagctcactcatcatagaacagatgttgataatctttccgtgacctttcttaatcatgctaggaataacagcttttgaaacgataaacggtgcgttcaaatccacgtcaataacctgacggaactgatcagctgacatctcacacatcggaatacgtttgatgatacctgcattgtttaccagaatatcgattacacctacttctttttctacctgtgcaaccattgcatttacggcatcttcgttagttacgtcgcatacataaccgtgtgcattgataccttcttctttgtatgcagccaaacctttgtcaaccagttcctgtttaatgtcgttaaacacgatagttgcacccgctttagcaaaagctgtagcaatagcaaaaccgataccgtaagaagcacctgttacaagggctaccttaccttcaagtgaaaagtttaccataataattataaattttaaaatctcccgttgttccccgaaaaacagagaacaactttatattattgtttaaagttctttctctctacgcagacaaaaatacaaaagttagccgaaatccaggtacaatatttgttcacaaaacctataaaattgtgctacttcttgtgtatttattgatttttcctactaaaaatacgtttcagcagactttttcactcaatttagctgtatcaataactcacaaattttatcctgcagtttacgggcctgacgagctttcaatacattttgattaatgataacaaaagaaattttgtgcccgttcacggatgtcaaataaccagccaatgaactgattcccgtaacagttccggtctttgctcttacattacggaaggcttttcccgtacgcattcttccctgaagcgtaccatcaactcctgctacgggcaggcagtcatagaaagtctggaacacggacggatgacgataagcatagttcagataagccaatatcagacgaggagacacataattatacaacgagactccactaccatctacaattcgatactccttggggtcatgcccaatggcattgcgcatgaatctccctattacaacctgacagtccccaaaagagatgtgtgaagtatgtttcccgttcatttgccctaactgacgaaacaaggcctccgcagaaagattgtcactttctttcaaggcacgcttcaacacttcctccaccggacggcggcaagtataaatccattgtgtactatcaggagcggttaaaaagaaaatactgtctttcgatacggacagcccttctttgttaagcttataacaaaacgtatccataaagaatcgcttggaatcatacagattcagcgtacgcttacgaacagaagaaacacatccggacacatctatcgtattgccgtttgtgagccagtcacgcgttattttcagttttccagcttcggggtgcagacttatagaacgattgttcaactgataataatctgattccggagtaatttccacggttccggccttccctttggcagcaggagataccttaatatccacacatcccctgttcagcataagcggtgaaagataaggttggaaagcttctggagtatcatcccatgaccagccttctccccagtatatggaatccatcaaagaaacatcacccacaagtttcccggaaatagcttgtatgcctgcctctttcacggctctgaccagaaagtccatatccaactccataaactccgggtcaaaacctccttttacgtacaggtttcctttcaagattcctttttccaccacaccgtcgtacgaaagtgtagtctgaaactggaaatcctttcctaatacatccaaagcagttaccgcagtaaccactttttcaatagaagccggccggtacaacttgtctgcctgatagctataaagctccttgcctgcagtcaaatcatgaaccacaatacctacttccgaggttttcaacaaggggtcggaagatattaacttgtttaactcgtttgttaataacgtctgggcatgaagaaaaccggcccaaagaaataaaaaaaataatactccgcttattcgtttcattcaacacttcaatttataactcgcgaaagatttcgcctaccgtaggatgtggaaagacatattttttccagtctgaaagtttacgtctgtcttctatcatcattcctgcctgaataattaattcagaagccggatttcccagcaaatgtactcctaaaatttcttcatcttctcccaccagtaccttgcagactccattcactccttcattttcagccacaaaacggcccgaataggctgctggcaagcttactacacgataggcacggccttcgcgtgtaagcgcttcttccgtacaaccgacagaagcaatttccggattggtataaacaactcccggtatggcacgatagctcatggcgtctgtttttcctaaaatatgatgaactgccacctctgcttcacgcacagccgtatgagccaacaaagatactccattcaaatcaccacacacatatactcccggcacggaagattgcagatgttcatctaccttcaccgttccacgtgccgtaagttccagattcaggttttccaatccgaatccgttcatcaccggccggcgtcctacgctcatcaacagtttttcggcacaaactgtgcttttttcttctccgcaggtatattctatttctattccgtcttcattctgtgtaactccggttactttcgtattcagtaagaacttcactcctctcttggcataatctgcccgtagaaggcctgacaactccttgtccattcctcctaaaatttcatccatcatttccacaaccgttactttcactcctaagctgtggaaaaacgaagcaaattccataccgataactcctcctcctacaataactaaagaagaaggaatttctttattgtccaaagcctcccgatgtgtccaatagttcaccgaatcaagtcctgccacagaaggaataaaagtcgcactgcctgtacatactatcatctgttcacattcatacaactcctcaccgcaacgaacagtatgtgcatcctgaatgtaagcttccccctgcactaaagtaaccttctgtgccgtaagctttgccttgatacccagtaccaattttctgaccaccttcgttttccgggctataatctttcctaaatcggctgaaacctctttcacattgacaccgtattttgctgcatgcaaagctgtatcgtgtactttcgccgcatacagcaaagtctttgtgggaatacatccctcattcagacaaactccgcccacgttgttcttttcaaacaaaactacactgagtcctgcttttccggccatctcagcagctgtatatccagccgggccaccaccaattatagccaattgacacttcataatccgttcaaattttagaaatgattattcttcacgatagtctgcatgaggattgcgttctttcgcacaagccacaaatccttttaaatcggccgggtcaaaattaatgaaccctttcgtataatatatggtaattcttcctttcagcaacgaatctttcttacgcaatgcaatccgtcttactccatacgccttgatactgccactgaaacctcttttcaaccaaatatccccgttttcctgtaccagaatacgcgtcatctgctcatcaatcaacaataaaacgggaagcacaatcggcatcaaattccaatagttttctgtatgcaaagccatcagcacaatggctacaatcacaataatgactcctaaccacactttaaaaggagttctgcggattttaaactcacgtaccatagtatttttatcagttaattatttgtctcaatcataaaattgaatcgcctcgttctttttcaacaggcaacggataaaatcttcctgattcttaggagaaagagaaatggagcggacctttccatgttttttaaaaacgacttcaagccgctcgaacgacaaagcaggttgccagaaagtcatcgaacggactttccgtatacgaagaatctgatctatttcaagtgaagcattggggataaaccgtccggtctctactttcagccagccatctcctgtaattacatactgcgtatgaatcagcatttcgatttcaaaaatcaccacagttgcacacagaattgtacacagcagataatgttcccagaaaaaaaagaataacaacacagaagttattcctatcactatccaataccaccaaccaacttttgattgaaaagtacgattcattgtctgattttttgatttaatttcccgtgaagataagaaattctgcttgaaaacaaaacatctccaacgcatctttaagtattttaaaaatcaatctacagagacacacaaaaaagaatgcttttgagcatcatataactgacttttttgtagttttgcgttataatacccaatcttatgataagaaaattcgattttctcgttatcggttcaggaattgccggaatgagctttgcgctgaaagtggcgcataagggttcggttgcactgatctgcaaagccggactggaagaagcgaatacctactatgcacagggaggcatcgcttcagtaaccaacctgaaggtggataatttcgaaaaacatatccacgacaccatggttgcaggagactggatcagcgatcctgccgctgtagaaaaggttatctgcaacgcgccttctcaaatagaagaactaattaaatggggagtaaactttgacaagaaagacaacggagagttcgacctgcacaaggaaggcggacattctgaattccgtatcctccatcataaagacaatactggtgctgaaatacagaccagcctgatagaagaagtaaaacgccatcccaatattaccgtcttcagtaatttctatgcggtagaaatcatcacccagcaccatttgggaattatcgttacgcgtcacacgccgggaatcaaatgtttcggtgcttatgtgctgaatgaaaaaacaggagaggtggatacattcctttctaaaatcaccgtcatggccactggaggatgtgaagcggtttatacccacaccaccaacccattggttgctacaggcgacggtattgccatggtatatcgtgccaaaggagttgtcaaggacatggaattcatacaattccaccctactgccttgtatcacccgggcgaccgtcccagcttccttatcacagaagctatgcgaggttatggaggtgtactgagaaacttgtcgggtgaagaattcatgcagaaatacgacccgcgcctttcactggctcctcgtgacatcgtagcacgtgccatagacaatgaaatgaaacaacgtggtgaagaccatgtatacctggatgttacgcataaagatccggaagaaacaaagaaacatttccccaatatttataaaaagtgcctgagcctgggtattgatattacgaaagactatatcccggtagcaccggctgcacactatctgtgtggaggcatcaaggtcgatttggacggacaatccagcatcaagcgcctgtatgctttgggagaatgttcttgcactggattgcacggaggcaaccgccttgcatccaattcactgatagaagccattgtttatgcggactctgccgcaaaacacgcactcagtgtactcgaccgttacgatttcaacgaagatattccggaatggaatgcagaaggcactatcagcaacgaagaacgaattctgattacacaaagtatgaaagaagtcaatcagattatggagtcgtatgtaggtattgtacgaagcaacctccgtctggtgcgtgcatggaaccgtctggatattctctatgaagaaacagagcgcctgtttaaacgtgtaaaggcttccagagagatttgcgagctccgtaacatgattaatgtaggttacctgattactcgccaggcaatggaaagaaaagagagcagagggcttcattacacgattgactatcctcatccaagcaaagacaacgtagagaaataaaatctctaatggatattttcacaagccggggtaaatactccggcttttttatgttcttctctgaaaatcctactaaacacaacattctgaagtatgcccctctcccaggctgattttcgtacgttttaagcctgtttgaatgctccgataaagaatggctctccttttcggagaaaacgtctccaggcgcatttctgagagccgtccgggtaagcggtaagggaacaaatgatagcaaaggggaaaaagaagaaaagaatccggcagcagaaagaggaaacggcctgctgcgaaagagcggaaacggacgcagagacagtacggacacaaaaaagtcctgaagcatttccgcttcaggacttctgttaaaacggcgactacctactctcccacttgcgcagtacca

SEQ ID NO: 384 - DNA, 14073 bp, unidentified
  source 1..14073: mol_type = unassigned DNA
atgaaagaagactggaaacccggaacaatgatttatccgctgcctgccgtattggtgagctgcggaagcactccggaggaatataacattctgactatcgcatggacggggacgatttgtacgaacccgcccatgtgctacatctccgtacgccccgaacgccactcctacgacatcatcaagcggaatatggaattcgtcatcaacctcaccacgaaagatatggcacgggccacggactggtgtggcgtacgctccggaaaggactacaacaaattcgaggaaatgcatctgacaccggggaaaagcaccgtagtcagcgcgcctctcatcgaggaatcaccgctttgcatagaatgccgggtaaaggagattatggctctcggttcgcacgacatgtttatagcggatgtggtaaatgtacgtgccgatacccgtaatctgaaccctgaaaccggcaaactggaactggcggaaacgaatcccttggtctatgtgcacggtggatattatgagctgggagaaaagataggcaaattcggatggtcagtagagaaaaagaagtaataatgcgataaaggttttaagagatggagttgcgacgaatcttgatgggcttatatctgttggccttccccgccatgatgtggggacagactccggttgtgcccggtactgccgacgaagagcattccggacaccgcaaggaaactccggtcaatttcggtttcaaaggcggtttcacctcttccttgttccttgtatcccagttcagtgtcaacggagtacccattgacgaagtgcagaacaattacaagataggatatttcggttcccttttcatgcggataaacttcgaccgccacttcctgcaaccggaaatatcctacaacatcaaccggtgcaacatcaccttcgagaaacctctgcccgaagacgccgcatcaggagcccggctggaggaagcctccattacatcgtccatccacagtatagacatccccgtcatctacggatacaacttcatcaaggaggggccgtacagccttgccgtctttggaggacccaaagtgcgctatatatgggacaggaaaagtgacatcgacttcgagaatttcgaccaggtgaatatccgtgaaaggctgcgtccgctcaatctcagtttcaccgtcggcgtatccgtcaccatctcacgcgtctttttcgacttccgttacgacatggggctgcacaacatctccaagagcgtgacatacgatattccggccgacaacaacgctgctgacgaaaacacgaaaaacgaaatccgttttcaccgcagggacaatgtgctgagtttttctttcggagtgttcttttgacagtaaatttcttccttttctttcaatttattcatttatttcccgtaaatttgtgcgcttaataagagaacacagatttatcaaacttatctaataagcagaatgaaaagagatgatttaattttcgaacttatcgaaaaagaacaccaacgtcagctcaaaggcattgaactgattgcatcagagaactttgtaagtgaccaggttatgcaggcaatgggctcctgcctcaccaacaagtatgctgaaggataccccggcaagcgttactatggtggttgtgaggtagtggaccagagtgagcagattgccatcgaccgcttgaaacagattttcggcgcagaatgggccaacgtacagccgcactccggtgcacaagccaatgcagccgtattcctcgccgtgctcaatccgggcgacaaattcatgggactgaaccttgcacacggcggtcacctctcccatggctcactggtcaacacttccggtattatctatactccctgcgaatacaatctgaaccaggaaaccggacgtgtggactatgaccagatggaagaagttgccctgcgcgagaaacccaaaatgattatcggcggcggttctgcttattcccgcgaatgggactacaagcgcatgcgcgaaatcgcggacaagataggtgccatcctaatgattgacatggctcatcctgccggactgattgcagccggtgaactggataaccccgtgaaatatgcccacatcgtgacctccactacccacaagactctgcgtggtcctcgcggtggcgttatcatgatgggtaaggacttccccaatccctggggcaagaaaactccgaagggagaaatcaagatgatgtcccagttgctggattcagccgtattccccggtatccaaggtggtccgctggaacatgtcatcgcagccaaagccgttgccttcggcgaaatcctgcaaccggaatggaaagaatatgccaagcaggtgaagaaaaacgccgctgtcttggcacaagccttgatagaccgtggcttcaccatcgtttccggcggtacggacaaccactccatgctggtagacctgcgcagcaaatatcccgatttgaccggtaaggttgccgagaaggcgttggtatctgccgacatcaccgtaaacaagaacatggttccgtttgacagccgctcggctttccagacttccggcatccgtctgggtactcctgccatcacaacccgtggtgccaaggaagacctgatgctcgaaattgccgagatgattgaaaccgttctgtccaacgtagacaacgaacaagtcatcgcagaggtacgtgcacacgtcaatgcgaagatgaaagaatacccgctgtttgcttattaataagcaaacagaattaaaaattaagaattaaaaattaaaggctgcgcagttcaaagcgaacattgcgcagcctttaatttttaattcttaatttttaattctaaacgcgctccgcgcgtttagctcagcccttctatatttccgtccacaatatcaatgtgttcggcttgtggtttcttgggtaatcccggcatacggagaatttcaccggcgatggctacaatcatttccgcaccgttattgaccacaatatccttgatgtggaactcaaagttgttgactgcaccgtatatcttcgggtcggcagagaaggagtactgcgtcttggcaatacagacggggtaatggctgatacccatctgctctatcagtttgataactttgcgggagtggagactgtaagtcactacgcttgccccgtagaggttgcaggctaccttttctattttacgttccacgcaatcgctctcttcgtaggtgaaggtcagcggttcggatggtttgttctcgatagtatctactaccagattggcaaggtcaacggctccctctcctcctttggcaaaggcgttgttcacggcaaaacctacctcaagcttttcttcgcaatggcggcggatagcttccacctcctcgtccgtatcactggcaaaacggttgaatgccacgatgacctgctggccgaatgaacgcaaattgcgtacatgcttgtccagattgccgaagccctctttcagtccttccatattgggttccttgatgcggtccagactgacaccgccatgcatcttcagtccttgtgcggtagcaacgattatcgtcagcttgggctgtaggccgctcttgcggcacttgatgttgtagaacttctccgcacccaggtcagccccgaaaccggcttccgtcactacataatcgccaaatgtcatggccatttttgtggcaagaatggagttgcaaccatgggcaatatttgcgaacggtcctccatgaacaaaagcagcagagccttcggtagtctgtaccaagttggggttgatagcatctttcaacagtacggtaatggcaccggctactcctaactccttcactgtgaaaggagtaccatcgaaacggaatcccagaataatattttcaatacggcgacggaggtcgtcgaggtctgttgccagacagagaatagccataatttcggaagccggggtaatatcgaagcccgactcctcggtaatgccgttggtgctcggtcccaatccggtgacaatgctccgcaaggaacggtcattcacatcaagtacgcgccgccagatgatttctttcagtccgaagccatccgcctgatgctggtacaagtaattgtcgagcaaagcggaaatcatgttgtgtgcggaggtaatggcgtgaaagtcgcccgtaaagtgcaggtttatcttctccatgggcagcacctgggcatatcctccaccggcagcaccgcctttcatgccgaagcaaggacctaacgagggttcgcgtaaagccacaatcgctttcttgccaatcttgttcagccccaatgccagcccgatggacacggttgttttaccgatacccgctttcgtagccgtgatagccgtcaccagtatcagattgctcttcttcactttctcttcatcaatcagatgcgtaggaatcttggctatgtaacggccatagttctctacttcgtcacgcgggatatccacactttcagccacctgctttatcttcttcagctctatgctgcgggctatttcaatgtccgatttcatacagagtcttttctttaaataacaactttaatgttttgaaagttgcaaaagtacgaaagatgtggcaaagtacaaaagaataccgtattttcacctgaccacctgcatcttctatctatttgaaccgcgacgtatccaccgcctcccgttgcttctccttatatccaccgaatttataagtaaacgatacgccgaattcgcggaagcatgagtaatgattcgtcacattctgcgtcttgaaacggatgcggggagaaatctgtcccgtctcaaaaatatcgttgcaatagaggttgagaatggctttgttcttggcgaagccgtagcgcagggcaatattcacattgcccgacgtaggcaggtcgtagatgccctgaatggctttactatgcacaaatccggtcaccgtcagcttcaagtcgggtttggtggagagggtaaaagtattgttcatctgggcaatgccatagcattgctttctgtcgaaaggaatatcccagaaatcaccatccttttcgcgatgccacaagccgatgagggtaaggcgagaattcaaccaatccttcaccttaaatgggatagaggcttgtattcctgcttgttgctgataatcaaaattgagtgtcttgtagatttcaaccagacgttcggaggattggtagagtgtctgtacagagtagtccttggtgtggttgaaccaggcgctgaagatgtatttgcttttcaaaatataggtcattttcagctcatactcttgtgccggtttcagcaacggattaccatgcagctcagagtatccaccgccgatgtaagagacggcatcctgcaccgcccagtagtcgggatagtccttgtcgctgctcagagagagctgaaggatatgtcccggtgccggcatatagttcaagttgacgatgggataccagtcccactggtcccagacgggagtcttgtaatgctccacagccagggaagcgtccaaagcaagtttgtcgccgaaactcttgctgaaacctgcatagatattccaagtttgctcgcggcggcgggacttcatattgcttaaggcatctgaggaggtcagttgttcgccggtttcggggtcgtaataatattggtagctgttgtcgatgctggtagtatagatggctccgtaattcaaatcccaaccttttcccagactatgctcctgggccagaaagaatttccatcggttgatgcgttggcaatcttcggtgtagaagtcaagttcctcgtcctgcatgcggctatgcagcaactggtcggacggggaacggtagtaggtcagttcggcaccggctttgaggccaaaaggggtacgatagtccagacggccgttgtgcagccagtcggtgctattgccatgagttgtggacacctgcgtgcccgtcacgcccttccagttgtgggaggtggaatagccaccgttatagacgaaactcagctgatggttcttggcgatattatagtccgcccctacccggaagctatgggtatggctgcggccacggcccacctcatctgttgtcatggggtgaaccgagccgtctgccagggtgtgcacagcctctttgtcggtagtagagtagccccggccatggctgtgcgagtaaagaaaatctgctgagaatttatttttgctgaagagcaggctggcgcgttcctcaaagccttcgttatgcttctggcgatacttggcatagagttcgccttgccaggagccggggccgcctgccgattgtttcagggtgatattgatcagtgcgccacgcacctggtagcgtgcaggggcgttgtacatcacttccgccttctctatgcggctggcagggatgctgcgcagcaaggaatagagctgctctgtgctgagggtggttactttgccgtccaggataacggtgactccctggcctgccaactgcagcccgccattcatctcgatgacgccgggaagctctttcacggcatcgtaggcattgtctacggggaggttccggataaggcggggcaggtcgtacaccagcttgccttgcgctgcctttacgatggggcgttcaccggtaatcatcacttccggcaaggtctgataaagactgtccagacgggcatcggtcgtgataaggctgtcggcgctgaggatgcgattgtcgtccgcaccggaggtggttgcagtgccgttgttctcttgtgccgaaagactgatgctcaaagcacagcatacaatagggagtaaatagaatcgtttcatgttcttctttttatttatgtttatattcttcttctgcaaatcttcgtctgcaaagtacggcagaatcagcagaaacttgtgttatcagcggcttaccaagtgttatccagtgttatcgggagtgttatttagtcttatcggatgatagggttcacaatattaatcttacctttgtatgtataaaagtaaccggaaacaaacatgaaactgccattcaaatatattgccatacttgtcatcgtctccctggccggcatcttcgcctaccaagcctactggctgacggggctctaccataccatgcacagtgaaatggaaagggacatcaccgaagccatgcgcatgagcgactataacgaaatgatgatacgcgtggataaaatgaagcaggacgacataaaccacggtgaagtcagcgtatcagccggatacagcgatgacggaaaatcatttgtccgtagcagtaccaccatctcccgtgaagattctttggacaacaccaccctgcacgaaaccttcatgcccaaaggagacagtgtttacgtgacccacccgaacgattcaacccgcgtggaagtcagtgtcagggactcagacagctctccccaatccgcattgagtgccaaagggggactggatgtgattttgcgcgaccaaaacagtatgctggaactcgccacctacttccagcgcggactgcattcgggactggacatcatttccgaccccgacgtactgctttatgacagcctgctgacttcattcctgcatgaccgtaacatcaatcttccccataggctgctacatcttcacaaaggcagcaaatgggactctaccattctctatatagatacattggtaaacatcggtacccccggctatgtgcctacctcaaaagccgtggaatataattattctttcgacatcaatacaagtcaaagctaccgtctcatcatggaaccagccggcacgttggtcttgcgacagatgtcgggcattctcaccacatcattcgttattctgatcgtactcgctttctccttctggttcctgatacgcaccatcctgaaacagaagacactggaagagatgaagagcgatttcaccaacaacatcacccacgaactgaaaacccccatcgccgtagcatatgccgccaacgacgctctgctcaacttcaaccaagcggaggaaaagacccaacgcgacaaatacctgcgtatctgccaggaacagcttcagcgcctcagtggactggttgaacagatactttccatgagtatggaacgccgcaggactttccgcctgcacccggaggagtttgcaatacgtgatattctggaaacactcatcgaacaacacaagctgaaagcggaaagctccgtccacatatcggtggacatcgaaccggaagatttgagcgtacttgccgaccgcacgcatttcagcaacatcatcagcaacctgatagacaacgccatcaaatattcgcacggagaggccgaagtggccatccattgccgcaaggtaaccgtcgaagggcagaatgaacagaccgaaatctccgtcagcgaccacggtatcggtattgctcccgagaagcagaagcacatcttcgacaaattctaccgcgtacccacgggtaatctgcacgatgtgaaaggctatgggctgggattgttctatgtgaagaccatgatagagaagcatggtggcagcgtatcggtaaagagtgagttgggaaaaggaagtacctttacgataaggatatgataacattatttgttagggtactttacattacttgttaaggagctttacattacttgtaacaaaagcgacaattatggaaaagataaccgtacttctggttgaggacgaacagaccctcgccatgattatcaaggacacattggaagggcagaacttcatcatccacaccgcagcagacggtgaagagggattgcgcaagttctttgacctccgtcccgacgtgctggtggcagacgtgatgatgccccgcatggacggctttgagatggtgcgccgcatccggcagaccgacaaacagaccccggtactattccttaccgcccgttccgccatcaacgatgtggtggaagggtttgagctgggtgccaacgactacctgaaaaagcctttcggaatgcaggaactcattatccgcataaaggccctggtaggcaaagctttctcctttacagaagaaaatcccaaggaaactaccgtttttgaaatcggtgactaccgtttcaattccgtcactcaacgacttgcttttgcaggcagcaccccgacttcacctgacgcggatacggaagtggaactctcccaccgcgagtccgaaatactgaaacgcctttgcgagaaccgcaaccaggtggtcaacacccagaacgtattgctcgacctctggggagacgacagcttcttcaactcccgcagcctgcatgtgttcatcaccaaactgcggcataaactggccggagacgagcgcatccgtatcgtcaatgtgcggggaataggatataaactaatagtgaactaaactaaaactaaactactatttatgagaaagttattattcattacttttatctgttcctcactctgcgcctatgcacagagcgagattccggaagacacaataaagaaccggcctcccgtaaagaaagagcagattcccttttctccaaaagagaacaagcgtacgggccttgatgaaagccagccccaacaaagtctgcagggcgaacagcaggaagagataaatctccatctccctccctccgactatgtggagcccctgccctggacggacatgaagaagatacactttcagaagaacatctttgaatgggacttccagcgtttcgccgatttcctgctctcgccggaagtcgtactgacgatgtacggcagccataacacctatcctgcaatgggctccatcatgcaggctggcgcaggagtcacttattacagtcccgacggacattgggaactgagcggcggagtgtatgccgcccactattccatctcccaaccttcatccattacaggtgcccagtatgccaaaagggatgccccccgaggtactcaatgggacataggctacaatgcctccgtatcctaccgcatcaatccctacatgcgcctgcatgccttcggccagtattcgggctacgggagaagcaactcctttcatggatatatgaacccgatgtatccgcaaagcggttatggcatggtactggaactgaaagtgacggactggctcgacctcaacggagggatggaacgaagatacgaccccaccaaaatgaaatgggtaaattcgcccatcttcgcccctaccattcgtataaagaaatagaaataatacaaagatatttccagaaatagagggaaacgagtatctttgttcagtctgcccctatgcggcagacagcaactgaaattgtgaacaaagaactatgaaacgaatcttcttctgcatcatcattttacttgcaggcatgtcatccgtcagcgcacagaacgggatgcctgccgatacggtacgtactgcagtacgtggcgaagcgtctcccgaaggcatgtctccgtctgaaaaggagcttctgccggacgtgaagaattacgacggcttcctgctggatatggggctgatgaatctgtccacccccactcttcccaaattcactttggagataccggatgccagcaaagactatagccgcatcttccagttgaacccgaacgtgacttattcacaaggtctttcgaacatattctcactcagcaactcccggtatttcagttcgaatcccttcggactgacgggcttctggggctctaccgacaacctgcaaatgggaagtttcactttgaagaacggcatgcgcatccatacgtacggcgaatatgacaaggacggctggaaagtacccaacccttccgcactgccttgggaaaagaacaatttcaaaggggcgttcgagctgaaatcagccaacggagcctttggcatacgcatcgaggtacagcagggcagacacgtgccctattgatgcccatcacttaacaacagaatcaatgacaagaaagaaaatactggtaataggcgccaacggttttaccggcagacgcatcctggatgatttgtcccgcaacttgtcttaccagacaacgggctgttccctgcacgacgacatctgtccccattcgggcgactatcgctttatccgtacggatatatgcgaccgccaggcggtggaaaagcttttccatgaagtacagccggatgttgtaatcaatacctccgccctctccgtccccgattattgcgaaacgcaccatgcagaagcggatgccgtcaacatcactgccgtagagcatctggcagaatgctgtgaggcgggaggcagccgttttatccatctttccactgacttcgttttcggtggtgatacggaccgaccctatacggaggagaatattcccgctcccgttaattattacggctacaccaaactggaaggtgagaaacgtatcgccgccgtttgcagggattatgccatcgtgcgtgtagtggtagtgtacggtgccgccctgcccggacagcatggcaatgtgctccaactggtggcaaacagattaaggagcaatgaggaaatgttcgtcgtatccgaccaatggcgtacgcccaccttcgtgggagacgtgtcgcaaggagtggagaagctgataagtcatccgcaaaacggtatctatcatctctgtggcagcgagtgcctgaccattgcagacatcgcttatcgggtagcggacgtattggggctgaatcgctcgctcatccgtcccgtcactacgaaggagatgaatgaaaagacgccacgtccccgtttcagcgggctgagtatagaaaaggcaagccgggaactggggtatcagccgcacacgctggaagaaggaataaagcagatgttcggatggtaaataatgcaggtgcggatggcagcagattcgactacagcaactccggctctgccagtcctttctctttgcgatacacacgtaccatctccagaatcacatctccatatttctccacccctttttttccgaaatacggaatgcgtacaagcatggccttatccgaaggaagcagattgcagatgcctagaattgccttctgctgaatgacggtgtatacgggcagccctaatgcggaagcttctgcattgcgccatgctaccaagcggttgtaaagttccggatgcagcacatccgtgggtacttcaacagccgcagcatcgcgtttccgctcacgcggacgtttctctttatcagcctgcttactgcttccctgcccttctttggcagaagcacttctccctttgcctttacccttctgcgaagccgaatcatcaatggaaagcagtgctttctgcttcaagtatcctgccatatggaaaccattctccagcacataatccagcaaatcagtcttcatgtcaaacacttcctccagctcctccatggcatcccggagcttcttcttcaactctttattatcagaagttaccgtactcgccatcaccgcatccagcggttgcaactgctcttgaaaataagtggcggcagagtgtatgcgcccctgcaaagtcgggtcggctgcatagtcctgcgcagtatcaatcaggcgggtatactggatactgaacttctgggctactttcgtcactttgtcgtgaaaacgttccatttcctccttacaggctgcgagttgcttgggaaagagcttgtacaagtgttcgtctatcagccgcacataccgccgcaaagcctgctccatgggctggaaatcgaacaagcccgacagcagttccaggaaataggtctgctgcaaggaacggaagcgtttctcgtccggctcgtttctccgtgcctccatcgtgaaggtatctactgcatggtcactgataacggcctttgcagaaagcggggcactgagcaccactccctccaatgtcttgcagcggctcagagccacataggtctgcccatgcgcaaaggaggcactggcatcaatcacggcacgttcaaacgtcagtccctggcttttgtgaatggtaatcgcccacgccagcttcagcggatattgccggaatgttccttcaatatcttctgtaatctccttggtttcctcatcaagcacgtatttggcattcgtccactcttcctcctgaagtaagaaggtagcgtcgcttcccttactgcgcacttcaattccatctgccgacacggctgtcacctctccaatcatgccattgtagtaacggtgctcaccggaggtgtcgttcttcacaaacattacctgggcaccgcgtttcagttccagtacttcatccgtgggataggaatattcgggaaactttccgtcaatcttggcacgaaaggcatacgagcgtcccggaagttgttccagctcatggtcattaatccgttgggcctgataattgtgggtcaccaggcggatgtatccttcttctttatctggtacgaaattgggaatataccggcggttcaaggcttccagcacttgcccgtcacaacggttttcgcgaatgcggttcagtaattcaagaaaagtcccatcgttctgccgatagactttctttagttctatagtgcagtattccgtctgcttcaaggcctggctggagaagaaataaggcgtgtcatagtatttgcgcagcatctgccactcatcgtctttcactacgggagacagctgctgtaagtcgccaatcatcagcagttgcacgccgccaaagggtttgttccggtcgcggaaccgcctcaagacggcatccaccgaatcgagcaagtcggcacggaccatactgatttcatcgatgaccaataaatctatgctgcgtataatgttgattttctctttcccgtaacgaaaacggtaggttgccttgccatctgcgctgaatgagctttcgggcacataaggagcgaaaggtacttggaaaaaagagtggatggtgacaccgcctgcattgatagcggcaattcccgtcggtgcaagtacaatcatccgtttcggactctctgccctcagttttcgcaggaaagttgtcttaccggtacctgccttgccggtcaaaaaaagatgagtgcctgtgttttcaatgaattgccatgcaagcgctatttcgggattattctccat

SEQ ID NO: 385 - DNA, 6161 bp, unidentified
  source 1..6161: mol_type = unassigned DNA
atgcagcatgaaactgtcatcgtgctggactttggcggacagtacaatcagctgattgcccgccgcgtccgagaaaataatgtctactgcgagatctattcctataaaaccgatctttcggtcatcaaggccaagaatcccaagggcattatcttcaccggcggccccaacagcgtttatctggaggattctcccaccatcgaccccgagatcttcagctggggcgtgcctgtgctgggcatctgctacggtagccagctgatgatgcacctgctgggcggtcatgtctgccgcgctcccgagcgtgagtacggcaagaccgaggtgtttgtgaacaccgagagcaagctgttcaccgatgtgcagccttctaccatctgctggatgagccacaatgactacatcgagcaggcggctcccggctttgagatcaccgcccacactgcaaactgccctgtggcagccgttgaaaatgccgaaaagggtctgtacgccgtacagttccacccggaggtgctgcacaccgccgagggcaagaagatgctgcgcaacttcgtgtacaacgtctgcggctgctccggcgactggaagatggattcctttgtagagaacaatgtcaaggctctgcgggagcgcatcggcgagggcaaggtgctgtgcgcactgtccggcggcgtggattcctccgtgctggccgctatgctggccaaggccatcggcaagcagctgacctgcgtgttcgtggatcacggtctgctgcgtaagaacgaaaaggaagaggtctgctctgtctttggcccgggcaatgccaacggcttcgacatcaacttcatctgtgtggatgcccgcgaccgctacttcagcaagctgaagggcgtcaccgagccggagcgcaagcgcaagatcatcggcgaagagttcatccgcgtgttcgaggaagaggccaagaagatcggcaaggtggacttccttgcacagggcaccatctaccccgacgtggtggagagcggtctgggcggcgagtccaccgtcatcaagagtcaccacaacgtgggcggcctgcccgatactgtggacttcaaggaactggtggagcctctgcgcaacctgttcaaggacgaagtccgtcaggccggtcgcgagctgggtctgcccgagtatctggtcagccgtcagccgttccccggccccggtctgggcatccgcatcatcggcgaggtgacccccgagaaggtcaccattgtgcaggacgctgacgccatctggcgcgaagaaatcgccaaggccggtctggataaggagatcagccagtattacgctgcgctgaccaatatgcacagcgttggcgttatgggcgacgagcgcacctacgactacgccgttgcgctgcgcgctgtgactaccaccgacttcatgaccgcagaaagctacgatatgccgtgggatgttctgggcactgtcaccagccgcatcgtcaacgaagtcaagcacgtcaaccgcgtgttctacgattgcaccggtaagccgcctgcaacgatcgagctcgagtaatccccaatagcaccatcaccccggagggttccgttaaaacgaaacctcccggggtgttttttcttctggtacggtcaaatagactgtaacgttcaaagcatttcctgtatcagagcaaacggtaacccttttatagcagtttgcatttttaatgcccaagcaacatccgcaaactgcatatcgcaaatatgccgttttgataggcactatttttgaaaattgcgataaacgcagtattttacacaaaaaagccctaaaccccttccttctccgcccgcaggggagtataatagaatccgttgtttgcaaaataggaaaggggaagtatcaactatggaatcgaagcagaggcttttggagccgcagctcgtccaaacgggaagggcggatcagttcagccgcaaggtgttctgcgatggaatgcgggatggcgtgcccattgcgcttggctactttgcggtatcgttttcgctgggcattgcggcgcgcaaggcgggctttacgccgtttcaggggtttcttgtcagcctgctgaacaacgcctctgcaggagaatatgccgcatttgcgctgatcatggcaaacgccacctattttgaggtggcagtcatcaccctgatcgccaatgcgcggtatctgttgatgagctgtgcactggcacagcgctttgcaccggaaacgcccttctggcatcggctgctcatcggctacgatgtcacggacgagctgtttggcattaccatcgcccgcccgggcagcctgaacccgtactatacctatggagccatcctgctggcggcaccggcttgggcttccggtacggcgctgggcattatagcgggcaacctgctgccgctgcgggtggtcagtgccctgagtgtggcgctgtacggaatgtttttagccatcattatcccgccggctcgcaaagaccgggtcgttgccgtactggttatcatcagctttgcgctgagctttctgtgcagctatctgccgggcatctcggcgctctccgagggtacccgcaccattcttttaacggtggcaatctccggcgcagcagcggtgctgttcccggtcaggcaggaggaaaacgaagatgacgcataacaattatatctatattgcggtcatggcgctggtatcttatgccatccgcattctgccgctgacgctgatccgtaagcctatcaaaaatcgctttatccagtcgtttttgtactatgtgccctatgtgacgctggctgtgatgaccttcccggccatcattcaggcaacgcagagcccggcagcaggtgctgttgcattggtagtcggcattgccgccgcatggtttggcgcaagtctgtttcaggtggctgcgggctgctgtgccgtggtgttcgtgctggaattttttatctgaaatcttataacaggagaacaaaatgaaaaagatccttgtaaccggtgccggcggctttgtaggatcccgcgtgatgcagcaatgggcggggcgttacgagctgtgcgcctttcccaaaggctttttggcagcagcaggggaggatgccgtgcggcaggctgttttgcagcagcgcccggatgtcattctgcataccgcagctatttcggataccggttactgcgccgaccacccggagcaggcttaccgcgccaatgtggagctgccggtctggcttgcccgtgccgcagcggaaacagatgcaaagctggtggctttcagctcggatcaggtctatgccggtgtagagcagtccggtccactgccggaaaccattccgttacagcctgccaatgtgtatgggcagggcaagctggaaatggagcagcgggtgcaggcgctctgcccgagcgccgtgttgctgcgcgccacatggatgtacgacctgccgggctaccgactgcccatccggggcaacctgctgctgaatcttttgcgtgcggcacagcggggagaatctctccgcttttctgtccaggatttccggggcatcacctatgtccgtcaggcggtggcgctgctggagcctgccctgaccctgcccggcggggtctataacttcggcagtgagaacgctgaaaatatggtgttgaccgcccggcagtttgctgagacactggggatcacggtcgatattcaggaagccgactgggcacggaaccttgcaatggattgcagcaagctgcgggcgcagggcatcgtatttgacaccacacagaccggtcttacgcgttgtctgcgggattatggattgcgttgacctcagagaatcaaatttttccgtatcgcacaaaaaacagagaaaagcacgaaaaaagcaggggattctgtatgctgccagcccgacagggtgggacaaatcatacggaaaccctgcttttttgcttatctgccggagaaaagttcgcttataggatgcagcatttcttcatgtaaaaagtcatacttattttacatcttatctgcagtttgctataatattttcgcttttttgcaaagcatccgaaccgcataaacctttaaaaccttgaggagagtgaaatttttgaaggaagtcaagcttgaagaagcggcttatcagtttgaagccaaaatgtccctgcggcaggccattccgctgggcttgcagcacgtctgcgccatgttcgtgggcaacctgaccccgctgctgatcatcaccagcgcctgcggcattgcaggcggcgagtttgcagacctgcaggtcaccctgctgcagagcgccatgttcgtggcaggtatcgtcacgctggtgcagctgttcaccatcggacccgtgggcggcgcagtacctattatcatgggtaccagttccggctttattggcgtgttcaacagcgttgtgggcacgatgggcggcggtgtgctggcctatggcgcgattatgggcgcatccatcatcggcggtatttttgaaagcgtgctgggctttttcctgaagccgctgcgcaagttcttcccgccggtggtcaccggcacggtggtgctttccatcggcctttcgctgatttcggtaggtatcaactccttcggcggtggcaacaaggccaaggatttcggctctgtggaaaacctgctgctggcactgttcgtgctggtggtcatcttgttcttcaagcactggaccaccggtttcctcagctcctccgccatcctcatcggcattctggccggttatgcggctgctttcatcatgggtctggtgctgcccaccactggtgtgactgctgatggcgtagagttcaccaaggcatgggtgctcaactggagcaaggtggcgcaggcttcctggttcgcagtgcccaagctgatgccggtcaaggtggtatttgatgcccgtgcgatcctgccggtgctgatcatgttcatcgttaccgcagtggagaccgtgggcgatatctccggcgtgatggagggcggcatgaaccgtgagccctctgataaggagctgtccggcggcgtcatctgtgatggcctcggctctacctttgctgcactgttcggcgtgctgcccaacacctctttcagccagaacgtgggtctggtggccatgaccaaggtggtcaaccgcatggcactggcttccggcgctgtgttcctgatcctctgcggcctgatccccaagctgggcgcgctgatctccatcatgccgcaggccgttctgggcggtgctgccgttatgatgttctcttccatcgtggtcagcggcatccagctgatcacaaaggaaaagatgaccccgcgccacctgaccatcgtgtccgtggcactgggcgtgggctacggcatgggtgccaacagcggcattctggcacaggcaccgcaggctctccagctgatctgcggcgagtccggcatcgttccggccgcctttgtggcgatcctgctgaacgttctgctgcccaagaacgatatggcagagtaaaacttagttttttagccgggcaagggcttccagctgttgcaacacctgcggggtgtccgcatccagcagctccataggggctgcaatacagaccgtgcgtacctgcgcagggtactttttaagcagcacgttgccgcctttgttttccggcagggtgagcagttccgaaaaaaaactgcttccaaacagaacgggacttccgacaagcggtgccgggtcgttatcggccacggcacccagacggaagatctcccgttctgtttctttttgccattctgccggggatgtctgttcgtggcaaaagcgctctgtcatggcttctaccgtctcccggcgcagcaggggctgatccccgggcagaaacatacagccgctcagttccggcagctgctccagcagcgccgaaagccccagtcgaacggtatcgttgcggccgggcaggctgtgcagcagcaccgggacgccctgcgtcctgcacagtgcctgtacatcttccgagcgggtcaccacgatgcgggcagcgataccgggtgtggcagtggcggcaaaagcccggcagagcatgggctggccgcaaaaatccgccagcagcttgtttgtgccaaaccggcggctcagcccggaagccatgatcacacagccgaccgtaagcgacttcttcat

SEQ ID NO: 386 - DNA, 9738 bp, unidentified
  source 1..9738: mol_type = unassigned DNA
atgaaaaatattctgatgaacgaaaacaatatcgggatcataaaattatatgagaaaaaggagatttcaattatgtgtggaattattggatttacaggtaaattaaaagcccaggatgtcttattgacaggacttgcaagccttgagtaccgtggatatgacagtgcgggaattgcgtactttaaagataccggaaaaatttcacttcggaaaactgtcggaaaagtaaaagatcttcgtgcaatctgcgatgatgataacaattctacgtgtggaatcggccacacccgctgggcaacccatggtggcgttaccaatgccaatgcacaccctcataaggtcggacaggttgcattgatccacaatggtatcatcgagaactatcatgatctcgccaccaaatatgatctgacggatgaactgatttccgagacggataccgaagttgccgccgcattgatcaataaactctacgaaggagatccaaaagaagctcttcgcaaagcagtagccgaaattgaaggttcctttgccttctgcgttctgttcaaggatcatccgggtgaaatttatgcggtaagaaatgtcagccctatggttgcaacatactgtgatgacggtgcttttattgcatctgacctgactgcttttatcgcatacaacaagcgttatttcatcgtgccggaatatcatattttaactatgactgcggacggcattacgttagaggatttagacggtcattccgtagaaccggaatatatggaagtaaactgggatgttaccgcagcccagaaagatggctatccgcatttcatgatcaaagaaattcatgaacagccggctgccatcacaagaaccattaccccacgtatcaaagatatgctcccggatttttcggaagatgccattgcggattccttctttgaaaatgtaagcgacattacaatcgttgcctgtggtactgcaatgtacgcgggaatggtaggaaaaaccatgatccagaaccgcctgcatattccggttaccgtggcaatcgcatcggagttccgctatgaagaaccggtaatcaatgaaaaatccatggtgatcgttgtatcccagtccggagaaaccattgatactttggaagctcttcgccttgcaaataaatatacaaagaaaacactgtctattgtaaatgtaaaaggctccagcattgcacgtgaaagcagctatgtattatatacacatgccggtccggaaatcgctgttgcaagtacaaaagcatacaccgttcaggttgcttctttttacctgcttgcatgcaaacttgccatgaaacagcaaaagatttctgtcgaagaagcacgtacatttattggaacactgcaggaaattccaaattacatcgaggaagttcttgcacaggctcctgatattgaacagctgaccaaacgcatgatcaatgccaacaacgcgttctttatcggtcgtggactcgattataccctttgtatggaaggtgctttgaaattaaaggaaatttcttatattcatgccgaagcctatgctgccggtgaattaaaacacggaaccattgccctggtcagtgaaggggttcctgtcattgccgctgctacccagaaacatgtatacagcaaagttatttccaatatccgggaagtaaaagcccgtggtgcttatgtcattcttttgtccaaagacaaagaaatcacagatccttctatctgtgatgtacacatcaatcttccggatgtatccgacgaatttacgatttttgaatctgttgtaattttccagctgattgcatattacacatccgttggaaaaggcttaaatccggatcagccacgtaacctggcaaaatctgtaacggtagaataagaaaaaactgtcgcgcgaaaattcgtgcgacagtttttttgacatagagcctttctaaaacttttgaaggcaaaaaaagaaccccagaagctctctaaaagcctctgaggttgcccctgccaaggattctctcacccatgtaccggaatccttgtatcgtcggcgcgacaggatttgaacctgcgacctctgcgtcccgaacgcagcgctctaccaagctgagccacgcgccgtttcaactgcccaattatagtaacacattctccggtgtttgtctagtgaatttttttaatttatggtacaatacaaaaaaagaatggagaagaacaatgaaacatactgctttgattacaggtgcatcccgtggaatcggtgcagccctggcatgtcgatttgccgctgaaggctatcatctggctctttgctgccataactcttatgaaacgctgcaggcacttgccacaaaacttgaaacaacctgctccatacaggtgcttggcttccgtggtgatgtaggagactatacttttatctgtgacatggtgcaaaaaacactggataccttcggccagattgatgtgttaatcaacaatgccggcatctcttatatcggtctgctcaccgacatggatattaccgactggaaccggattgttgcgacaaacctcacatccgtcttttccacctgcagacaggtcatcccctccatggttcatgccaaatccggacatatcatcaatatttcttctgtatggggaaatgtcggagcttcctgcgaagttgcctattctgcatgcaaaggtggagttaattcccttacacgcgctttgggcaaagaacttgcccctagcaatatccaggtaaatgccatcgcctgtggggtaatcgatacggatatgaaccgttgtttctccgaggaagaacgctctgcactcatcgaagaaattcctgccggtcgtatgggatccccggaagaagttgcttcactggcatattctcttgccacagcaagcagttacctgaatggacagattctcaccttagacggcggatggatttaatttcttatctttttggaaatctttttccatttatttaagaattaaaacgcaatacgcgttttctctgttttttatatcaactttctataaaatcatttgtatgaaaacgaatgataaaaataaatacaaagattttggtgaccgtctgagtctgattatgtataaacaaaatatttccaatatccagctggcaaatgcaatgtttgtttcgccgtccacgatcagcggataccgtaccggtcgtcgttctccgaccgttgcggatcttgcagccatcgtgcagattctgaatgtttctgcagattacctcatcggaaccagtgaaattacaaccagacccgataccaccgaaaaaaatagttgagcacgccctgtttccagagcggtgcccaactcttttttataaatcatgttctgccagtaaaattaccgtagaacgttccggaacacgcacacgtgtctgatctccctgtgtctgggcttcaaaatctgccccatcctggtattcacagaaagtatttactacaagtttccaatgataagactccggcaacgaaggcaggcgcatctccaaaggctcccaatacgcattcattccgtaaaagatcatatcatcatccgtatcatcggcatttcttcccgcatacatgattccaattaaatgtgtattatagtccgtataattccggttcggctctccgttatggatacttacggaaggtaacccgcagactgccggctttgtatcccttcgcagaatcggatgctttgcacggaaatggatcataaaacgggcaaaatcatgaatctcctgaaattcttccagtctgttccagtccagccaggaaataatattatcctggcagtatgcgttgttatttccatactgcgtattacaaaattcatcccctgcaaaaaacatagccggtccacggctgcataacaacgcggcaaatgcattcttcacgagtctgcgccgcaggcccataaccaccggatcatccgtctcaccttccaccccgcagttccagctcaggccgttgttatccccgtccgtattgttccatccgtttttctcattatgcttttcattatatgaatacagatcatacaacgtgaacccatcatgacaggtcagaaaattgacggatgcactatatccgcggcttgccggatcatacatgtcggaggatccggtgatacgtgtaattgcacgccctgcgacgccactgtcgccctttaaaaagcttctcatatcatcacggtatcttccgttccattcggcccagcggttccaggacggaaaacttccaacctgatacaagccacccgcatcccaggcttctgcgatcagcttcatatcccccagaatagagtcaaatgcaagggcttccagaatcggcggattctccatcggtgcaccattctgatctcttcccagaatcgatgccagatcaaaccggaatccatccacccggtactctactgcccagtgccgcagacagtctgtgataaaccgccgtaccaccggatgattgcagtttaagacattgccacagccgctgaaattgtaataatatccatccggtgtaagcatataataaatattgttatcaatccccttaaagcaaaaacatggaccgttttcatttccctctgccgtatggttgaataccacatcaagaatgacttcaattccattttctttcagttcgcggatcagacgctttaattcatcaccctcatgattatgctcctgatgaaatgcataacttgtattcggggcaaaaaaggaaaccgtattatagccccagtaattgtacaactgcacgccatccaccacacgggcactttccatttcatcaaattcaaaaatcggcatgagttctaccgcattgattcccagatctttcaaatacggaattttctgtcgcagaccttcaaatgttcccccaccttttacaccggaggacgcatctttggtaaatcccctgacatgcatctcatagatcaccagatcttcaaatttgtaattcagattccgataccgcccccagtcaaaatcactttgcaccacacgggctttatagacaaaatcctttccgccttccggtttttctccccagtttctctgaccggtaacagctttcgcatatggatcaagaagcgtatgttttctgttaaacagtaaccctctcgcctgatcggcaggaccgtccatctgataggcatactcaaaatcctctgcttttaagccaaaaacaaggatagaatacgtatttccaattttataactttccggaatgcggattcttgcatacggttcctgtgccgccggccggaataacagcaggacacagctcgtagctccatgggagcttacggtaaaacttaccccttcctctgtctgatatgcaccattcatctgataaaatcccggacgtacatcaaatccaccgatattatcgagtggatgaatgacttccccgagactttccatttcttcgtctatcggccagcttttctgttttgacggataattccaaaaacttgcattcatgtgctgattcctcttatcattattatttacttgccacataaaattatattatccccctactcttccctgatgattaccctgccatttgcgtcaaatccgattttactgtacttttccgaatactcattcatatgatcaataatcgtctgttttctgtcgccttttgctatggcaggctgaaaattatttctttctgatgtggaagaaatgctgcatggtatcatatcggctgatatatctgtctgcagtaccccatccacaaaggtaaaggtctgttcatagatcgccgtatctttgtcttttggattcctgttccccccaaagcagaaatttccaagactgtagcagatcatttttccgttgtataattccattccctgcaatacatgaggatgtgtaccgaccagcagatctgctccccagtcaatcacctggtgtgccagcttctgctgataatcattcggataatgatccccctctatcccccagtggcaacaggcaattaccagatccgctccttcttcccgaagttctgcaatcccatcccggatataattggcatgtttttcatctgcagacaactggcttgcggagacaattccgattttgataccatccttcgtggtataggtatccacatgatcattgaatccgaagataatccctgctttatttaacacttctctggtatcatcaagtccctgctgcccataatcaaacgtatgattatttcccagacttgccccctccacagaactgtctgtcataataccaacatactccggttttccttttaagttccacgttttttccacacgctcggtcgcatttgacaacacacattccagattgaccagtgtaaaatcatcctgctcaaaaatacttctgacatttttaaaaaaataatcctgcccgtatttatcatagtattcatgaaaggaacctgcatacccatgcgtctgtgttgccccaagcgtacagtcacctgtcgccgtaatttttaccgtctgtatcaccggttcctgctgcgtttcagttgcagtcccggtttccgtttcttccagcgtacccggttcttccgtcatctgtgtctccgtgattttttccgcagaagagggcaaagccgatgacgttgctgcaggagaagaacatcccgtcagcaaaaatcctgccattaggattggcaatatccattttttcatacgttttcagactcctctttcacaagaatatccaccgtgtgaccgcttgcacccataagatccatccgttcacaggttgccagatgatactgtaaaaatgcatcaaactcttcttccgtcagcgcatttaaaaacggacgcatataatttgctgcaccgtctgccgctatgatctgccggcgcctgacctctacctgccggtccaatgcttcaatatcttccagacgaaccatggaatacagaggattggcttttgaagtacagtgataatcctctgtgagcattccctccttaagcgcctccagaatatgtttttccttaaacgcatacgtgataacggaaaattcattcataatatacgccacaagaaccctgcctccgggtctggtcaccctcaccgcctcccgcagcgcagcaagcttgtccttttcctcatgcagatgatacatcggcccaaacaacagggttacgtcaaaggaatcatcggaaaattttttcagattcattgcatttccctgatatgcatgcacgcctgcacccttctgtttcaagcgtcccagattatgctttaccagttccacggccgtcacatcgtacccttcctgtgccagcggtacgctgtatcgtccggttcccgccccgatatcaaggatatggatttcctcttttgcacgttcttttacaatttcgtccagacactgatggatataatgcatgcttgtcacaaattccaccctgccgtgccggctgtccagacgcttctcttcattaaatttattataataggcttctaagtctgtcatattttaatactaacacattttctttaaaatttcactcacaatcgctgatgcgacatccgctttgctcattatttccagttccctgcagtcatctgccgtaatcagcgtcaccacattggtatctgtaccaaatccggctccggctaccttcaggttattcgccacaatcatatctgcattcttttttgcaagttttgcacgggaattctccagcatatgttccgtctccatggaaaatccacacagaaactgtcccggttttttgtgcgcgcccagatatgaaaggatatcttccgtgcgttccatcgtaagagtggcatccccgtcttttttcttgactttctcatcgaccgggtgatccggacgataatccgccacagctgccgctttgataataatatcctgttgctctgctgtctcctttacggctgccatatccgcggcagatacaaccggaacgacctttacaaacggcggcggagtgattgccaccggtcccgtgatcagcgtcacttccgcgccacggcgcatgcagttttccgcaattgcatagcccatttttccggtagagtgattcgtaatataacgcaccggatcaatcttctcctgtgtcggtcctgctgtgaccatcactttctttccaaccatgtccttttcgcaggcaagatctttcataatataagaaaacagtgtttccggctccggcatctttccggctccggtatccccgcaggcaagataaccactcgccggatcaatgatatgaaacccataatgctccagctttttgatgttatcctgtacgatcggattttcaaacatattggtattcatggcaggggaaacatacttcgggcattttgccgcaagaatcgttgttgtcagcatatcatctgcgattccgtttgccatcttgccgatcacattggcagaagccggcgccaccataaaaatatctgcacgctttgccagtgccacatgctcgacattgaactggaaattccggtcaaatgtatcgaccagacacttgttgcttgtgagcgtctcaaacgtgataggattaataaaattggttgcattttccgtcatgatcacatgcacatccgcatgctgcttgacgagcgcacttgccagataggcgattttataggcagcgatacttccggtcacaccgagtaccacacattttccttttaacattgtctcttactcctttgcagaaaaaatcacatcttctgctattttatcacactttttccctaaaacaattgaatttttgtcatctgttccagtatggaatctttgacagaatcgttcagatatgctggatttaattttctttttgcatatgcaaggtaagaaccatttgtctcttcaatcaaaactgccgtaaaaaaccgctcccagctaaaatatgttttgctttccacatattcccacggcttttccagcacctgatctgcccatttgctttttactacttttgcctttaatatcagccattcaaatgactccggcaaataaagcaccacttgatcttttccaccaatcaactgcatcactctgtcaatttcagaaccaaatgccgcgccgtctgcaattacaagtatgcgttcatttttatgcatatttaaataatggaaaacatttgactttccattcattgtctcacatttcaattgctgttgcctacatacagaattaaaaaactgataaccggaattactgtcttccgttattacaacctctggtttgatatccttctctaaagtctgtgctccatatattctgtaaaactcatgataacacggttttaatgttccgtattttcctgaagtacgaattccatagatttcctccacgctatacggcaaagaaggcaaggattccctggaaataatgacataataattatctgttttctgaatagtatctgcgaattctactgtcttgataaattcgtttccctcatcaataaatacaatactatcctgcattgctgataactgttctttccacagtgagccttcgagcacataacattttttgtcacacgtcagttccacaggggtcccggatggattgtttacgtattcccgaatcatatctaccaatgtggtttttccagttgcgctgtctccccggatgaccgtcagatttcttcgaatttcaaaatcatattttaagcgctttgttgatacaataattctatgttttcccttcat

SEQ ID NO: 387 - DNA, 12540 bp, unidentified
  source 1..12540: mol_type = unassigned DNA
ccccgccattggctgcactgccgcagtcggctctgcactggtgtctgtatctgccggctgggtgtccggctgggtatccggagatgctgtgctgctctccggtacagtaccagtactgccgccggtagtgccggaagaagccggttctgtttccgcgggggtgttattggcagggtcataggagaacgtaccgcccacctgcaacgtgccgtaccacgttccgccgccggagatctgcacaccaccgtcctcggtcaccttgatgttctgtcccagtgtccagtcaccggtagtggtcagctgatcgccgcgtaccagccagccgtagagcacgctgccgctctggtcatacaccacgaaaacggcacactgctttgctgctttcagctgctccagagctgcctgtgtcacaacggtctgaccggtgcaggcaaactgatagggatcatccggcgtgccggtaccggctgccgcctgtgtcagagcgatcactgctgccagtgtatccttgggagaatccggtgtatccggcgtgtccggttcgtctggttcgtccggctcatcggggtaatccggatcgtccggcaccaccggtgcttcttctgatggacgcagctttttcagacgttccagctctttctgagcctgccgcacattttcctgtgccaccgccagtgccgtctgtttctgggcaacttccagccctactgctgtcatatcatagtccagcagcggtgtacccttggtcacatggtcgccctcttttaccagcacctttgcgatcatctggtcgtcggagggcgtgacattctgcacatcaccggaaaccacctgcccgtccatagagagatcatctccccaccagtactgggtcagatttgccactggcaacacatctacgcggttctttttcgtctgctgtgtccggtaaatcaccgtaccgccgacagtgccgccggcaacgactgccaggcaaaccgccactgcaacgatcttttttccttttgtcatgaagcatcgccctcctgttctgtccggcgttctccgaagccgccctgctccagcatgccgtcccgaatggtcacgatccgctgggcatgccgggcgatctccggttcatgggtaatcatgacaatcgtcacgccctcgctgtgcagctgggcaaacaattccatgacctgttcgccggaacgggtgtccagtgcaccggtcggctcatctgccagcagcagacggggctggctcaccattgcccgtgcaattgccacacgctgtttctgtccgccggaaagctgagtcggcttgaactgtatccgttcttccagccccacacgtgccagcatttcctttgcccgttccagccgttcctttttccgcacgccggcatacaacagcggcagtgccacgttttccagcacagactggcggggcagcaggttgaagttctggaacacgaagccgatcttctggttccgtatcgtggaaagctggttgtcgctgcactgtgccatgtcctgtccgtcgaagaaatagtccccgctggtctgcttgtccagcagcccgataatgttcatcagcgtggattttcccgaaccggacggtcccatgatcgccagatattccccttcttccacctgtagctgaatgtggtgcagaacggggacaggttcttttccctgcatataggatttacagatgtcccgcaaatcaagtaccatctgccgcaccgccttccgctgtatctgctccggcttcgtctgccggcatctcgtcaacaccgtcgccggcatcttctcctgctccggagatcacgctgtctgcggtgtcgccgtctgcaccgtcgcctgccatgccggcttcatcatctgctccgccgatcacgccttcgtccacagggtttccgttttcgtcgtaggaaatatcctcattgctgttgtcgtccacggtatcatctgtgccgtcatcttccggtgttgcttcgtcagggttggtcgtggttttcataccctcctgataggaatccgacgggaatgcgatcatatcgtcctccgacagaccgcttttgatctcgcagtcgcccatggtgtcgtctgtctgtcctacttctacttcccgcttttccagacggtctttcttatcggcagcccagacataggtcttgccgttttcatcagtctgtacgtagtcggaatacagccagatgccggttttttcaatgctttcatcggctccggtatctgccgaaaccagcaaatgctgccccagcatcagcccgtcactggaatccagcgtcacataaaaaggatacttggaagcggtggtcatctcatcgctgccgccgtagtacatgttgttgttctggctgttgtcggcttcggtagagatctccgaaatagtgcccgtccagctggaatcgtctacgcgggagtgcagcaccatggcttcatctttataaatcgactgtacattctgctcgctgatcgtgcacttcacacggaattctccgtcggacatgatcttcatcagcacatctgtgccgtccgactgaagctgttcggtcgttttcagagactgcaccgttccggcgatctccgcagtcactgtggcattgttaatggtattctgtaatttttccagttcgatcttcttggtcttgatgtcgtattccgacttggcaatatcggtttgcagggactggatctgcgtggtataagtcagcttatcgtctgcactggcacttttcttttccgtttccagctggctgatctgctgcttgttggactcgatctcattctgcatgcgttcgatctccacattgccctgctgcaattccagctgcatggattccacatcataggtgaacagcgggtcaccggcgttgacatggtcgccctcctgcacgacaatgctggaaactttcttggaggtgtccagcttgacttccttggtttcctgcggttctaccacgccggaaaactgcaagtcggaaatcgttgttgccgcagaattcacatcttttatcggcatcacgtatgccacaccgtccacatcactgcccctgctgtagtgccgccacaccagcacgccgctgacgcataccgccgcagctgtaacaccggcaactgtgccgattatgattttcttggattttcccatattccttcctcccagtccatgctccgcagcagtgcgttctgccggcggagttttttgaagcagtcctgcacaaatccagggcaataccgcacaaagagcgtctggcgactttgcatgccatctgcttgcagtgtttccctagatgctgatttcatctttttggcagctgtttcaactgttgtattcctcatgcaacggattgcctttagtataccacacctcttgacggttgtcaagaggtttttcaaaatttctgcggaagatttatttgggaaatttgtgcaaaggtgaaaggcgggagagggttgtgcggtgttctcttaaaacggagaaaaatcacctcacaaaattcgcatatcattatcgtgtcacgctctcctaaacagatgctctcacgccgaaatccgacaataccgttccccttccagcacctgctgcatgtacttttccggtgttgtcatgcagacagcactctgaaacgtaaaaggactgcagccggacaccagcactgcaccggtatcgtctttcttcaccggaaactgccggtttctgctgcacacgttccagtagaccaccgcaggcagctgataccctgccgcctgatatgcctgcttcatctgctggaatatcgtcacgccgttgccggactgctcgtcgaattccatgtccgagatcacatagatcactttcggcagttcctccggcggcacgtggtgctgaactgcactctgaagtatcagacgaaatactttttccagatcggtattgctgacttcattataggacatacagtgctccaccttttgaaaaatgtcctcccctttcagggcaatcaagcgggggttgtcggaaaaggtgatgaagtggttgtggaaatatccctcatttcgttcggcacagtaaatgcccagcgaaacggcaacatgaatcggcagcacatcgctgaaatagttccagtacatggaaccggaaccatctaccacggcaatggcattctgttccggcatataatccggcagggacttccatgtcacgtccagtatccgctgtttttgtgcaatgtcatcataaaacattgcgttttcctccaactcgatgcagtcccgaacgatctcataggggaaaagctgacctgctttcaacaatcccttttcctgctctgcccgttccagaaactcggagtaccgctgtccgtcatgcttgcagaatgctttctgatacttgtacaaggctctggagggcagtttggcatagtcaaaggtgtagtccttctggcaaagccgcttttccagcacgtccgcataggtgcgaagctgggagagcattttccggtaagccttttccgaaagatgcagccgcttacagagcagctttgcctgccggcacacgttctgattggaggtgtgcacagagggcagccacttcgccagcagagagatcggcttttcttccagcatgtcctgttggtcttgctgtagctgcttctggatcagctgtatcagttccggctcacagggcgtgttcagcaataccatacaatcgtcaaaccgcccgtactccggaatccactgcaaatttttccggacactttcgggatagatcgctgccgcatattgcagcagctgccggaacacgctccgttcacccaatccgccgcgggtatcccgcaggtaaaacaggatccgcatcgcgtataccggattctctgcatatgccgccaagaacatgtctttcaggcgttttgcagaagcttcccgcaacgcaccggctgtggaaaacaggttcagacacgcatcgccggtatcgtgatacgccagtgctccgttttcggtgtttgtccagttcagttcctctgataatgcattcagcatgaaaaacacgtcctttcttgttatgtactgtacgattgttgaaaaagccccacacgaaaccggtttcatggcttcgtatagggctgcctaaatgctccacgatgctgtttcgatggagaacccatctattcaattttaggcaataccgcacaaagagcgtctggcgactttgcacgccatctgcttgcaaatttcccgtcatatttcacaaaaatgctcgtgaatacatccagtattcactccgctttttgtttcatctgacgaaaaatttgacgacgcatctgtcgcacaatctttgtgcggtattgcctttaaaaaggaatcgcaaaaaaacgccatacggctgcatcataagaatgacgcaaaaacaaaaataaacaacattcataaaatattgctgtaagcatcgttctgagcgataatttaagctgcacacagtgcagcagtgtcggtatatttcttctgttttttctgagctttcagtttggttttctccagcaactgcatgccgtgttccgcttccagataccgcagcatcagaatgattcgctcctgaatcttctgccggtgcgtgtcccgactgttgcggaaaataacgtccagcggctttccgccggagaattcctgacagatcttcttggaataataccgtgtagaaaacaggtagaattcctctgcacctacaagcagataaaactgcattgtgccgcgttcttggttgcggcagatcaccttgcaattgctgttctttctcatgtaaaatcctcctttgaaaatgataatacacatggctgtgcctggcttacttctatcggaacgtcacccaatgccgaaacttgtccacgatgctgttttgacggagaacccatctatttaattgtaaagggaatcgcaaaaaaacgccttacggctgcatcataaaaatgacgcaaaaacaaaaataaacaacatttataaaatattgctgtaagcatcgttctgacaagggaaacacggcacaaaaccgtcaggcgggcttgatgcagcgttttccaaggtttccaacgggattttctcttgtgctgtgcacaatttcggcagcaggtacgcaagtctgacgaccgcaatgcatactatctgctgcatcaaatctttgggtgtttgaggcgtgatatgcaattgtcaagatgcaggaaggaataaaaaaaggaatatttatttaaaagcagacataacaaacccgtaattacactagggtttcatcacgtcattctacttttaaataaatattccttctctcgcattccttcctcgaatttgagattgtttttattatatcacatctcgaccgatttgtcaagccttttttcaaattttttggaaaaaaatcgaaatggctcaaattccggagaatccaagccattctgtttctcgattttgttttcgggtgtgttgacacgaagcctgacacgtgtcttttggggtgaccccctagaaattcgatccattccagccccagtgttctgtcatggcatagctgacatatacccgatcggtgggaattttcagcgtatccagcagaataccggtaatgtggctggtcagtgtttccagagcattggcggaagcgttcccgtacaggctgacttctgcaatcgctgccggttcatttgtaccgcggaaaaacagctggcggttgtcctcgacctccaccatcagccagtctgcgattttccccggaattgccgtgatcgcaagaccgagatgcttctgtatggtgtccgccgttgcagcgggcacggcacagttggttttcaacttgataaatggcatagcttttcctctcaatctctgcggaaaatatctctggtatagactttgttctccacatcgtccagacaggcatcataccggttggcaatgatcgcatctgccgccgccttgaatttttccagatcgttgaccacaacgctgccgaagaacgttgctccgtcctgcaatgtcggctcgtagataatgactgtagcaccctttgccttgacacgcttcatcacgccctgaatcgaggactgccggaaattgtcactgttggatttcatagtcagacggtacacgccaatggtaacctgcttttccgtgccggcattccagtcgttgttctggctgtaatcatagtaccctgccttttccagcacgcggtcagcaataaaatcttttcgtgtccggttggattctacgattgccgacatcatattctgcggcacatcggcatagttggcgagcagctgtttggtatccttgggcaggcagtagccgccgtagccgaagctggggttgttataatgcgttccgatccgcggatccaagcatacgccgtcaatgatctgctgcgtgtccagtcccttcagttccgcataggtgtccagttcgttgaaataggacacgcggagggcaagataagtgttggcgaacagcttgactgcttctgcttcggtgaatcccatgaacagggtgtcgatgttctccttgattgccccctgctgaagcagtccggcaaaggtgtgagccgcttctaccagtcttgcatcgtccatgtccgttcccacgatgattctggacggatagaggttgtcatacaacgccttggactcccgcagaaattccggactgaagatgatgttcttactgccggtcttttcccgaatgctcttggtataacctaccggaatggtagacttgatgaccataatggcattcggattatactgcatgacaagggcaacgaccgcttctacagcactggtgtcaaagaaatttttcttgctgtcatagttggtcggggcagcaatgaccacaaaatctgcatctcgatatgccgcttctgcgtccagcgttgccgtcagatccagttccttttctgcaaggtatttctcaatgtaatcgtcctgaatcggggactttttctggcggatcagttcgaccttttccggtatgatgtctaccgccgtaactttgttgtgctgggcaagcagtgtagcaatagataatcccacatagccggttcctgcaactgcgatattcatggatcagaatcctcctcatttctgtactgtgtcacctatatagtataccactatttttttacattttcaagaagtttcccgcattctcatgaaaattcgtttcaaaacgcccccagctgccgtctgatccacgccgtttccagcacatcgtagacatactgattgggagaaccggtttcaaaatacctttcggaattgccgcccagcatttccacagcaaaggctcccacggctctggaacgggattgtccgccgtagcagtgcaccagcagcgtttccacagaccgatgtgccagaacaaatgcaataatctgatctgccatttcatcggtaaacaaaactgccccgtccacctctcggataatgtcatcaaagtacagcgtcagaacacccttgcagaactggttctcgcaaaactgaaatccgaatccctgcgtgtgcgtatcctgaatcgaaatgactgcatacgtatcctttcgttccgccatatccgcctgtccgaaacagtagaaatgctgcataacatattcaaaggcatcatatacagactttaccagaacccgtttcatgctctgttcaggctttcaaacaccatggttgcctgaatgcggtcaccgcccagaaatcccttgcttccggaagaagaagtggtgatcgtgtgcagacggtatcccttggcagcctgtgcgttgatgaccttttccagttcagacagatttccggaaccggttccgatcagcttctccttcagaacgacctgcaaaacaacataatttggcacataaattctcctttacaaaaatatagatatattataacataaaactccgcatatgtcaatattattatttgcatttttccgaattttgtgctataatatacatatcaaatttattgcacaggaggaatttccaatgtgtaccgctgcaacttatcagacaaatgatttttattttggcagaacgctggactacgaaagttcctacggggaagaaatcgtcattgtgccgcggcagttccggctgtcatttctgcacatgggcgtatctgcacagcactacgccatgatcggcactgcacacgttgcccagggctacccgcttttttatgatgccgtcaacgaaaaggggctttgcatggctgggctgaactttgtgggcaacgcctgctacgcctcccgacctgcagatcattcggacaatgtggcacagtatgaattgatcccgtggattcttagccagtgctccagtactgccgaagccaaggaaaaagtggaaacgctttgcctgctgggcacgccgtttcacgaaaaaatgcctgcggcacagctgcactggctcatcgctgacaagcaccaagccattacagtagaagccactgccgcgggaattcaggtctatgacaatcccgccggtgtcctgaccaacaatccgccttttccggagcagatgttccgcctcaacgactttctgcacctctctcccaagcagccgcagaacaacttttcggacaagctgccgttgcagacgtacagcagaggcatgggagcactggggcttcccggtgacctctcctcccagtcccgctttgtacgagcagctttcgtgcgggcgaatgccgtttccggcagttctgaagcggaaagcgtcagccagtttttccacattctcggagccgttgaccagccacgcggctgctgcgaagtgaaagacggacagtacgagatcaccatttacacttcctgctgcaatgccgacaagggcatctactactataccacctatgaaaatcaccagatctccgcagtctgcatgcatcgggaaaatctggacagcgaccagttatgccgctatcccatgcagaccggagaacagatctgttaccaaaactgaaaggacaacatcgatgtcaaatgtaaccaaacgtgctctggaacaatccctgaaaaatctgctgctgaaaaaaccgctgacaaaaatcactatcggcgatattaccgaggactgcggcatcaaccgcatgaccttttactaccatttcaaggacatctacgaccttgtggaatgggcttgtctggaagatgccagacgggctctggacgaaaaaaagacctatgacacgtggcagcagggacttttgcaaatcttcgaagcagtacaggaaaacaagccgtttatcctgaacgtctaccgctgtgtgcatcgggaacaggtggagaaatacctacagccgctggtagaccaactgctgctggacgttatcgacgaggaagccgcaggcatgactttgcgggacgaggacaagcagtttatcgccaaggtctacgcctatattttcattggcgtgatgctggactggatcaagaacgatatgcgggaaaatccgcaggagatcgtcagccggctgggaaagctgctgcaaggctccgtcaccgcagccatttcgcggttccggttataaaggaaacactgattttatcattttcgcatttttgatagaattttttacacttttcggctctgtgatgaattttttatcacggagccttttttgctgattgtgaattcctgaaaatcgggtataatagaattataccaatggcaataccacaaaaaattatttttataactatttttattttataaggaggcattgttatgtattattccgcaggaacttatgaagcattcgcacatccagaaaagccgaaaaatgtggacaaaaaatccgcgtatatcatcggcaccggtcttgccggtcttaccgcagcattctatctggtacgggacggacagatgaagggagaacatatccacctgttcgaaaaactggagcttgccggcggtagctgcgacggacgcaaggacatcaccaagggctttttcatgcgtggcggacgggaaatggacaaccactttgaagtcatgtgggatacattccgcgatgtcccctctctcgaaacgccggacgtttccgtgctggacgagtactactggctcaataagcacgaccccaactattccctctgccgtgcttccgttgaccgcggcaaagatgctcacaccgacaagaaattcgctctggacaaggcatcggctctggcactttccaagctgttcctgacaccggaaaaagatctggaggacaagaagatctcagatgttctgccggacacattctgggacaccaacttctggctgtactggcagaccatgttcgcctttcagcgttggtccagtgcgttggagatgaagcggtatctgtgccgctatgtgcaccacattgacgggctgccggatttcagtgcactgcggttcaccaaatacaaccagtatgagagcatgatcctgccgctggtgaaatatctggaagcccatggcgtacagatcgaatatggcatggacgtgaagaacgtcatcattgaaaccgtaggcagcaaaaaggttgccaagcagatcgtataccggaaagacggcaaagaacagaccattgacctgatcgaagacgatctggtattcatcaccaacggctgctgcacagacacctcctgctacggcgaccagacccacgcaccggatctgtcccacctgaaaaacggctgcggagaatcgtgggatctgtggaaagcgattgcggctcaagcagttcacggcgaattcggcaatccggaagtcttttgcagcgacattgatgcgacaaactggatgagtgccaccgttgccaccgcagatgaggagatcattcaacatattatcaacgtttgcaaacgggatccccgtgccggcaaagtcaccaccggcggtatcgtcaccgtaaaggacagcaccgacaactggtacctctcgtggacgatcaaccggcagccccagttccactcgcaggacaaaaacatggtgctgatatggctgtattccctgaacaccaataaagagggaaactatgtcaaaaaggcaatgcgggactgcaccggcgaagaagtttgtcaggaatggctgtatcatatcggcataccggaagaaaaaattgcatcgctggcgaaaaacgcctgcaacaccacgacctgtttcatgccgtatatcaacgcctttttccagccccgcaaggaaatcgaccgtccgcgtgtggttccggagggagccgtcaacttcgcctttatcgggcagtttgcagaaacacctcgtgacaccattttcaccacggaatattccatgcgtaccggtatggaatctgtctacaccctgctggacattgaccgcggtgtgccggaagtctggggcagcaagtacgacgtgcgggaactgctgcgtgcctgctattatgccattgacaaaaagccactcaccgacgaagaactttcctttgtggaaaagaagctgctcaagatcgttctgaaaaaagtcaagggcacggatattgaaatcctgctgaagaacagcggactgatcgaataa

SEQ ID NO: 388 - DNA, 8135 bp, unidentified
  source 1..8135: mol_type = unassigned DNA
  misc_difference 2821: note = a, c, g, or t
  misc_difference 2822: note = a, c, g, or t
  misc_difference 2823: note = a, c, g, or t
  misc_difference 2824: note = a, c, g, or t
  misc_difference 2825: note = a, c, g, or t
  misc_difference 2826: note = a, c, g, or t
  misc_difference 2827: note = a, c, g, or t
  misc_difference 2828: note = a, c, g, or t
  misc_difference 2829: note = a, c, g, or t
  misc_difference 2830: note = a, c, g, or t
atggtctttgcattgatcggaaaccaaaactgcggcaagaccacgctgtttaaccagctaacgggcagcaaccagcatgtaggtaattttccgggcgttacggtggagaaaaaagaaggcgtcatcaaaaaggccaaggatgctacggtggtggatctgcccggcatttattcgctatctccctatacagcggaggaggtcgtaacgcgtgattttttgatacagggtaagccggatgccgtcatcaacatcgtggacgcgaccaacatcgagcgcaacctgtatttgacgcttcaggtgatagaattgggcctgccgatggtgctggcgctgaacatgatggacgaagtgacctcttcgggcggcagcatcgatataaagtgcctggaagaggagctgggcatcccggtggtgcccatttctgccagcaagaacgagggcgtcagcgaattggtggatcgcttgctgcgcgtggcaaagagccagacgaggcccaaaaagatggatttttgcaccaacgaggtgcaccgtgccattcactcggtggcgcatttgattgaggaccactgcgcagctgccggcattccggggcgctttgccgcgacccgcctggtggagggagacgagcccaccgtgcaggcgctcaagctcaaccaaaacgaggtggagacgctggagcatatcgcccgcgaaatggaggacgcgctgggcatggaccgcgaagcggcgttggcggatatgcgctaccaattcattgaaaaggtgagcgccaaggcagtgcataagcccagtgagaccaaagaacagcagcgctcggtggccattgataagatactgacgcataaatattttgccatccccatcttcctttgcatcatgggcgtggtgttctggatgaccttcggcctggtaggggcgtttttgagcgatattatggaaaccggcatccaggttgtgacgatgtggacggatacgttgctgacaaacctaggcatcaaccagatggtgcattccctcatcatagacggcgtgtttgccggcgtgggcagcgtgctgtcgtttttgccgaccatcgtggtgctgtttttctttctatcgcttttggaggacagcgggtatatggcgcgcgtagcgtttgtgatggataagctgctgcgcaaaatcgggcttgccgggcgttcgtttgtgccgatgctcattgggtttggctgttcggtgcccgccatcatggccacgcgcacactggccagcgaacgggatagaaaaatgaccatcatgctgacgccgtttatgtcttgcagcgccaagctgccgatctatgcggtgtttacccaggcgtttttcccggaccatgcggcgctggtgatgatcggactgtatgtgctgggcatgctggtaggcattttatatgggctgatcctaaaacggttttgctttaagggaaacccggtgccgtttgtcatggagctgccggcctaccggctgccaagcggcaagagcattaccctgcatatgtgggaaaaggccaaggactttatacaccgcgcctttaccatcatctttgtggcgacgatcctcatctggttcttgcagagctttgatttccgcctgaatatggtagcggacagcgcaaacagcatgctggcagccatcggcgcgctcatagcgcccctgtttgtgccgctgggctttggctcgtggcaggcatccaccgcgctgttgacggggctgacggccaaggaagcggtggtaagcaccctggccgtgctaatgggcgtaggggataccacggcgttgacgccgctgctttctcagctgtttacgccgctgagcgcattcaccttcctttgctttacgctgctgtatatgccgtgcgtggcggcgctggcggctgtaaggcgcgagatgggatcccgccgggaggcggcgctggccatgctggcgcagactgcgattgcatggttgattgcgtttgcagtacggcatatcggccttttgttggggtttgtataatatgggcgtgctggattggctgctgctcgcagcggtattggggctggccgtgctggccttatggcgctgtcgacgcggaaaaggcggctgcgcgggatgtcagggctgcgcgatggcggatacatgcagaaatgcaaagcgtaaaaagaaatgattttgaaacatgaccgaaatgcggaagccgaggcaggcttccgttttttgtatcgggaaaagggatactgcttagggctgttgctatggcgatggcggatcaagcctgttcaaagctggggaatttatggtaagatagatacagatatatccccagtgggcagaaagtaagcgcagcagaggaaggcgcggcaaagcgctgtatgagaatggaggaacatgcgatgatttttccgatgtatatcgatggcaagtggtttgaaggcgagggccggcagatgcaggacgtcataagcccgggcagcggcgaggtgctggggcgcattccgctggggacgccagaagacgccgacgcggccttgcaggcggcaaaaaaagcggcgcctgccttggcggcgatgacagtatttgagcgggcggaaatctgttacaggattgcgaacaagatcgacgaaaaccaagaggagctggcaaagctgctgaccgccgagcacggcaagccgtaccacagcgaagcgctgggcgaggtagcggcctgtgcgctggcgttccgcgatgcggccgagcagatcaaatggatggacggcaaggtagtggcgctgcgcgataaagatgcgcgctgcctggtgacgcgccgcccgaaggggatttttgnnnnnnnnnncctgccagtattacctggctgccggcattgcagtgggcgatccgatggtgtggaaccctgctaccaccacggcggcggtggcaagcgcgctgatgaagtgctttgaaggcgtaggcctgccggccggcgcggtgaaccttgtgatcggcaagggctctgtggtgggcgacgcgctgagcgcacatccgctgaccgcgggcatcggctttaccggctctactgttacgggcaacatcatctgcgagcgcgccaaatgtaagcatacctccatggagcttggcggcgacggtccgtgtatcgtgttaaaggacgcggatttggacgtagcggcccagggcctgatgaacggcagctttttgaacgccggccaggtatgcaccagcacagagcgcgttttggtggacgacgccattgccgacgctttggtggcaaagatcctggaaaagatgcagacccagtatcagctgggcgatccgtttgatgcaaagaccacgatggggccgatgcacctggaaagccagatcgagatcgtggaatcgcatatcaagcaggcggtggaaaagggtgccaaggtggtagccggcggaaaacggcgcgagggcatgccgacggaccgctattttgagcctaccgtggtagaccatgtgccggtggactgcatgctgcataccgacgaaacctttggccctgtgctgccgctggtgcgttttaaggacgagagcgagatccccggcttggtggatatgagcggataccgcctgttttgcgccatcttcaccaaggatgtaaacaaggcgctgcgcatggcagagcagtacaatttcggcgcaacgaacatcaacggcgcctccaactattgggacccgacaattccggccggcggcggtggcggcagccagagcgggcatggaagaagcggcggcaaatattccattgaggatatgagcgaggagcgcgcggttgtcattcatttgaactaaacgaattcggactctggcagggctttgggccctggcggagtcctttgccttttttggcggaggcacgcggacgagacgtcctaaaaatgccaagaaaaaattgcggaatttgtgaaaaaaagaacacgggagcgttgcattggcccatacattgtgatatatttatcacatagtcaaaatcagaggcagactctcatttttttcaaccaatgtacatcctttaagagtaattaaaaaacggaggaaacgaacatgtccaaaaaagttgtattggctggcgctgtacgtacggcgatcggcaaaatgggcggtacgctgacaagtgtgcctgcagaacagttgggaaccatcgtcatcaaggaagctttgagccgtgcgggcgtaaagccggagcaggtggatgaagtgttgatgggctgcgtaatccaggcgggcctgggccagaacgtggcgcgccaagcggccatccacgccgggctgccggtggaagtgccggccgttacgctgaacgtagtttgtggcagcggcctgaacgcggtgaacatggcggcgaacatgatccaggcgggcgacgcggacatcgtagtggccggcggtatggaaaacatgtccgcagcgccgtatgctgtgatgcaaggccgttatggctatcgcatgaacaacggcacgctggtggataccatgatcaatgatgcgctgtgggatgcgttcaaccagtaccacatgggcatcacggcggaaaacgtggcggagcaatggggcatcacccgcgaaatgcaggatgagtttgcggcccagagccagaacaagaccgaagcggcccagaaggccggcaagtttgacgacgagatcgtcggcgtgcccgtcaagatgaagaaagagaccgtgattttcaataaggacgaaggcccgcgcgccggcgtaacggcagagggcatcgccaagctgaagcccgcgtttaagcgtgacggcggcacagtcaccgcggccaacgcctccggcatcaacgacggcgcggcctgcgtggttgtgatgagcgaagaaaaggccaaggagctgggcgtaaagccgatggcaacgtgggtagcgggcgccttgggcggcgtagacccctccatcatgggcgtgggcccggtggcggcctgcaagaaggtcttcaaaaagaccggccttggcattgatgatttcgatttgatcgaagccaacgaagcgtttgcggcacaggcattggctgtgggcaaagagctgaaatgggatgcggaaaaggtaaacgtaaacggcggcgccattgcgctgggccacccggtaggcgcgtccggctgccgtatcctggtcaccctgctgcatgagatgcagaagcgcgatgccaaacgcggcctggctacgctgtgtatcggcggcggcatgggctgtgcgaccatcgttgaaaaatacgaaggctaagaccccggactttttaggaggcttttgcaatgagcgttgtactgtatgaacaaaaggacgcggtaggcgttatcaccatcaaccgcgaaaaagcactgaacgcgctgaattccgaagtgttggatgctttggatcaaaccctggatcaggtggacctggaaacggtgcgctgcctggtcatcaccggcgcgggccagaaatcctttgtggcgggcgcggacatcggagagatgagcaccctgacaaaggccgagggcgaagcgttcggcaaaaagggcaacgatattttccgcaagatcgagaccttcccggttccggtgatcgctgcggtcaacggctttgcgctgggcggcggctgcgaattgtccatgagctgtgacattcgcttggcgtctgaaaatgcgcgctttggccagcccgaagtgggcttgggcatcacgcctggctttggcggcacgcagcgcctggcccgcaccatcggcgtaggcaaagccaaggaaatgctgtatgcctgcacgcaggtgaaggcggacgaagcgctggcactgggcctggtaaacgcggtatacccggtggaagagctgatggatgctgcgatgaagctggccggcaagatcgccaagaacgcgcccatcgcggtgcgcgccaccaaaaaggctgtcaacgacggcttgcaggtggatatggaccaggccatcgtcattgaagaaaagctattcggcagctgctttgagacggaggatcagaaaaacggcatgacggcgtttttggaaaaacgcaagcccgaaccgtttgtcaacagataaatcggcatttagccctttataaaagattgtatttggaggtacatcatgaaagttggagtgattggcgccggcaccatgggcgctggcatcgcgcaggcgtttgcagtaaccgacggttatgaagttgttctttgcgacatcaagcaggaatttgctgatggcggcaaggccaggatccaaaaggccctggacaaacaggttgccaaaggccgcatggagcaggccaaggtagacgagatcatggcgaagatttctacccatggcgataacgaagctgtggcggactgcgatctggtcgtagaagcggccatcgagcgcatggacttaaagcaggagctgttccaaaagctggataagatctgcaaaccggaagcgatcctggcttccaacacctcttccctgtccttaacggagatctccaaaggcatgagccgcgctgtggttggcatgcacttctttaacccggcaccggtgatgaagctggtagaggtcattgcgggcatgaacaccaaggcagagaccgtagagcgcatcaaagagatctctgtggagatcggcaagaccccggtagaggtaaaggaagcggccggctttgtggttaaccgtatcctgatcccgatgatcaacgaagcggtgggcatctacgcggaaggcgtggccagcgcagaggacatcgatacggcgatgaagctgggcgcaaaccatccgatgggcccgctgtccttgggcgatctgatcggcctggatgtatgcttggccatcatggaggtattggaaagcgaaaccggcgacccgaaataccgcccgcacccgcttctccgcaagatggtacgcggcggcttgctcggacgcaagagcggcaaaggcttcttcgattacaccaagtaagagttcagacggtcctaggactgtaaattttgattaggaggaacgagtatggacttcgtactcagcaaagaacaagaaatggcacgcggtctgttccggcagtttgctgaaacagaagcaaaacccttggcccaagagattgatgagaccgaacgcttccccattgaaaccgtaaagaaaatgcagaaatacggctttatgggcattccgttcgcaaaggaattcggcggccagggctgtgattccctgacctacgcgatctgcgtagaggaattgtccagagtttgcggcaccaccggcgttatcgtttccgcgcacacctctttgggcgcagagccgatcaacaagttcggtacgccggagcagaaggaaaaatacctgattccgctggcaaagggcgaaaagctcggcgctttcggcttgacggagcccggcgcaggcacggacgcggccggccagcagaccaaagcggtgctggaaggcaaccactatgtgctgaacggcagcaagatcttcatcaccaacggcggccaggcggatatctacatcatcttcgcgatgacggataaatccaagggcaccaagggcatctctgcgttcatcgtagaaaaggatttcccgggctttagcatcggcaccaaggaaaagaagatgggcatccgcgggtcttccacgaccgagctgatctttgaaaactgcattgtgccgaaggaaaacctgctgggccaggaaggcaaaggcttcggcattgccatgaccacgctggacggcggccgtatcggcattgccgcgcaggcgctgggtctggcgcagggcgcgtttgatgaaaccgttgcctatgtaaaggaaagaaagcagtttggccgttccatcgccaaattccagaacacccagttccagctggcggatatgaagaccaagatcgaggcggcccgcctgttggtctacaatgcagccaaagccaaggacaccaaaaaacgcttctctgtggaagcggccatggcaaagctgtatgcggctgaggtcgctatggaagttaccaccaagtgcgtacagctccacggcggctacggctacaccagagaatatccggtggagcgcatgatgcgtgatgcgaagatcacggagatttacgaaggaacttccgaagttcagcgtatggtcatctctggcgacttattgagataa

SEQ ID NO: 389 - DNA, 10284 bp, unidentified
  source 1..10284: mol_type = unassigned DNA
atggaaaaattcagtgtcaaaaaaccgtttacggtgctggttggtgttgtcatggtcctgctgctggggttcgtggccctcagccacatgcagaccaacctgctgccggacatcagcacgccgtacctgatggtggtcacggtttaccccggtgccagcccggagcgtgtggagagcgaagtctccgacgtgatggaaaacgccctgggtaccgtggcgggtgtggacaccatcaccgccacctcggcggaaaactacagcctgctgctgatgaagttctccgagggcaccgatatgaacagcaccatggtcaaggtgtccaacaaggtggaccagacggtgtccagcctgccaagcagctgcctgaccccttccatcattgaatacagcatgaacatgaatgcctttatgacggttgccatcagccgcgaaggcagtgatgtctacgacctctccgatttcgtcagcggcacgctggtgccctatgtggagcgcaggggcggcgtgtccagcatctcggccaacggcctcatcgagaagatggtgcaggtgcagctgagccagtccaagatcgacgtcatcaacgagaagctgctagagaccatcgacgtccagctggcggcggcccatgagcagctggaagccgcccaggcccagatcgaagccggccgcaaggagtacgaaaaacagctgaaaaactacggcgacatggtctccgataccgtgatggcccagatgggcaccgaggtgggtgccgccgtgaccaccgtccgggataaggcgcaggccctgctggacagtgtgaaccagctgatcgccgtggtcaacgagccggagatccagcaggcgctgatcgaggtgcgcgatggcctgcagcatgtggtggaccagttcaacgagacgggaatgcgggacattgactccctcatttccatcatcggcgagctgcgcgatatcaccgataagttcaccgttgccctgcagcagctgcagaaccgcctgaacctggaaacgggtgccgacggcagcaccgccgaagatctggcgggcgacctggaagtgcagcagagcatgagcaccatctataaaacgctggaagataccatcaaggccatggacaatgtgcccgagctgatgaacacgttctcccaggcgctgggcagctattccagccagcagctctccgcgtacatgaagtttaccgaagcccgcgagatgctgaacaactaccagacccagtacgacgaggccaacgcccagtatgaggcggccaaggagaaagccctcgccagtgccgatgtggccaagcagctggatatcgacacgctggccaccctcatctacgcccagaacttctccatgcccgccggctacgtcaaggactccagcggaaaatcctggctgctgaaagttggcgaggagtacgacagtgtggccgatatcgagggcgcgctgctgctccatgtggatggctttggcgacgtccgcctctccgatgtggcggatgtggaagtcattgataacgccgaggccagctatacccgtctgaatggcgagcgggccgccgtgctcaaaattttcaagagctccacggccagcgccagcacggtttcggatagctgtctggaagcgttcaaggagctggaggcccagtacgacggcctgaaagtggtcgttctgtccaaccagggcaactacattaccgttattgtcaagagcatcctcaccagcatgattgtgggtgccgctctggccatcatcgtgctggccttcttcctgaaagatatcaagcccaccctcgtggtcggcatcagcatcccgctgtccgttctgttcgccatcgtgctgatgtacttcaccgggctggacctcaacgtcatgacgctggcgggcctctccctcggcattggtatgctggtggataactcggtcgtcgtcattgagaacatctaccgtctgcggggccggggtgtccctgcaccccgcgcggccgtgcagggcgcaaagcaggtgggcatgtccattgtggcctctaccctcacctcggtctgcgtcttcgtacccgtcatcttcacctccgagacggtgcgcaacctgatgcagcccatgtctctctgcatcggctactgcctcatggcctccctcatcgtggccattaccgttgtcccggcggcgtcctccaccgtgctgaaaaaggctgagcccaagaagctggcctggtttgagaaagtgcaggacaagtacggcaagagcctggagtggtgcttccagcaccgcgccatcccgctgggggctgccatcgttctgctggctttctgcggctggcaggtcttctccatgggcatcaccctgctgccggagatcactagcaacgaggccattgtggagatctcgaccacggcggatatgagcaaagaggattcttacgatgtggccgggcaggtggtggaagccctgatggcggtggaccatgtggaagaggtgggcatcaccaccgataccagcgtggccggcatcgacgttggccagctgggccttcccaaggctattaccgacctgctgaacgcggccaacagctacggcagctataagatcaatgtcaaactggatgagagcctctcctccacccagatcgaaaccgcccgtcaggcgctggaagacgccctgggcagcgtggaaaactgcaccggcaccgtggaaatcagcggaatgcaggagctcaccagcatgatggccaacggcctcagcgtcaaggtctacggccccgacacggccaccatcacccagctggccgataaggtcgtggagatggtcaacaacaccgagggctttaccaacgccaccaccggcctgggcaacggcgacgccactattgagctgcagatcgaccgtgataaggtccgtgcctatggcctgaccgtcgcgcaggtgtatcagcagatcgcggcggacctgaccaccaccaccaccgccaagacccccgttgtggtggacggcacttccatgacggtccagatcaccgataacctggaccccgtcaccaaggaaaacatgatgggcattacttttgagaccaccaccatgtctgcggatggcaccaccaccacgggcacctgtcagctcagcgatattgccacctggaccgtgggcacggcccccgactccctgaccagcgagaaccagacccagttcgtcaccgtcacggcggacactctgcccggctacaataccaccgtgcaggcccgtcaggtcaagaagacgctggacgcctacaccctgaccgatgagatgccggagggctgctcctttgacgtgggcggcgagtccggcaacgtcaacaagatgaccaatgagatggtgcagtggctggcactggccctgccgttcgtctatctggtcatggtggcacagttccagagcctgctgtccccgttcatcgtgctgtttaccatcccgctggcctttaccggcggcctgctgggaatgctgctcacgggccagcagttgaccatgatctctctgatgggcttcatcgtcctgatgggtaccgtcgtcaacaacggcatcgtctttgtggactacaccaaccagctccgcctgggcggcatggagcgccgcgcggccctcatcgccaccggcaagacccgtatgcgccccatcctcatgaccaccctgaccacggtgctggccatgctccagacggccctgagcaacgatatggctggacagctgatgcgcggcatgtgcgtcgtcatcatctgcggcctgagctacgccaccctgatgaccctgtacatcgtcccgctgatgtacgacatcctcttcaagaagccgccgctcaacgtggatatcggcagcgaggaagacctggacgacatcccggacgacgcggccgagttcctggcgcaggccaacgcgcaagcataaattcccctgcaaacaaaaaaatcctcatggagcgctccatgaggattttcttttgcaaaactaccaaaaaatctccaaaaatattggctgttaattctaaaaagttctgcccacaagcgtgtgaaactatgatataatcataattatgaaagatacactcaggagtgcgcctgctgggtgtgaaccaaatgatgaggaggcgagcgcaatggcacagtttcgttccaagccttttggcgtgacaaaaagcggcgaaaaggtcaacgagtacatcatctccaaccccggcggactggaagtgcatgtgctgaactatggctgtgtgatcaaaaatatccttgtccccacaaaaaagggcccggtggacgtggtcatagggcatgacaccctggccgactacgaaaacgacttcaactcccaaggcagtacctgctgcggcgcgtttgtggggcggtacgccaaccggatcgagaacgcggtgttcagtgtaggcggcagggcctaccatctggaagccaacaatggcaaaaaccatctgcatggcatgttcccgcgcaagatctacgaggtgaaatcctttggcgataccctgttactggaggcggagagcccggatggagaagacgggttccccggcaatctgaaaatttcggtgcggtatatcctcacggaggacaatgccctgcggatggactaccgggtgtcctccgacgcggacaccgtgctgaacctcaccaaccatacctattttaatctggatggtgagggcgatgtgctgaaccagaagctcaagctctacgcgtcccggtatctggagggcaacaacgagacctgccccaccgggcgcatcctgcccgtggcgggcacgccgatggattttacttccggcaaaccgctgggccgggacatcgacacgggcttttcccagaccaccatggtaggcggcggctttgaccactgctttgtcattgaccgggaccgcggttccagccagagcctgtgcgcctgggccaccagcgagaaaagcggcatcagcatgaagatgtacaccactcagccgggcatccagctttacacgggcaattttttgcaggattgccccaccccgggcaagggcggcgtgccgctgcagaaatacagcggctttgcgctggagacccagcacttcccctgcagtccctcgcacccggagtttcccaccaccatcctccgcgcgggcaaggtcttccgcgccaacaccacgctgcgctttttcaccggacgcctttgaaaagagagaacggaatggccgcccggtcgggcggtcatttttgtgttccgggtgctctttctctcatttgcacaaaaagcgtcttccctccatgggcagggtgcaaaaaaatttgtggctccatcatcgtgcggaaaaagatgcaacaagaatccatccgcataaaatgggcggtacttgattccgcgtgcaaaaagcggtattctttaggcagcaggggcaaggcccttacaaagaatgcaacaatggtgacgagagagaggtttttgcaatggcaattctggtttccggcggcgctggctacattggcagccacacctgcattgaactgttgaacgctggctacgatgtggtggtggccgataactactataacgcttctccggtggtgctggagcgggtcaagcagatcacgggcaaggacttccgcttctatcaggccgatatgaccaagcatgaggatgtggagaagatcttcaccgagtgcccggacatcaccgcggtcatccagtttgcagcctacaaggctgtgggcgagagtgtctccaagcccattgaatactactataacaacctcaactgcaccctggtcatcctggatgtgatgcgccgccacggctgcaagaactttgtcttcagctcctcggccaccgtttacggcgaccccgccagtgtgcccatcaccgaggacttccccgtgggtgccaccaccaacccctatggcaccacgaaggccatgaccgagcgcatcctgaccgatgtctgcaaggcggaccccaccctgaacgtggccctgctccgctacttcaaccccatcggtgcccacaagtccggcctcattggtgaggatcccaacgggatccccaacaatctgatgccctacattgcaaaagtcgctgtgggcaaactggaaaaagtgcacgtcttcggcaacgattaccccaccccggacggcaccggcgtccgcgattacatccacgtggtggatctggcccgcggccatgtctgcgccatccgcaagctggagaccaattgcggcctcttcatctgcaacctgggcactggcaagggctacagcgtgctggatgtcatccatgcctttgagaaagcctgcggcaagaagctcccctacgtcattgaggcccgccgccccggcgatatcgccgagtgctacgccgatccctccaaggccaagcgtgagctgggctgggtggctgagtacggcatcgaggagatgtgcgccgacagctggaactggcagaagaagaaccccgacggctaccacactgcaaaataaaaggattttccactgcgattgtccataacgttgaaaacacccctgtctgccgcggcagacaggggtgtttttgcatcgcggatggtatttcacgataggacattttatgaaatgcggtccgcgacgaaatttgtcgttggcatcccttgacaaaggataaaagttagcctatagtaccattgttaatacagactaacaaatggtcgaagaaaggcggacaaccatgacactgaaagaactgaacatcggcgaaagcgctgtcattgagacggttggcggacagggtgccctccgccagcattttctggatatgggcctgatccctggggaaaaggtcacccttgtcaagtttgcacccatgggtgacccgatggagctgcagatccacggctacgccctgaccctccggttggatgacgcggcccggatcaacgtttccccggcaaaaaccgtccgggtggtgcccgctgcctgcccggaacagaaagtggtagagcaccccggcctgggcgagggcggccgctaccacaccaaaaagggagagaatccgctgccggacggcacgaccctcacctttgcactggcgggcaaccagaactgcggaaagaccaccctgttcaaccagcttaccggctccaaccagcatgtaggcaatttcccgggcgtgactgtggaccgcaagagcggtgcgattaagggccacccggagaccgaagtgaccgatctgcccggcatttactccatgtcgccctattccagcgaggaaatcgtcacccggcagttcctcatcaatgagaaacccaccggcatcatcaacatcgtggatgcgatgtttatacgaggcgggaacgacccggaagataaaaagtgatgaaaaagtccagaagccatgcgggtttctggacttttttcttattcggcggttttgtacgaaaatcgtagttcaatgccgtttttgagcaaaattgaggtggtaaggccatcttttatacaaaagtttgagaccgtttcgttgaggaaatccttgacgattttggggtcgattttgcggatgaaacgctcatagttcacatagcgcttgtccaagagctgctgggtcaggatgaactggctggccttctgcatgaatgcctcatcggaaagcgacaggtcaaaggcattggcgatgtccagctcgttgatgcgggagtctacctcgctgagggcttttgtgatgcgctcacgctcgatgttgaagtctttgcttgccatctcgtcatctccgtagagatagatggtcttcaggcggttgagggcgcgctcaagccggcgcttctcggagagcagcagatcacgttcgctcaagtccgcactggactccgtggccgcgatggtaggagattcaaagcgcttctcatcaaagccgctgcgcaggtggttgtatagttcttcgaggcccggacgctcgatgtggtcaacgcgggaaagtgcttcgccacgcagcagcttcttctccaatgtttcgatggatgtcgttctgccgaaggagttggatacttttatcaggttggcgaagaagttcagtacgaatgggccgagggtcacatcggagacgtacttgttggtgcagtcctcggatttgcgtcgccgggagcagatgtacatagacggtctccagccgtctgcccggaccttatcggtggttgcagccatcgtggagccgcagcagccgcaggtgagcagcccggcgaagacgtggacgttttttcgctgataggtggcattcttgttgtagtgcttgctttccagaatgacaccgacagcagcctgccgttcaggggacacaatggccgggtggtggttctcgaccaatacccattcgtccttgcccttttcgcggaaacgctttgcgttggactcgtcgcggtaattgtaccgatacgttccagagtagaatggactagaaagaatcgtgtggacggtggtcggactccagtcgcttccagcgcgggatttcaggccacgctcattcataatccgagcaacccggacaatggacttttcggactcgtacagggagtagatcagacggacgattttggcctcgtcctcggcgatggagaaggtcttgctctctttgtcgtaggagtacccgtagggaaccttgccgccgttccagatgccatcattggcgcgggacacgaagacggcgctgactcgctcagaggtcgttttgcgctccagttccgcgaagatcaggatgattttgagcatggcttcgcccattgcagagctggtgtcgaactgctcgttctttgacacgaagaccacgccaagctctttcagctcggcgtacatgacggaaaagtccagaaggttgcggctgatacggtcgattttccagaccagaaggtgtgagaactcgccagtcctcatccgggccatcatctgctgatagtctggacggtcggtatttttggcagagtagcctgcatcctcgaaaatcacatagtccgagatgccgagggcatattttgcatagttgatgagttcttctctctggacgggcaggctagcccggtcaacctgatactgcgttgagactcgaacgtatatggcggctttcttttcctcaaagcgttgtgccgccttcttcaccacatagcccattgcggaacctccagaagataatgatagctgaagaaaaagcagctccgtgcgtagtgcggggctgcttttctgttatgcacaaaaaggaatgatagaaattatgcaaaatgtcgggggggggtacacattcagggaatcgacaacggcatcacggaggctgtcatactggacgaggtacgggtcaagttttttcagcatagtgagcgagatggtcttctgagggccacactgctcgtccagaatatgagttggtacgatgtagaaatcccatccatccagtaccagcgggtcggctcgctcgcgcacagtctcagtgtagaggcagaacacatacacgtcggattgccgtttgacctcctcagaataaccgctgatggagtcccaagctctcgttggccggatgctgaactggatgttggacagcctgccatcgccctgccgccatgcctgaagatatgcgcaactcttgacctcgatgcgcacttcatcgcgggcctcgccattacatacccagttgtaggggaaagagatgtcgtagggagtccagtcatcgttggttccgctcagatcaatgcccagcgcggcggatacaatgaactcgcagtaggagcctcgcagggtgttgttgagcaggtctgaggcgttccagcgccagtagtcgctcaaggatttaccgatgggcatatcatcaaagacgataagttcgtccccggtacgttgcttcgtcatgattttcacctcctcgaaaagtcaacccgtatcagcctacgtcggctttttcctcatgttgcatggacgttatgatgacccgctgctccggggtcatatagcggtcgagcagcgaccacaaaacctgccggtctgcgatagacgccttctcgtagcaggcgactaagatgctgacgtcgggcggcgtacggccgacggcgggcagatcggcaccgaccaaaacgtccagcgtcacgccaagtacagaggccagctccacagcggtctcgatgttcggcgttctatcgccggaaacataacgtgagatggtagtctccgtcgtgttgatgcgctctgcgacagcacgctgcgtgaggccgcgcttgtcgatgagttctttgaactgtttggcgaacatggctttgctgtacat

SEQ ID NO: 390 - DNA, 5411 bp, unidentified
  source 1..5411: mol_type = unassigned DNA
tcaaatccgaaagcacttatgcagggctttatactcacccaacgccaaaatcgtaatgtcatcggacaatatggtgtccggcgtaacggaaacatccgtttctcctgcgcgtttgatgccgagaatgttgatgccaaactttctgcggacgttcagctcaccaacgcttttcccgatccacgcctccggcacctgcacttcaaagatggcgtgctgctcgtcgatctctatgtagtcgaaaatatggtcggcagtgaatcggatcgccgcccattttgccacctgcttttcagggtagaccacgttatctgcgccgttgcggagcagaaacttcgcctgcacatcgcgttcggcgcgggataccacgcatttggcacccagctctttcagcagcgaggtggtctccagcgagttctggaagctgccgctgatggtcacaaaacaaacatcaaaatttccgataccgagcgaacgcaggaactccgcattggtgctgtcgccgatctgtgcgttggtgacaaacggaagcacatcgttgatccgttcctcattggtatcgactgccatgacctgatgccccagttgagagagctgcatggcgatatgccgcccgaagcggcctgctccgatcaataaaacatttttcatgggatagatactcctttgcttatccaatcgtgatgctttcctgcggcagctttgcgctgccggttttcttgctggacaccgccgcgtaaatgagcgtaagcccgccgactctccccagatacatcagcgcgatcaataccatttgcgagggaatatgcagctgcggcgtaatacccaatgtcagtcctaccgtgcctaccgccgacgctgcttcatacaggcaggaggacagcggaagattctcgtatacgctgataaaaacgcctccgccaaagaacagggcaagatacatcgtcaggatggtcgcggcggttttgacggcgccgcaatcgactctgcgcccaaagagctgggcgctgtcccgctggcggaaggtcgcggcagcattggcaagcaggactgccagcgtggtggttttcatgccgcctgccgtggagccgggagaaccgccaatgagcatcagaaggatcatcacgctcagagatgcgctggacatggcgggcagatcgacggtgttgaagcccgccgttctcggcgtgaccgattggaacagggctgcctgaatccgctctccgaggggaagggcatcaaaatccgcaaagaagaaaaacagcgccggaaggacgatcagcgtgagtgtcgtgacaagaatcaccttgctctgcattcgataacggtggaagtgcagcttgttttcgcaaatgtcatcccatgtcaggaatccgatgccgccggttatgatcagcagcatgatcgtgatattgatcaccggattttggacataaccggtaagggacggatacaagttattgttcgttcccagaatgtcaaacccggcgttgcaaaaggcggagacggaatgaaacaccgccatccagatcccgtgccatccgtagtcccggcaaaacaccggcagcatgacgagtgcaccgaccagttcgatcagaaatgttccccgcaggatgaaccgggtcagccggacgattcctccgaccttcggcgctgaaatggcgtcctgcatggtgctgcgctgcatcagagagatccttcgcccggacagcagcgcaaccgatgccgccacggtgacaacaccaagcccgcctatctgaatcagcgtcaggatcaccgtctgaccaaagcccgaccaatagctgccggtgtcctgcaccacaagccccgttacacaaacagcggaggtcgcggtgaaaagcgcttcatgaaatggcgttatgcacccggctgttgtggagagcggcagcatcagcagcagcgcacccagcagaataaccccggcaaagcccaatatgataatttgaaaagacgaaaggcggcgctttctgcaaggcatttctcccgtcattatcctcactccttttgaatcgcgtaatcgctttactgtgcgcaggccaaacagacgcggcattgcctgactgtgatgaaggataccctgtacgcgctcagctcggagaccgtaaagtaaatgtcgtatgcgtctgcttcatgttctgaaatagaacatcggctttcacagcttccggtacaaagtaagccggctccagcgctgaacacataacattctcccgccttctgttcacgcaaaaaagacacacctatacccgataccgcagtaaagggcgcaggtatgccgcatatgaacaggccatataagagcggttaaccgttatcgtcgctgctgtcgttttccacggagctcctctttcttactgtgtgcttacatcatagcatttctccagtgtagattcggtaaagaaacaagcgcagagcaataccttcccatgatgccggagaagattgaacggactttccggcgtgcaggcactgcggatgcccggcacagcccgcgggacagagccgtgcttgacgtgcagatcgctggtgcagatggagcccagcgtcacccacacaatggcgtcacgggaatccagtatcctcggcaccggcttgtccagaagggcaaacttgccgcgttctgtgtaggttagtgctttcgtatttatcacccaaaagacagatttaaccgcccaactgcttcagctgtttttccagcttttcgattttgccgctgatactcgtgtattccgtgtaggcagcgaccacatctgcatcattttcaaaggttgggcgctgcgggaattttgcatccagaataaatgtttttgttgcacctgggaaccggacccgaatcgtattcagattatgctccgtcaccattccaccaccgtagagcctggaagtgacggcaacattcaccagcgaaatatccgaaacatccgggagcgacgcccttaaatcctcaatttgggcggtaatatctgcaatccgagcctggcgtgctgccgcatcggcttcctgctgctcggctgcttttttgcgcttctgggattttgcctttgggacgtaggggatttccttatagtagccgtaggtccggcagcagtaaatcaaatcaaacgccagcaaatgcaggctgcgctcctccgcacaatagccgtccctgcggagcttgtcgaaatgctttcggaggaattcaggatgcgctttcagacgctccacgatttcatcgcacatttggtagtatttgctcaggtcaaagcttccgccggacccgatgtcaaatccgtattctccataggcagccatctgggcggcctcgctgtacttgtaaatgtaattgtcctccggtgcatacatggccagatacgcagaggctgcgtgccgatcgtgcttaaaggaccaactgcccggataataggcaatgcgcagccgttccattccgtccaggaactgatccatatgctcctgccgaagcttcagatcgccgtgatcctcggcaaagagaacatcgcagaacaggcgctccacttcggcagaatccttttcgtagagcttcacgacggcattccgtggatgcatacggctgttatcaatcaggaccgaaaagtcctttgtggcagcattgaagcgggaagcaaaatcgggatgatcgtttcggaaccactcccgctggaaggtctttaaggccctccacttaaaaatctcatcatgctcactgccataaagggtgtctatattctcctcatagagatggatgagttcgtctaaaatcgctgcattcattacctgatctcccacatataagtattttcccatgtcaaatcgaccccgctgccggagaagatcggaatcggcccggtgtccgccgtatggcggtagacatcgtcaatgcaaagctggtgcatggctatgggccagccatctgaggcctgccggggcccaccgaagggataccgtgagaccggccggctgcgggcttgactgctggctcattttaccgtccgggctgtttgacaggcctgcatatcaccgggccagctgggccacggcggccacggcggcgtcgatctcctcctccgtgttgaagggggaaaagctaaagcgcaccgcaccctgctcccgggtgcccagagcctggtggagccggggcgcgcagtgggcaccggggcgggtggcaatgccccagccctgcaaaagcgcatcagacacctcgccggaatccaggtcccggatgttcagggacacgatggccgcccggcaaggggcggaaaagtcgccatacacccggacgccgggaagctcccggacgccccggtaaaaccgcagcatcagcccgtgctcccgggcgtacaggctttccaccccctctgccagcaggtattccagagcggcgtgaagccccgccaggccatgactgttcagggttccggcctccaggcgggtgggataggcggcaggctgatccctgtcgaaggagtgaacgccgctgccgccccgcagcaggggccggacctccacccccgggcggatacacaggccgccggtgccctgggggcccagcaggctcttgtggcccgtaaagcacaccacgtccgcccccagggccgtcatgtccaggggaatggctcccgccgtctgggacgcgtccaggatcagcagcgcaccgcggcggtgggccatggcggcaatgcgggggatatccagcacgtcgccggtgacattggaggcgtgggtacataccacggcccgggtattgggccggaacagcctttcaaaagcatcataagaaacctgcccgtttttgtccgccgggacaaagctcagggccattccctgccgctgcagggcatacaggggccggagcaccgagttgtgctccaggtccgtggaaatggcgtggtcccccggggacagcaggccgcatatggcgatgttcagagccatggtggagttggcggcaaaaaccacatggtccggccgggggcagcccagcagccgggccgccaggcagcgggtatcatacaccgtccgcagggcggacagggacgccccatgagcgccccgggcggcgtttcccaccttacagatggcctctgccaccgcctgggccacctggggcggcttgtgcagggacgtggcagcactgtccagataaatctccgtcatcagaacatctccaatacgcagcaggggccgtggccgatgccgttttcatccagcgccgccgtcaggacggtttcgtcgccggggtccgccttccaggccaggccgcacccggcggaaatgcgggacggcagcgggatgatgcgccccggcagagacagccgcccgaacagggcctccgccgccagggcctgggccgtctcctggaaggagatcaccagggccggggtccgttggcgggtcaa

SEQ ID NO: 391 - DNA, 10560 bp, unidentified
  source 1..10560: mol_type = unassigned DNA
atgaaatggaacaaagtcgttttcaaatttgtcagtatcagcttttccatcctggttgcactgcttgttgtggtgggactgattgaacttggctcctactgctatgacttcggataccgggtgtttaccgagagcccggtggacgaaactccgggcagggatgtgaccgtatccgtgacggcggatatgtcggagcatgatatcggaaagatgttaaaagaagaggggctggtggaggatgcgaatctgttctatgcccagctgaaactatctgcttactccggaaaactcaaaccgggtgtttacacgttaaatacctcgatgactgcgcgggagatgttcgtgatcatggcagcggatgccggtgatacggaaagtaccgaggacaccgagggtaccgcagacaccgggaataccggggcggcggatctgacagatgagacggacgatacacagaccgcagaagatgcaggggatgcagaggagacaccgtgatagtagatgagagacttgtgacctatatcaattctctggatgcgggaaatactgcgatgctcgatcagattgagcgggaagcgacagccgattacgtgccgattattcggaaggagatgcagagctttttgaagtttctgcttgccatgaagaagccggcacgtattttagaagttgggactgcggtgggattttccgccatccttatggcggagtacgatcctgtgccgtgtcagattacaacgatcgagaattatgaaaagcggattccgattgccagggagaactttaagagagccgggaaggaagcgcagattgcgctgctggagggcgatgccgcggaagtgttaaagacgctggaaggttcgtatgattttatttttatggacgcggcaaaagggcagtacattcatttcctgccggagattctgcgtcttctggcgaaggacggcgtgctggtgtcggacaatgtgctgcaggacggcgatgtgatcgaatcaaggttcgcggttacaaggcggaaccgcacgattcataagcgcatgcgggaatatctgtacacgctgacgcacagtgaagaactggtgaccgcggtgctcccggtgggagatggcatcaccttgagcacaaggcgttaaggacggcatggattacgcaggatgggaagatggcggaatccgtgcgggattacatgaagcatgaagatgcgatgcatgcgtgtgagaatagagaggaacgagaatatgagaagaccggagttactgataccggcgagcagtctggaagtattaaaaattgctgtgatctacggagcggatgcagtatatatcgggggcgaagcgttcggactccgcgcgaaagcgaagaacttttccatggaagagatcagggaggggattgcttttgcgcatgcccatgatgtgaaagtatacattaccgccaatatcctggcgcacaacggagatctcgacggtgtgagagagtattttgccgagcttcgggagataaagccggatgcgctgatcatttccgatccgggggtctatatgattgctaaggaagtctgtcccgagatcgagcgccatatcagtacgcaggcaaacaacaccaattacggtacctaccggttctggtatgagcagggggcaaagcgcgtggtgtcggcgagagagctttcgctggctgagatcaaggaaatccgtgccaatattccggacgatcttgagatcgagacctttattcacggggcaatgtgcatctcctactcgggaaggtgcttactgtccaactattttaccggaagggatgccaaccagggagcgtgcacacatccgtgccgctggaaatacgcggttgtggaggaaaaacgcccgggagaatacctgccggtctatgagaatgagcgcggtacttatattttcaattccaaggatctttgcatgatcgaacatattccggaattgatggagtcgggtattgacagttttaaaattgagggtagaatgaagacagcactgtatgttgccacggtggcgagaacatatcgaagggccattgatgactacaagcagtcgtcggagctttacagggagcatatggcgtggtatcaggagcagatttcaaactgcacctaccggcagtttacgactggatttttctttggcaaaccttcggacgaagcgcagatttacgacaataacacctatgtgaaggagtacacgtatctgggcattgtcggagagcggaacgaagagggactctaccggattgaacagcgcaataagttttctgtcggggagagcattgaggtcatgaagccggatggtgccaatatcacggtgactgtgcagcgaatcgtggatgaagaggggaatgatatggagtccgcaccgcatccgaagcaggtgctttatatcgaccttggacagccgcttgccatgtatgacattttgcgaagaaaagaataggatggtggaagacgatgaagcaggagaagtatgttgcatatgtaggaacttatacacacgagaacagcgtaggaatccatatctatgatgtagacgttgaggcgggaaaactgacggaacgtaaggtggttccgatcaacaatccgtcggatctggttgtctccaaggaccgcagatttctgtattccattgcggatgagggtgtggaatccttccgtattgagaaggacggcgatcttactccgatcaacaagcagtggatcggcggaatgagaggctgctatgtggaagtggatgacggcaaccgctatctttttgtgggcggacatcatgacggccgtgtgagcatgatgcatctggaagcggacggaagcatcggcgggatcgcggacggtattttccacaaaggaatcggaagaagcattgcacagcgcaacttcgtaccgcatgtggactgcgtgaagctgacgccggaccagaagtttctgtgtgcggttgacaacggactggatcaggtaaaagtctaccgcgtggattatgagaacggtaagctggagctcatcgacattatccgtggaccgctcgagtctgcaccgcgtatgatccgtttctccagaaacggcgaatatgcatacattctctatgaactgctcaacatcgtggaggtatatcattattctgtgcaggataatgagccggtatttgagaagatccagaccatcagcacttccccgaagaaggaggaggatacttgtgcggcatcgggtatggagatctcgaagagcggtaagtatctgttctgcagcaatgcaggcgtgaactctgtcgtgtgctatgagatcgaggagaagacgggaatgctcaccccggtatttacgacgaaggtgaacagcgattacccgaagatgcttgccatctatccggatgagaagcattatctgacactgaacaacaattccaacgatattttcagctacacgatcgattacaaggacggttattcgcttgagaccggttccccggtgaaggtagacaagccgaactgcatctatatgctgaagcttgaggtggaataagcaaataaagtgcgaatcaggaactgccgcaataagcatatcgttctttggacgataagtaatattacaagaaacacacttgagaatttcatgtggaaatgcagatggaatattcgttggagaaaaatgtgagcatttcttccagctgaatgtttgcatcggattccgtgtctcttccacgtttggacaatccgacgggtgcatgtccggcacaccggagacaatgggcggactttctggtgtccctaatggcacctcttcacagacaatataaaaccgcgcgaaccgaaactcgttgccatctgctattaaaaacatggcagatgacaattcagacatcggcttcgcgcggttatgtttgaagtgctatactgaattttcggctttaatggtaattagtttcatagtgtatatttaatgctccttgtaagatactaactgcattctacatctaagaataaggataggcaagattatcgtttacaaaagcattctggtgatttgacatgaaaataggaacaaaaacaagaatttttccacacataaaatgaatcatatttctataataaatgtcaagaaagagagggcagatcaatgaaaacagacgcacgagttcgctacacagtacatatgattcagaatgtttttctggaacttctaaaagagaaaccagttgccaagattacggtaaaggaaatctgtgaacatgcagaaatcaatcgcagcacgttttataaacactatcaggatgtgtatgatcttatggaaaaactggagaatgaagccgtagaggcatttgaaaaattattggattcctatgtacagaacgaaactgtaccggcattagtcactctgctgacctcactccgagaaaatcgagaacttcttttgccgttgcttgcaaattcttcgaatgatgattttatgaaacggcttacggatgcctgttccggatatgcgttatctcacctcacaccggaggcggactatacgagtaatccaaaacaggcggccgtctatgcttatcttgcaggaggaacatcaggaatcatcagcaattggctggaaaccggtacacaggagcctccgcagcaggttgccgaattgattcagtcgttgaatgaaaccgtgttgacggtattggttccctgaagttttccaatttccttcaaccatgcaatctcatctcgaatcgtctcatggaaaggtctggtcttgtagccaagatctttttttgcttttgaggagtcgaaagcattatttcttgacagattataaatcatgtattttgtaagtgcaggtgtggagcccttcttctgcgcctgcttttccaatatatttgcaacgaaagaagccagtggaagaggaaggaagaagagcggacgtttgcagcgaccttcttttgcaacaatgtttgcaaattccggataagtaatgacttcatttgccagaatatagctctctccggattttccattttctactgccaggatgactgcgtttgcaaggtctcttacatcacacaagttaaaggttccgttgattccgatggcagcttctccgttcatctgtttgagcagtccatcggttacctgtccgattgcattgtctccaggtccaaggatgccgcttggaagtacaaggcaggcgttcagatgctggttctttactgcatctaacacaagctgggaggccattgctttggattttccgtaagcactgatcaccggttccggatcgtaatagctgatttctttcattacggagcctttcggcgcttccggaatggaaccagtgcttcctacatatactaactttttgcattctttatgctccagacacagatcaataatattctgagttccgcctacattgatgtccatcacaatcttcggcatctccatgccgagtgcaacgatgcttgcacagtgcagaaccactgtttctgtatccgcatctacatggaagaaagtttctaaagatgctttatctctgagatcaccttctacaatctctacgtcctttggaatgtattgaattgcaggatcgttcggcagtacaaatgcacgtacgctttcgttctgctccaacagctgtctgcatacttcacttccgagatatcctgccgcaccggttactaaataagttcttttatttgccatgataattcctcctgatatttgtgaataattctaccggatcttgctgctgctcatgagatggatgcgaacagcaacaagaggtgtttctgtttttttgggggggggtacaattgccagtatagcgagaatgaacagaaactcaatcatcaatgtggaaggaaatgtaaaataatcgacaagggagaagaatctgttggagaagtgggcacggatgatgaaattgatgttataatattaagaatgaatttactaaattactgaatagagggaagtatttgaaataatgaagaatatgaagttaaccgaaggacctattgtgaaaaatatgctactctttgcattaccgatgatgctgggtaatttcttgcagcaaatatataatatcgcagatatgtttattgtgggacggtttatcggttccgacgcattggcggcagttggatcggcatacacattgatgacatttttaacatcgctgattatagggctgtgtatggggagtggagcattattttgtgggaatagtctttatatttttgtataatttctatgcgtatcttttgcgctcagtaggaaattcgattgtaccattatattttttggcagtatcctcggttttaaacgttgttttggatttatattttgtgatttccctaaaaatgggaacgcccggagcagcgattgctaccgtaatttcacaaggaactgcgggaattggctgtctgtttcttctgtatggattttacagagggattgggcgtgcagaaatgtcttttatactgactgtcatttctcttggaacaagagttgtattagcttatgtctttgcaccgattatcggcgtaacagcaatttggtgggcaattcctatcggatggcttctggcggatacggtgggactgatatattacaaaaatgcctccctatcatatattgacagggaaacactttattcaaatagaaaatcataaagttatgaaccgtgtagccttttttgggtgctcctgtagttttgcttgaaacgagcaaagctacgggagcatttttattcgctatctttatatgtccggaattagaggacctccttattccgaacccaattatagtcaggtattccctaaaaagtaatacatgttcttaaaatcgagaaaagataatgaaaatgctaacaaaaacgtgaattcctattcatggaaaaaagtactttgagatattctatacttgaaaataggaaagctgtaaagggcagcataattgaaatgaaaaaggagagaacgaaatgatgaatacattaccacaagattttctggtaggtgcagcaactgcagcacatcaggtagaaggtaacaacatacacagcgattactgggcaatggagcacatgaaatacggaaattttaatgagccctctttagatgcggtggatcattacaaccgttatgaagaggatatcaagatggtcgcagaagccggtctgaatgcatatcgcttctctattgaatgggcaagaatcgagccaaagcagggtgtctatgatgagaacgagattgaacattaccgtaaagttcttacatgctgccgagaaaatggggtagagccgatcgtgacgatgatgcatttcacatctccaaaatggttgattgagaatggcggttgggagaatgaagcaaccgtagaggcgttcaagaactattgtcagtatgtaacagagcagttgggcgatctgatgcattatgtctgcaccatcaatgaggcgaatatgggaatccaggtagctgcaatctccgcacgttacagagcacagatgatggcaaagatgcagcgaatgcagcagggtggagcagaagagaaaaaggatctggaaggaactgctcaggttggaatgaatttcaacgacatgatggcaaatatgcagaaacagaaagaagagaacgtggaaatattcggaacagatactctccagacatttgtcagtgcaagaacaccggagggtgacatgcttgtgattcgtgcacatcaggcagcaagagcagctatgaaagcagtaaaaccggaacttcagattggtcttaccttatcactgcatgatattcaggcacaggaaggcggagaagagacagctgctaaagaatgggtggatgaatttacacactacgttccttatatcaaagaggatgatttctttggtttacagaactactcccgttcactcattggaccaaacggaattcttccggttccggagggagcagagatcacacagatggattatgaatattatccggaaggcttagagcatgtgatccgcagagtatatgaggaaatgccgatgccgatcatggtgacagagaacggtattgcaacagcagatgatacacgaagagttgcttacattcagacagcgatgaaaggtgtggagaactgtattcaggatggcattccggtcaaaggatatatgtactggtctatgatggataatttcgagtggcagaaaggattcggaatgacatttggtctgatctccgtagaccgcacaacacagacacgtacagcaaaaccaagtcttactgtacttggaaattatacaaaataatgaaaggtaaagattattagaatatgagaaatgtaatgaaattaaaagacaactggatgtttgtgaaagaagcagagaatgcagcagatgcagcatcaaagaaaggaactgcagtaagtcttccgcatacatggaatgccgtagacggacaggacggcggcaatgactaccacagaggtacctgctggtatgtgacaaaatttcagaaaccggaattagaagcaggaagtcaggtatatgtggaattccttggtgcatctgtgatcgcagatgtctatctgaacggagaagcagtggcacatcacgagggtggatattctacattccgtgtgaatctgacagataagctgcaggaagaaaacgtgctggcagttgccttgaataatgcagacaataattatgtgtatccacagaaagcagactttacattctatggcggtctgtatcgtatggtgaacttgattgttgtaccggaaagccatttcgaactggattatgcgggaggaaatggaattgcagtgactccgaccgtagagtgtgacgaaaatcgcgtgccgacaggaaaagcatctgtgaaggtggagacatgggtgacaggaaatgcggattcagtcgtgattacaatcacaggagaagagagtgaatcaaagacagtttcggttgttgacggacacgcagaagcaacattcgaactggagcacgttcacctgtgggacggtgtggatgatccgtacttataccatgcaaaggcagaactttcaagcggagatgtgacagagactacatttggatgcagaagcttctacacagatccggaaaaaggattcgtattaaatggacgcgtatatccactgcgtggtgtcagccgtcatcaggatcgtaccggagcaggaaatgcattgagctatgagatgcacaaagaagatatggagatcatcaaggaaatcggtgcgaacacaatccgacttgcgcattatcagcatgcacaggaattctatgatttgtgtgatgagtatggaatggttgtatgggcagagattccgtatattactatgcatatgccaaacggacgtgctaacacattaagtcagatggaagagcttgttgtacagaattacaatcatccgtccattgtatgctggggactttccaacgaaatcacagccgcaacaccggttgacgaggatttactagaaaaccacagattgctgaatgatctgtgccacaagttagacaagactcgtttcacaacgatggcaaatgtattcatgcaggagacagacagcccgttgttggagattccggatgtgaacagctataacctgtatttcggatggtatctgggtgaactggaacagaatgatgaattttttgatgagtatcatgcgaaatatccggatcgttgtatcggattttctgagtatggtgcagacgctaatccacagtaccagagcacaaatccgactcacggagattattctgagacttaccagacagtatatcatgagcatatgttgaaaatgattgaggaacgtccatatctgtgggcaacacacgtatggaatatgtttgacttcgcggcagacggccgtgatgaaggcggcaagcatggagtgaaccagaaagggcttgtcacaatggacagaaagctgaaaaaggatgcattctatctgtataaagcatactggaacaaagaggacgctttcgttcacatctgtggaagcagatatgtagaccgcaaggaagacacaactgaagtaaaagtatattccaatcagacaacagtatctttgtatgtagacggaacattgttagaaactcaggacggaagtcgtattttccgatttgcagttccgatgacaggggagcatgagattgttgcgaaagcaggcgcagaagaggacagcatccacatccgtaaggtagaggaagcaaatccggattacgtgatgggagaaatcaaagatgttattaactggtttgatgatgaaccatataaaccggaatgctattctatcaaagataaaatgagtgagattaaggcaagtccgaaagcaggtgcaattctagcagaactgatggcacaggcacctggagcagaatcaagaggagatgtggcagaaagtgtcaaagacaatccgaatctggtccgcatgatgggaagaatgacgctggaaagtatgttaggacatatgaaagacagtatcacagaggaacaggtgaagggcttaaaccgcatgcttcagcagattaaaaaaggcgaatag

SEQ ID NO: 392 - DNA, 9122 bp, unidentified
  source 1..9122: mol_type = unassigned DNA
tcactgaatctctggcttatccagcgttactgtattctgtttttcctctggaattaccagatcatccagattttccggaatctcgattccacgctctgccgcatggaaaatcttcataaattccttacctgtaatggtttccctgcggatcaggtaagcagcaatcttatcaagtgcttctctgtggctgccgatcagtctcttggcttcctcataagaattatggagaagtaccattacctcatggtcaacctctgtggcagtgtcatcgccacagtttaacactgttcttccgctgagatactgattctcctgtgtagccagacccataagtccgaacttgtcggacataccgtactgtgtgatcatggctcttgccaccttggtagcctgctcaatatcattggctgccccgattgtgacagtatcaaataccagttcctctgctgcgcgtccgccaagatatcccacaagcattgcttccagttccttctttgtattgagatatttctcctcctcgggtacctgcattacataaccaagtgcccccattgttctcggcacaatagtaatcttctgtacaggctctgcatctttctgcagggcgcttaccagtgcatgtcctacctcatgataggatacaatcctgcgctcctgtgcactgaggatcctgtccttcttctctttacctaccagaactacttcaacagcttcgagaagatctttctgggatactgcactgcgtccactcttaacagcaaggatagcagcctcgttgatcatattagccagatccgaacccactgccccagaagttgcaagtgcaatgttctcaaaatcaacagtctcatccagatgtacatttcttgcatgaaccttcaggatctcgattcttcccttcagatccggtctgtccacaatgacacgtctgtcaaaacgtcccggacgaagaagtgccggatcaagaacctccggacggttagtagcagccaggatcagaagtccctttgaagtgtcaaatccgtccatttccgcaagaagctggttcagagtctgctcacgctcatcattgccgccaccataatgagaatctcggctctttccgattgcatcaatctcatcaataaaaatgatacatggtgcattcttctttgcttcctcaaagagatcgcggacacgtgatgcacccacacctacaaacatctccacaaactcagaacctgacagagaaaaaaacggcacatgtgcctctcctgctactgcctttgccagaagtgttttaccggttcccggaggtcctacaagcaaagctcctttcggcagcttcgctccgatggtggtatatttgccgggattatgcaggaaatccaccacctcctgcagtgattccttggcctcatcctgccctgccacatccctgaaagtaattcctgtatctttctgaatgtaggctttggcgcggctctttccaacgcccatcattccgccacccttattcatgcggcgcataaataccgtcagaagtacaaagagcagaatcgttggcagaagcacactgaccagcatagaaataatttcccctgctgcatccggcttcttatactcaaacttgattcctgttccctcaagtctctccgtcagcttatctactgactccatctgattggcataataaacttcttctgaaaatcctgatgactgatgtttcggcgtgatcgtcagtgtatttgactgaagcgtaacctctttcacatctccatcatctaccatctcaataaatttatcataagtgatctcactcgaattatccttgagcatattggtaaacatggcgaaacataccagagttaccaggaggcataccagaaaggccagtatcgactgatgattcttgttcgggtcctgtctgcccggacctttattattatcaggacgattgccattcggattgttatccatatgattatccatttcattcctcctaaacgttatcgttcttattataaagagaattcgggtataaatcaactgcgagattgtgaaaattgtgtccggttgtgcatatctttctataaaccctataaaatttatatgaagttttacaaattcacctgttacaaatggctttatttgtagtatactattgacaaactgattactgctcacttcgttcccggtaatgcgctccgcaatacacagaatttatgctgaccgcataaatttgcgctgtatgtcccgggatattctaaatgagcagtactaaaaatgtgatgaggaaaggaaatgaacaaatgaagataggatttgacaacgacaagtatctgaaaatgcagtccgaacatattcgggaacgtattaaccagtttggaaacaaactttatctggaatttggcggcaagctttttgatgactaccatgcttccagagttcttccgggatttgagccggacagcaaactgcgtatgctgatgcagctttctgatcaggcagagatcgttattgtaatcagcgccgctgatattgataaaaataaagtcagaggtgaccttggtatcacttatgatgaagatgtactccgccttatggaagtatttaccgagcgcggactctatgtcggaagtgtctgcatcacccagtattccggacaggaaagcgcagatgcgtttaagaaacgtctggagaagcttggaatcaaagtatacgtgctttatctgatcccgggttatccgaataatacttcctttattgtaagtgatgagggatatggcaagaacgattatatcgaaacaacaagaccactggttgtcatcactgctccaggacccggaagcggaaaaatggccacctgcctttctcagctttaccatgaatacaagcgcggtgtcaaggcaggatatgccaaatttgaaactttcccaatctggaatatcccgctgaagcatccggtaaatctggcatatgaagcagctactgctgacttaaatgatgtgaacatgatcgacccgttccatctggaagcatatggtgagactactattaactacaaccgtgacgttgaagttttccctgttcttcaggctatgtttgaaaagatcatgggcgagtgcccttacaaatctcccacagatatgggcgttaatatggccggtaactgcatcgttgatgatgaagtctgcaaggaagctgcacgtcaggagatcatccgcagatattataagagcatggaagctctggttcgcggaacaggccgcgaagaagaagtttataagattgagcttctgctgaaacaggctcatgtgaccatcgaagaacgcaaggtggttcctgcagcgctgaaacgtgaagaagaaacaggtgcacctgctgctgccatggaacttcctgacggacgtattgttacaggtaagacctctgaacttcttggtgcatcttcagcactgcttctgaatgcactgaaagaactggcaggaattgagcatgacaaacatgttatctctccggaagcattaagaccgattcaggcgctcaagacagaataccttggaagcaaaaatccaagacttcactctgatgaaactctgatcgcgctttccatcagtgccgcagataatgaagatgcgaagctagccctgcagcagattccgaaattaaaaggctgccaggttcatacttccgtacttctgtctcaggtggatatcctggagttccgtaagctgggtgttgaacttacctgtgagccgaaatctgagcatgctaagaaactgcagaaataatttctgaaatggttttcaaatagcagcagaaaactctgaaaatccacaatatctatataatgatacaagaaagaatcctgcctgaacatatgacagtttcatatgaacaggcaggaattttttatttctctataatctcaatcgctctgtccggataattggtaatgactgcttctgcacctgcgtcttttaccagctggatgtgttctggtttgttggcagtccatacgtgcattttcagtccggcacgtttgacttcttctatgaactgtgggtatttcaggtgataaactgcaggatgtacggcgttgattccgagatttttggcgtacatggctggatttacccatccgtcactgaaaaggattccggtctgtacatggtcattcagctgttttaactgtaacaggctgtaatggttaaaggaggaatagatcagctggtcttccatgttcatttcttttaccagtttcaggattttcccttccattcccggatagaagcagatgctgttctttagttcgatgtttaccatcatatctgtggtgcgcatgagctccagtacttctgccagagttggaatgtgataaattcctgatggttctgcgggtgtactgacttttaattctttcaattgagccagtgtcatatctttgatcagtccggttccgtctgtgacgcggtctacgttttcgtcgtgcataacgatgagttcgccgtctgcggaagtatgtacatccagttcgattccgtctgcgccctgtctgatggcaagttcaaatgcttccagagtgttctccggtctgtatccgctggcacccctgtgtgcccatacttttgttgttctctttgttgtttctgtcatttccatatgcctctctgttctttctattttgaattttctctgtttcttttgtttttgttaatggtattactatatctaataaatatgtttgatctatggtcagtctgcgaaaaaaatgtgttctcctataaatggtacatttcagatttgcggtgttttaataatggaagctgctctctgatctggtcttcccggtccaaatctatttcttctattaaaatgccctctttctcatccaactgtttcataacctttccccatggatctgttacaatagaatgtccccaggaaatatatcctgcctgtgtatctctggcaggagcacatccaagcatatatatctgattgtcaagggctcttgcacgaaaagtcagttcccagtgtgccggacctgtggtcatattaaatgctgcagggacgaaaatcatccttgcaccgtccagtgccattgtgcggacaaactccgggaagcggatgtcgtagcagatcatgacacccattttcccaaattcagtatcaaatactgtggcatgatctcccgaagtcagagtatcggattccttgaagtactggccattttttacattgatatcaaagagatgagcttttctgtgcttaccaatctgttttccatctctgtcaaaaatataagaagtgttgtaaacctttcccacatcatctgcttccggcatggaacctgcgatcagataaatatgatactttctggcataatcagacatttcctgccaggatggaccaccttctttttctgcataaactggaaaattttcggtctgatacggacagcagaacatctccggaagaattacaaagtccggattttccgcctttattttttctatataagtgccggcagtacggatattttgtattttatcttttactgtgggcatctgaattgctgctactttcatatgcgtcctctcctttcttttatctattatagccgaaaaaaaccacatcgccaatcctacattaaaacatcccccacgcatgaacattccttccatgtgtgggggatattgattttccacaggtaagttgctaaatgcacctgcattcagttgatttaattaattattcttcataaccattcgggttattggactgccatctccaggagtctgcgcacatttctttaataccgttttcggctttccatcccagttctctctctgctttggaagcatcggaatagcaggttgcgatatcgcctggacgacgtggcttgatcacatatggaattttaacacctgtagcagcttcaaaattcttcacaatatcaagaacactgtagccttttcctgtaccaaggttgtagatacttaatccggaattatcttcgattttcttaagagcttttacatgtccttttgcaaggtcaactacgtgaatgtaatctctcacaccagttccgtccggagtatcataatcatttccgaataccccaagttctttcagtttacctactgcaacctgtgtgatatatggcatcaggttgttcgggattccgtttggattctctccgatagttccgctcttgtgagcaccgatcgggttaaagtaacggagaagaactacgttccattccgaatctgctttctgaatgtctgtcaggatctgctcaagcatggattttgtccatccatatggatttgtgcactgtcctttcgggcactcttctgtgatcgggatgattgccgggtctccgtatacagttgcagatgaggagaagataatgttctttacattatgttttctcatgacatctaccagtgttaaggttcctgcaatgttattttcgtaatattcccagggtttggcaacggattctccaactgctttcagacctgcgaaatgaatacaggaatcaatatcttctttatcaaaaatttcatttaaagcatcgcggtccaggatgtctgctttgtagaatttcactggtttgcctgtgatcttggaaactctttccagagatttctcacttgcattgcttaagttatccagaactacaacatcatatcctgcattctgcaattctacaactgtatggcttccaatatagcctgctccacctgtaactaaaattgccataataattcctcctaacctgtcttcctgctacaatacctgtttttgcaatttctgtttttttctctttcaacaatacctatattagttcacagcatcagaaatatccttgataattctgagtgtaatctataaaattctgcggatatcctgtttcacatctgcaaaatttacctctgtattttacagcaccctatattcagaactgtaaaatactgttgcctggcacatcatgtattgtagaaaatcctgcgaaaatatgatttctctcatatccccgcaggataattctatccgaatcagttcataaacacaagtctttatggacatgtacgtttttttatacctgtttatacttatttacaatctctttcatccgggaaagtttttcttccatgtctttcaccagtttaaactgtgttctgcagcgatccagattatgtccctctctgtgaatcttgaaataatgatctccctccagatagtctgtgaggaaacgcattccacattcaaaggtcataaggattgctcccatgggaagcatatccagttctgtctcagtcagcgcaccgccacagccttcaatgaagcctttgacataaacttcatacagatgaagatcacaggacaccttcgtcagatctttctcatcctctgctccggtacttgcgccaaaacggatagaatcgccgaaatcatttacggaaagtcccggcattacggtatcaaggtcaatcacacagatggcttttcccgttgcattatcaatcataatgttattcagcttggtatcattatgtgtaacacgcaacggcagctttccctgatcctgcatatcgcacagaacatgtgccagttctgtgcggtccagaacaaactgaatctctttttccacatctgctgctctgtgacatatatctttttccacagcagttttaaacttatccagcctgtccaccgtattatgaaaatttacgatggtctcatgaagcgtttctgccggatagtctgcaagcagcctctggaaatgcccgaaagcaactgcactctggtaaaaatcttcctcatcttttaccatatcatagcatgtggcattttcaatgaataaatatactctccagtattctccgtcctcatctacataataaggaagtccatcctttgtcatcacaagattcagagtctctctctccacatctccaccgttttcctggatctttttcttcagccaggcagtaacaccgctgacattctccatcagttccacaggtttggtaaaaatactcctgttcattttctgaagaatataatgtttgcctgtatcataagtcaggcggtaagtgtcattgatatgtccgcttccataaggaatacattctgtcagattatcttccagaacaaatgcactggtgatattctttatttcccggttaatttccactcaattattcctcccataatttctgtggatacagccctccatcttttaaattctgaatggcagctactaccacaggtttatcttctttgtaggttacaccataccatttatccatagatttcagaacttttacagttgctctcttctcaccgagaagttcatctactacaaatggcaggaaatattcgcatttcagcgggtttactttcagattctcatccaggaatttagggaatctgtctttcagctctttcagaatgcttgctgaaaatccccacatattcatggatactgtactgccttccggaagcatggtccatgtttttccatcgtcttctgtataagctgtgccgccgtcatgcttttcgatatgggtacgctcgttgatcttaagaagatgtccttcttcgtctgtcacgcacacacctcttgccacatggccattctctgtcaaagtattttccagtttatagccgaccatcatatatctgtaaatatccgcggtatcttcgttctctgtcaggaaatcatatgccatcttaaatgcatggcttccataatagtcatctgcattgattacaacgaatggtccgtcgatttcattgatacagcttaatacggcatgtccggttccccatggtttcacacgtccttccggtacttcatagccttccggaatattgtgaagatcctggaaaacatatgatacttccagctgattgctgagtcggtcaccgatggcgcttctgaagtctgcttcattttcttttttgataataaatactactttttggaatccggcctgtactgcatcataaatggagaaatccatgatgatgtgtccctctttatccaccggatcgatctgtttcagaccgccgtaacggcttcccatacctgctgccataactactaatactggtttcttcat

SEQ ID NO: 393 - DNA, 7089 bp, unidentified
  source 1..7089: mol_type = unassigned DNA
atggataatcagatggaaagaagatggctttctttgttcgtagaaaaccgtgctggtgttcttgcaagaatttccggactattctctggaaaagcctacaatatacacagtcttacagttggagaaacagaagatccaacaatgtctcgtatgacgatctgtattgatgcagatgaaaagacatttgaacaggtcaagaaacagttaaatcgaagcgtggaagttattaaagttattgactatacagatacatcgatccgaacaaaggaaatcatgtttatcaaagtgaaaagtcttacagagaagcagatggcagagatcttccagatggcagaagtgttccgtttcctgatcaaggatatgggaaaagacagcgtattaatagaagcaattcgtacagagacaaagaatgattctattttaaaggtgtttaaagaacgttatacaaatattgaagtagtcagaggtggtccggtagcgatcgattgtatcagtatgcaggatcgttaatgatcagaagacaataatatagaagagaaaagagagtttggtgttttaacgcacacaccaagctctcttttttgcgtgtacagaaataagtttttaaaaaatatggggatttttcataggaataaaaagttttttctttcaatgaaaaaatacagggatgtgttaagttagacatgttgaaagtgaagtaaatttaacgaaaaatcaatttataaagagtgtaaatatatttatattgtaaaaattgttatttttttcacgaaaaaatcaggattatttcatagaaaatacaagaaaattatcaattcggtgagaaagtgttataagttatgtcggattgtgttaaaaaaaatacaatccgacaaggacattgtatacatcgaaaaaacacgtatttatgcggcttttggcactttgcacaatttattgaaaatctttttaaaaaatagcaattgaaaatgagaaaagattgtgatagtattaacatatcggcgagagagaagatcgctaaagtataataatcaagaatatggaggaaaattgatatggcaaagaaagtagttatcgcaggagcatgccgtacagcgattggtaaaatgggtggagtactcagcacagtaccagcagtagacatgggatcaatcgtaatcaaagaagcattaaagagagcaggagttccagctgatcaggtagaccatgtatacatgggatgcgttatccaggcaggattaggacagaacgttgctcgtcaggcttccttaaacgcaggacttccaatcgaaacaccagcagttacagttaacgtagtatgtggatcaggattaaactgtgtaaacatggcggcacagatgattcaggcaggagacgctgatatcgttgttgccggtggtatggaaagcatgtcaatggctccatttgcattaccaaaagcacgtttcggatatcgtatgaataacggaacactggtagatacaatggttaacgatgcattaacagatgcattcaatcactatcacatgatgatcacagctgaaaacgtagcagaacagtggggattaactcgtgaagaattagatgagtttgcagcagcttctcagcagaaagcagtagcagctcaggaatcaggaagattcaaagatgagatcgttcctgtagaagtaaaacagagaaagaaaacagttatcgtagatacagacgaaggaccaagacctggaacaacagctgaatctttagcaggattaagatgctgctctggaaaagaaggtggagttgttacagctggtaacgcatcaggaatcaacgatggtgcagcagcagtcgtagtaatgagcgaagaaaaagccaaagaattaggcgttacaccaatggctacatatgtaacaggagctcttggtggtgtagatccatctatcatgggtgttggaccagtagcttctacaaagaaagctttagcaaaagcagacttaacaattgacgatatggacttgatcgaagcaaacgaagctttcgcagcacagtctgtagcagtagcaagagatctgaaattcgatatgagcaaagtaaacgtaaacggtggagcaatcgctcttggacatccagtaggagcttcaggatgccgtatcttcgttacactgcttcatgaaatgcagaagagagacgctaagaaaggtcttgcaacactttgcatcggtggtggaatgggttgcacaactatcgttgaaagagactaattaattatagataattaggaaaggagaattcttagaatggaattcgttacatatgaacaggacggttttgtaggtgttgtaacaatcaatcgtccaaaagcattaaacgcattaaacagtgaagtattaaaagagatcgaagcaacttttgatgcgatcgacttagatgcaacaagagccgttgtattaacaggtgctggagataaatctttcgttgccggtgctgacatcggagagatgagtacattaacaaaagcagaaggagaagctttcggtaagacaggaaacgatgtattccgcaagattgaaacattccctattccagttatcgcagcagtcaatggattcgctttaggtggtggatgtgagatttccatgagttgtgatatcagaatctgttctgaaaacgcaatctttggacagcctgaagttggtcttggaattacaccaggattcggtggtacacagagacttgctcgtatcgtcggagttggaaaagccaaagaaatgatctatacagcatttaacatcaaagctgaagaagcttacagaatcggacttgtgaatgcagtatatccacaggaagaattattagcagcagctaagaaattagctaacaagatcgcatctaatgcaccaatcgcagtacgtgcatgtaagaaagcaatcaacgaaggtcttcaggtagatatggatcaggcaatcgttgttgaagaaaaagcttttggaagctgttttgaaacagaagaccagaaagcaggaatgggtaactttttagagaaagataaatctaagaaattaaaagttgttcctttccagaacaaataataatgaagtttaatatatttccagtctgcggtatcagccgcagaccggaaaattacatagtaaaataattttacaggaggaattataatgaaagttggagtaatcggcgctggaacaatgggtagcggaatcgcacaggcatttgcacagacagaaggatatgaagtatgcttatgtgatattaatgaagaatttgcagcaaacggaaaagctaaaatcgcaaaaggtttagaaaaacgtgttgcaagaggaaaaatggaacaggcagctgcagatgctatcttagcaaagatcacaacaggtgtaaaagatatctgtacagactgcgatttaatcgtagaagcagctattgaaaacatggaaatcaaaaaacagacattcaaagaattacaggatatctgtaaaaaagatgctatctttgctacaaatacatcttcattatcaatcacagaaattggtgcaggacttgatcgtccaatgatcggtatgcatttctttaacccagctcctgttatgaaactggttgaagttatcgctggtatcaacacaccaaaagaagttgttgataagatcaaagcaatcgctgaagaaatcggtaaaacacctgtacaggttgaagaaggtgctggattcgtagttaacagaatcttaatccctatgatcaacgaagcaattggaatttatgctgatggagtagcttctgtagaaggtattgatacagctatgaaattaggagcaaaccatccaatgggacctttagctttaggtgatttaattggattagacgtttgccttgcaatcatggaagtactttacaatgaatttggtgatacaaaatatcgtccacatccattattaagaaagatggttcgtggaggattattaggatgtaaaactggtaaaggattctacgattacagcaagtaagaaaaagagcttttcttttgcatccggagatggtgaactccggatgcaaaagttaactttatagaaatcatgatggaggaataaagaatggatttcacattaagtaagaaacatgaaatggcaagaactcttttcaaagagtttgctgaaaaagaagtaaagcctcttgcacaggacgtggatgaaaatgaacagtttccagttgaaactgtagcaaaaatggctaaagcaggattcttaggtattccagttcctaaagaatatggtggacagggatgcgatccattaacatacgttatgtgtgttgaagaattatcaaaagtttgtggtacaacaggtgttatcgtttctgcacatacatctctttgtatcgatccaatccagacttttggtacagaagaacagaagaaaaaatatatcccagatttagcatctggtaagaaattaggagcttttggtctgacagaaccaggtgctggtacagatgcacagggacagcagacaaaagccgtattagacggagacgaatgggtattaaacggatctaagtgcttcattacaaatggtagttacgcagacgtttatatcgtaatcgcagtaacaggtgttgttgaaaaacgcggaagaaagatgaaagaaatttctgcattcatcgtagaaaaaggaactccaggtttcacattcggaacaaaagaaaagaaaatgggtatccgcggatcagctacatatgaattaatttttgaagactgccgtattccaaaagaaaatctgttaggaaaacagggtaaaggtttcggtatcgcaatgcatactcttgatggaggacgtattggtatcgcttctcaggctcttggacttgcagaaggtgctttagaaagaacaatcgaatatgtaaaagaaagaaaacagttcggacgttctatcggacagttccagaatacacagttccagttagctgatatggcaacaaaagtagaagctgcaaaacagttagtatacaaagctgctatggctaaagctactcagaaagtatacagtgttgaagctgctatggctaaattatatgcagcagaagttgctatggaagtaacaacaaaagctgttcagttacatggtggttacggatacatcagagaatacgatgtagaacgtatgatgcgcgatgctaagattacagaaatctacgaaggaacatctgaagttcagcgtatggttatttctggaaacttattgaaatagggaggtacttaccgtgaagatagttgtttgtgtaaaacaggtaccagatacaaaaggtggagttaaattcaacccagatggtacattagacagaggtgctatgcttactatcatgaacccagatgacaaagctggattagaagcagcacttagaattaaagatgaatatggagctgaagttacagttcttacaatgggacttccaaaagctgacgaagttcttcgtgaagctatggcaatgggtgctgataaaggtatccttgtaactgacagagtattaggaggagctgacacatgggcaacttctactacattagctggagcattaagaaatcttgactatgatctgatcatcacaggacgtcaggctatcgatggtgatacagctcaggttggaccacagatttctgaacatcttgatattccagttatctcttatgcagaagacattaaaattgacggtgacagcgtagttgtacagcgtcagtatgaagatagataccacatcttaaaagctaaaatgccttgcttagttacagcattagctgaattaaacgagccaagatatatgactccaggtggaatttttgatgcatatgatgcagaagtaactgtttggggaagaaaagaccttaaagatgtagaggattctaaccttggtcttgctggatctccaactaagatcgcaaaagcatctgacaaagtaagaaaaggtgctggagaaaaagttacacttgatccagaagaagcagtagattatatcatggataaattagctgaaaaacatgtaatttagtgaaaaggaaaagtggtgaataaaatgggtttagaagaatatagaggcgtatacgtctttgcacagcaggtagataacgaattaagcggaatcgcattcgaattacttggaaaagcaaaagacttagcaaaagacttagatacagacgtaactgctgttcttgtaggttctgacgttaaaggattagtagatgatcttgcaaaatacggtgctgataaagttatcgtagttgacgatccagaattaaaagaatacagaacagaaccatatacacatgcattagcatctgtgatcaatgaatacaaaccagagatcatgttagttggtgcgacagcaatcggtcgtgaccttggacctcgtgtatctgcacgtgttcagacaggtttaacagctgactgtacagttcttgaaatcggtgatttcccattaagagcaatcccaggaaaagaacagaaacacaatcagttattaatgactcgtccagcattcggtggaaatacgattgcaacaatcgcttgcccagacaacagacctcagatggcaacagttcgtcctggtgttatgcagaagattgatcctattgaaggagcaaaagctgaagttatcgaatacaatcctggatttactccagacaacaaatacgttgaaatcatggatatcgttaaatctgttacagatacagtagatatcatggatgctaagatcttagtatctggtggacgtggagttggagaagaaggatttggaatgttaaaagaattagctgaagttctcggaggagaagtaagctgttctcgtgccgttgttgataacggatggcagccaagagatatccaggttggacagacaggaaaaactgtacgtcctaacgtatacttcgcaattggtatttctggagcaatccagcacgttgcaggtatggaagaatctgatatcatcgttgcaatcaacaaagatgaaacagctcctatctttgatgtagctgattacggaattgttggagacttaaacaagatcgttccagctttaacagaaaaattaagagcagttgttaaataa

SEQ ID NO: 394 - DNA, 7560 bp, unidentified
  source 1..7560: mol_type = unassigned DNA
aagaaatcttcccggtttcattttccttaattctccggtcagcagaagaaagagtccaccgatggcggcgatcatgcccgcatggaaactcttggtcagaaacgcaagagaaaaacacaagccgcatacataaagcatacgtccgttttcacggatctttaacatggccagcatggccagcgtgaagaacagaagatagagactgtctgcatctccggcgcggaccagatgcgccttaaagggaaaataattggcgcacaggaatgccataaccagcagagaggtgagctttccatatctgcgggcaaagagtccggtcacgaccgtggtaatcagataggcaagggcagagaagaaccggagccccactgatgtatagccaaacagggtgaaaccagccataatgctccagaaagaaacgggaggtttcacattccagtaatcgggttcattcagataggtatttaccagaaaatttccattcttcaacatttcataggcggaaataccatggcgggcctcgtcccaggagtcaatcgccttgataccaagacatcggaagcaaagaaaggcggtcatcagtgccaaaaatgcgaaaaaaaccggatagagacggtcaatcagacgcagaagccgtgtataaaatgatttcataaaataaatcctcataatctaaatagttacaaaaaatatagcatggtcacgaaaaaaagtaaacgctttataaaggctttacaaagcttctgtatgattgataatattgtaataggaaattaaagagagaagagtcatgaacaaaagaagagggatgtatcaggacggaatccacgtgaaaaacaatttttccatgagttccggaactctttctgtggcagccggagacgatgcactggaggcagaggcgctggtacgaatcagtggaggatctgtgtttctggatgcagaagattatctgattcactgcgatggggagcaggaactgaccaggggctgtgttttttatgaaaaacagtgacagacagggaaaatcatgctataatcagaccaaatgcagtgggatcaaagggagtactctgccctgacggctgctgaagaaagaataaacagattttacatggtggaggaaatttcatgagaacttatctcgtaacaggcggtgccggatttatcggctccaattacattcattatatgttccgcaaatacggcgaggagatccgtattatcaatgtggacgtgctgacctatgcaggtaatctggagaacttaaaagatgtagaggactatccgaactataccttcgtaagagcagacatctgtgacagcgaggcaattaccaaaattttcgaggagaatgatattgaccgcgtggttcatttcgcagcagagagccatgtagaccgcagtatcaagaatccggaagtatttgttaagaccaatgtactgggtactctggtcatgctaaatgcagcaaaagcagcatgggagctgccggacggaagctttaaggagaataagaaattcctgtatgtttccactgacgaagtatacggttctctggatgacggagataattatttctatgagacaactccgttctccccccacagcccctactctgcaagcaaggcaagtggagacatgctgaccaaggcatattttgatacttataaattcccgtgcaacattaccagctgcagcaacaactatggcccgtatcagttcccggagaaactgattccgctggtaatcaacaacgcactgcagggcaaagcgctgccggtatatggtgatggtaagaatgttcgtgactggctctatgtagatgaccatgcaaaggcaatcgacatggttcaggaaaaaggaaaactgggcgagcgttacaacatcggcggacacaacgagaagcagaacattgagatcattcatattattctggatactctgcaggagatgcttccggacagtgatccgagaaaagcactggtaagcgagaagctgattacctacgtaactgaccgtaagggacatgaccgtcgttatgccattgcaccggacaagatcaaggcagagatcggatggtatccggagaccatgttcgccgagggcatcaagaagaccattcagtggttcttcgagcatgaggactggatgaagaatgtgaccagcggtgactatcagaaatactatgaagaaatgtacaaaaataaataaaaactggctggtaccggcgctgggagtgttgctcgcagcgctggctctggtatttggaaagaccggtatttcccagaatggatttacgctgaatcagtaccacaatgcggatgccaaattcatcggtgatcacattatcaccagcgtggatgaaggaatccggattctggatctggaaggaaagacggtggcttcctatgacgggctggctgcttcctggatgtatgtgatggaagatgatgtggagtcgagagggccggaagatcactggttcatcgcttacagtaatcatgcggatgaaacccatattctggagctgaccgctgattttcagctggtggaagaccggattgcggtgaccaccgatacgctggctattgatccgattctggtgaagatggaagatggctggctcctcaccaatacagagattgacggaacgatcaacaatgcgtcaccggacggggacaacggaatctattctgtacagctctacagctccgcagacctgaagagctgggaaccgctgaccactgtcatcagtgaaaagcagaatctggaagacggagatatccggtatcttgacgggacactctactatttctttgagatggaagattatgataaaggttcttctaagatctgtgtcatgacgtctgatgatcagggcggaagctggagtgatccgatcgtactcctgcccaatgtggcggacaacgagatggcttcctgtgaacagaccgactatggatggcggctctatgtgagcagtgactatgcctgtgtaggagagagctatcagggtgccagtgtctattacaacgattataaagaggattttactccgatcagcacctatcagcggtcggagatgccggacaatgaatctgtccggttatatgaggcaaaagaaattgacggtcagatgaatttcctgtttgcaaggaattttctgacggactgtgatcttctgcttcgcactatggaaaagggggatgagatgcaatgaaaggaattattttagcaggaggatcaggaacccgactgtatccgctgaccaaggcagtgtccaagcagattatgccggtatatgacaaaccgatgatctactatccgctgtccattcttatgctggcaggaatccgggaggtgctgatcatctccacaccgagagatcttccggtatttgaagagcttttaggagacggaagtcagctgggcatgcgttttgagtatgcggtgcaggagcagccaagaggactggccgatgcctttatcatcggcgcagattttatcgggaaagacagcgtagcactgattcttggcgataatatcttctacggacagagtttctctcaggttctcagaagagtagcagcccaggagagcggagccaccatcttcggttactacgtaagagatccgagagagtacggtgtggttgagtttgacgaaaatggcatggcgatctccatcgaggagaaaccggagcatccgaagtcaaattatgcggtaccgggactctatttctatgacaatgatgtagtggagatagcaaagaacgtaaaaccgtctgcgagaggcgagattgagattaccagcatcaacaacgagtatttgcgcagaggaacccttcatgtggagacactgggcagaggatttgcatggctggatacgggtaatcatgatgcacttctggatgcggctgactttgtggcagcattccagaaacgccagggactttacatttcctgtattgaggaaattgcgttccggagaggatttattgataaagaacagctgctgaagctggcagagccgctgatgaagaccgcctatggccgttatctgacggaagtagccgaagggctgtaaatgaaaaattcaggccccggaagagcgcatacctgcgaagttccggggttttatcaaattttgaagaagaatggagaaaagaaatgggaaagattactgtagaaacctgtgatattgaaggattgaagatcattacaccgactgtattcggagacgagcgcggatattttatggaaacctataattataatgattataaggcagcaggcattgatatggagtttgtacaggacaaccagtccgcatccaagaagggcgtgttaagaggtctgcatttccagatcaattatccccaggacaagctggtccgcgtggtaagtggagaagtatttgacgtagctgttgacctgcgcccgggttctaagacctacggaaaatggttcggtgtactgctttccgcagagaataaaaagcagttctttattccgaagaactttgcacacggattcatcgtactgtctgattacgcagagttcgcttacaaatgtaccgatttctatcatccgaatgatgagggcggtctggcatggaacgacccggatatcggagtagaatggccgatcccggaaggcatggagctgacgatttctgagaaggatcagaagtggggcggcattaaagaactgaagaaataaggagagaccctatggtccgtatgtggaaagatttttgggcgagccggaaactgatctggaagcttgccagaaatgattttaagacccgttacgccggctcttattttggcgttctgtgggcaatggtacagccggtcatcattgtactggtgtactggtttgtattccagatcggtttaaacaatgcgacggcagagttaaagcagggaatcagcgttccctttgtgctctggctggtcagcggtattgtgccgtggttctatttctccgagagcttaagcaacggaaccaatgcgcttctggaatataattatctggtaaagaaagtggtcttcaacattgacattctgccgttggtgaagaccattgcagcactgtttattcatgtattttttgtgctgttcatgttgtttttatttgcactgtatggctattatccggggctgcacacgctgtgggtcgtgtacttcagcgcatgtcttctgatctttgtgaccggagtctgcatgctgaccagttctctggtgattttcttccgggatctgacccagattatcaatatttttctgcaggtcggcatctggatgacaccgattatgtggaatctggaagatttgcttgcaaaatatccgattcttatggtgctgaagctgaatcccctctgctatatcgtctatggctatcgtgcggtactgtttcagaccggttctgtggcaagccttggctggatgaatatttatttctgggcagtgaccattctggtatggctgctgggaagtcatgtgttccggaaactgaaagtgcattttgcagacgtactgtaaaggagaactatgagcagcgaagcaattaaacttgagcatattactaaaatttataaattatacggccggaacagagaccgcctgaaggattccctgggacttacgaagaagaaatgctatacggagcattatgccctccgggatgtaagcatggagattcatcagggagagacggtgggaattatcggtgtcaatggatccggtaaatctacgattctgaagattatcacaggtgttttaagcgccaccagcggcacgatggagattaatggaagaatctctgcccttctggagctgggagccggatttaatatggaatataccgggcttgagaatgtgtacttaaacggtaccatgctgggattttccgaggaggagatcaatgaacgtctgcaggatatactggattttgcagatatcggagaatttatccatcagccggtgaagacctattccagcggtatgtttgtgcggctggcttttgccgtggccatcaacattgacccggagatccttattgtagatgaggctctgtctgtgggagacgtgttcttccaggcaaagtgttatcataaatttgaagagttcaaaaagcttggtaagaccattctgttcgtcagccatgatctgaccagcattgcaaaatactgtgaccgtgtgattctgctgaacaagggcgtgaagctggcagagggaacaccgaaggacatggtcaatatgtataagaagcttctggtgcatcagctggatgaggaaacactggaagatgtctgcgagaaaagtgatattgtggagcacacggcagacggaaaagcatggaaagaccattttgaaacgaatccgaagcttctggactatggcgagaagcaggcggagattgtggattttgccatcattgaccaatatggacagtattccagtattattgagaagggttccacctgtcaggtcaaggcgaagcttacgttccacagtcaggtgaagaatcctatcttcactattaccatccggaacaagcaaggaacggatattacgggaaccaacactatgtttgaacgtgtggagaccggaaccgtggaagcgggagagacaagaatcgtcacctatacccagcggattgacctgcagggtggagattatctcatttcccttggatgtaccggatatgtgggagatgaatttaaagtgtaccacagactctatgatctggtgggaatgaccgtactttctgataaggatacggtgggcttttatgatatgaactccgtaattaccgtggagaacccggcagagcgccagggctgattcggaaaaaattttgcagcaggcaggaaggaatgcatatgcaggaacagtttggccatgtaacagtgacatatgatgaggagactgctttactgcagcagccccgcccggaagatcttctggtggagcagttgctggaggaaggctttgactgtaagagggcacaggcaccgtccttccctgttctttatcatttatctcagcttcgcggaaatctgacagaatggctgccggtgaaaatgacagatacagtgctggaatttggcgccgacagcggacagctgacggggggacttgcaaagaaggcagagaaagtcatctgtctggaggaaagtgtgagtcggtgcagactgttggcaaaacggtggcagacagtggataacatctccgtatttggcggaagtgtgtggacaacgctggaaacccttccgagattcgactggattgtggccccgggtgtgctgacggaagcacatcgatattttaccggagaatatccggaacaacaggcgctgaacattctgaaacagcatctgaagccggacggtcatctggtgctggcggcagacaaccggtttggcctcaaatactgggccggggcaaaggaaccccatacaggtcagtattttgacagtctggaaggaaaagccacttctttttcaaagcgggagctggaaacgattctgactgacaagatcggaagagcg

SEQ ID NO: 395 - DNA, 9665 bp, unidentified
  source 1..9665: mol_type = unassigned DNA
atgtgtggaattattggatttacaggtaaattaaaagcccaggatgtcttattgacaggacttgcaagccttgagtaccgtggatatgacagtgcgggaattgcgtactttaaagataccggaaaaatttcacttcggaaaactgtcggaaaagtaaaagatcttcgtgccatctgcgatgatgataacaattctacgtgtggaatcggccacacccgctgggcaacccatggtggcgttaccaatgccaatgcacaccctcataaggtcggacaggttgcattgatccacaatggtatcatcgagaactatcatgatctcgccaccaaatacgatctgacggatgaactgatttccgagacggataccgaagttgccgccgcattgatcaataaactctacgaaggagatccaaaagaagctctgcgcaaagcagtagccgaaattgaaggttcctttgccttctgcgttctgttcaaggatcatccgggtgaaatttatgcggtaagaaatgtcagccctatggttgcaacatactgtgatgacggtgcttttattgcatctgacctgactgcttttatcgcatacaacaagcgttatttcatcgtgccggaatatcatattttaactatgactgcggacggcattacgttagaagatttagacggtcattccgtagaaccggaatatatggaagtaaactgggatgttaccgcagcccagaaagatggttatccgcatttcatgatcaaagaaattcatgaacagccggctgccatcacaagaaccattaccccacgtatcaaagatatgcttccggatttttcggaagatgccattgcggattccttctttgaaaatgtaagcgacattacgatcgttgcctgtggtactgcaatgtacgcgggaatggtaggaaaaacaatgatccagaaccgcctgcatattccggttaccgtggcaatcgcatcggagttccgctatgaagaacctgtaatcaatgaaaaatccatggtgatcgtcgtatcccagtccggagaaaccattgatactttggaagctcttcgccttgcaaataaatatacaaagaaaacactgtctattgtaaatgtaaaaggctccagcattgcacgtgaaagcagctatgtattatatacacatgccggtccggaaatcgctgttgcaagtacaaaagcatacaccgttcaggttgcttctttttacctgcttgcatgcaaacttgccatgaaacagcaaaagatttctgtcgaagaagcacgtacatttattggaacactgcaggaaattccaaattacatcgaggaagttcttgcacaggctcctgatattgaacagctgaccaaacgcatgatcaatgccaacaacgcgttctttatcggtcgtggactcgattataccctttgcatggaaggtgctttgaaattaaaggaaatttcttatattcatgccgaagcctatgctgccggtgaattaaaacacggaaccattgccctggtcagtgaaggggttcctgtcattgccgctgctacccagaaacatgtatacagcaaagttatttccaatatccgggaagtaaaagcccgtggtgcttatgtcattcttttgtccaaagacaaagaaatcacagatccttctatctgtgatgtacacatcaatcttccggatgtatccgacgaatttacgatttttgaatctgttgtaattttccagctgattgcatattacacatccgttggaaaaggcttaaatccggatcagccacgtaacctggcaaaatctgtaacggtagaataaaaaaaactgtcgcgcgaaaattcgtgcgacagtttttttgacatagagcctttctaaaacttttgaaggcaaaaaaagaaccccagaagctctctaaaagcctctgaggttgcccctgccaaggattctctcacccatgtaccggaatccttgtttcatcggcgcgacaggatttgaacctgcgacctctgcgtcccgaacgcagcgctctaccaagctgagccacgcgccgtttcaactgcccaattatagtaacacattctccggtgtttgtctagtgaatttttttaatttatggtacaatacaaaaaaagaacggagaagaacaatgaaacatactgctttaattacaggtgcatcccgtggaatcggtgcagccctggcatgtcgatttgccgctgaaggctatcatctggctctttgctgccataactcttatgaaacgctgcaggcacttgccacaaaacttgaaacaacctactccatacaggtgctttgcttccgtggtgatgtaggagactatacttttatctgtgacatggtgcaaaaaacactggataccttcggccagattgatgtgttaatcaacaatgccggcatctcttatatcggtctgctcaccgacatggatattaccgactggaaccggattattgcgacaaacctcacatccgtcttttccacctgcagacaggtcatcccctccatggttcatgccaaatccggacatatcatcaatatttcttctgtatggggaaatgtcggagcttcctgcgaagttgcctattctgcatgcaaaggcgggatcaattcccttacacgcgctttgggcaaagaacttgcccctagcaatatccaggtaaatgccatcgcctgtggggtaatcgatacggatatgaaccgttgtttctccgaggaagaacgctctgcactcatcgaagaaattcctgccggccgtatgggatccccggaagaagttgcttcactggcatattctcttgccacagcaagcagttacctgaatggacagattctcaccttagacggtggatggatttaatttcttatctctttggaaatctttttccatttatttaagaattaaaacgcaatacgcgttttctctgttttttatatcaactttctataaaatcatttgtatgaaaacgaatgataaaaataaatacaaagattttggtgaccgtctgagtctgattatgtataaacaaaatatttccaatatccagctggcaaatgcaatgtttgtttcgccgtccacgatcagcggataccgtaccggtcgtcgttctccgaccgttgcggatcttgcagccatcgtgcagattctgaatgtttctgcagattacctcatcggaaccagtgaaattacaaccagacccgataccaccgaaaaaaagagttgagcacgccctgtttccagagcggtgctcaactcttttttataaatcatgttctgccagtaaaattaccgtagaacgttccggaacacgcacacgtgtctgatctccctgtgtctgggcttcaaaatctgccccatcctggtattcacagaaagtatttactacaagtttccaatgataagactccggcaacgaaggcaggcgcatctccaaaggctcccaatacgcattcattccgtaaaagatcatatcatcatccgtatcatcggcatttcttcccgcatacatgattccaattaaatgtgtattatagtccgtataattccggttcggctctccgttatggatacttacggaaggtaacccgcagactgccggctttgtatcccttcgcagaatcggatgctttgcacggaaatggatcataaaacgggcaaaatcatgaatctcctgaaattcttccagtctgttccagtccagccaggaaataatattatcctggcagtatgcgttgttatttccatactgcgtattacaaaattcatcccctgcaaaaaacatagccggtccacggctgcataacaacgcggcaaatgcattcttcacgagtctgcgtcgcaggctcataaccgccggatcatccgtctcaccttccaccccgcagttccagctcaggccgttgttatccccgtccgtattgttccatccgtttttctcattatgcttttcattatatgaatacagatcatacaacgtgaacccatcatgacaggtcagaaaattgacggatgcactatatccgcggcttgccggatcatacatgtcggaggatccggtgatacgtgtaattgcacgccctgcgacgccactgtcgccctttaaaaagcttctcatatcatcacggtatcttccgttccattcggcccagcggttccatgacggaaaacttccaacctgatacaagccacccgcatcccaggcttctgcgatcagcttcatatcccccagaatagagtcaaatgcaagggcttccagaatcggcggattctccatcggtgcaccattctgatctcttcccagaatcgatgccagatcaaaccggaatccatccacacggtactctactgcccagtgccgcagacaatccgtaataaacctccgaaccaccggatggttgcagtttaagacattgccacagccgctgaaattataataatatccatccggtgtaagcatataataaatattgttatcaatccccttaaagcaaaaacatggaccgtcttcatttccctctgccgtatggttgaataccacatcaagaatgacttcaattccattttctttcagttcgcggatcagacgctttaattcatcaccctcatgattatgctcctgatgaaatgcataacttgtattcggggcaaaaaaggaaaccgtattatagccccagtaattgtacaactgcacgccatccaccacacgggcactttccatttcatcaaattcaaaaatcggcatgagttctaccgcattgattcccagatctttcaaatacggaattttctgtcgcagaccttcaaatgttcccccaccttttacaccggaggacgcatctttggtaaatcccctgacatgcatctcatagatcaccagatcttcaaatttgtaattcagattccgataccgcccccagtcaaaatcactttgcaccacacgggctttatagacaaaatcctttccgccttccggtttttctccccagtttctctgaccggtaacagctttcgcatatggatcaagaagcgtatgttttctgttaaacagtaaccctctcgcctgatcggcaggaccgtccatctgataggcatactcaaaatcctctgcttttaagccaaaaacaaggatagaatacgtatttccaattttataactttccggaatgcggattcttgcatacggttcctgtgccgccggccggaataacagcaggacacagctcgtagctccatgggagcttacggtaaaacttaccccttcctctgtctgatatgcaccattcatctgataaaatcccggacgtacatcaaatccaccgatattatcgagtggatgaatgacttccccgagactttccatttcttcgtctatcggccagcttttctgttttgacggataattccaaaaacttgcattcatgtgctgattcctcttatcattattatttacttgccacataaaattatattatccccctactcttccctgatgattaccctgccatttgcgtcaaatccgattttactgtacttttccgaatactcattcatatgatcaataatcgtctgttttctgtcgccttttgctatggcaggctgaaaattatttctttctgatgtggaagaaatgctgcatggtatcatatcggctgatatatctgtctgcagtaccccatccacaaaggtaaaggtctgttcatagatcgccgtatctttgtcttttggattcctgttccccccaaagcagaaatttccaagactgtagcagatcatttttccgttgtataattccattccctgcaatacatgaggatgtgtaccgaccagcagatctgctccccagtcaatcacctggtgtgccagcttctgctgataatcattcggataatgatccccctctatcccccagtggcaacaggcaattaccagatccgctccttcttcccgaagttctgcaatcccatcccggatataattggcatgtgtttcatcagcggacagctggcttgcggagacaattccgattttgataccatccttcgtggtataggtatccacatgatcattgaatccgaagataatccctgctttatttaacacttctctggtatcatcaagtccctgctgcccataatcaaacgtatgattatttcccagacttgccccctccacagaactgtctgtcataataccaacatactccggttttccttttaagttccacgttttttccacacgctcggtcgcatttgacaacacacattccagattgatcagtgtaaaatcatcctgctcaaaaatacttctgatatttttaaaaaaataatcctgcccgtatttatcatagtattcatgaaaggaacctgcatacccatgcgtctgtgttgccccaagcgtacagtcacctgtcgccgtaatttttaccgtctgtatcaccggttcctgctgcgtttcagttgcagtcccggtttccgtttcttccagcgtacccggttcttccgtcatctgtgtctccgtgattttttccgtagaagagggcaaagccgatgacgttgctgcaggagaagaacatcccgtcagcaaaaatcctgccattaggattggcaatatccattttttcatacgttttcagactcctctttcacaagaatatccaccgtgtgaccgcttgcacccataagatccatccgttcacaggttgccagatgatactgcagaaacgcatcaaactcttcttccgtcagcgcatttaaaaacggacgcatataatttgctgcaccgtctgccgctatgatctgccggcgcctgacctctacctgccggtccaatgcttcaatatcttccagacgaaccatggaatacaaaggattggcttttgaagtacaatgataatccgctgtgagcattccctccttaagcgcctccagaatatgtttttccttaaacgcatacgtgataacggaaaattcattcataatatacgccacgagaatcctgcctccgggtctggtcaccctcaccgcctcccgcagcgcagcaagcttgtccttttcctcatgcagatgatacatcggcccaaacaacagggttacgtcaaaggaatcatcggaaaattttttcagattcattgcatttccctgatatgcatgcacgcctgcacccttctgtttcaggcgtcccagattatgctttaccagttccacggccgtcacatcgaacccttcctgtgccagcggtacgctgtatcgtccggttcccgccccgatatcaaggatatgaatttcctcttttgcacgttctttcacaatttcatccagacactgatggatataatgcatacttgtcacaaattccaccctgccgtgtcggctgtccagacgcttctcttcattaaatttattataataggcttctaagtctgtcatattttaatactaacacattttctttaaaatttcactcacaatcgctgatgcgacatccgctttgctcattatttccagttccctgcagtcatctgccgtaatcagcgtcaccacattggtatctgtaccaaatccggctccggctaccttcaggttattcgccacaatcatatctgcattcttttttgcaagttttgcacgggaattctccagcatatgttccgtctccatggaaaatccacacagaaactgtcccggttttttgtgcgcgcccagatacgaaaggatatcttccgtgcgttccatcgtaagagtggcatccccgtcttttttcttgactttctcatcgaccgggtgatccggacgataatccgccacagctgccgctttgataataatatcctgttgctctgcggtctcctttacggctgccatatccgcggcagatacaaccggaacgacctttacaaacggcggcggagtgattgccaccggtcccgtgatcagtgtcacttccgctccacggcgcatacagttttccgcaattgcatagcccatttttccggtagagtgattcgtaatataacgcaccggatcaatcttctcctgtgtcggtcctgctgtgaccattactttttttccgaccatatccttttcgcaggcaagatctttcataatataagaaaacagtgtttccggttccggcattttcccggctccggtatccccgcaggcaagataaccgctcgccggatcaatgatatgaaacccatagtccccgagctttttgatgttatcctgtacgatcggattttcaaacatattggtattcatggcaggggaaacatacttcgggcattttgccgcaagaatcgttgttgtcagcatatcatctgcgattccgtttgccatcttgccgatcacattggcagaagccggtgctaccataaaaatatccgcccgttttgccagtgccacatgctcgacattgaactggaaattccggtcaaacgtatcgaccagacacttgttgcttgtgagcgtctcaaacgtgataggattaataaaattggttgcattttccgtcatgatcacatgcacatccgcatgctgcttgacgagcgcacttgccagataggcgattttataggcagcgatacttccggtcacaccgagtaccacacattttccttttaacattgtctcttactcctttgcagaaaaaatcacatcttctgctattttatcacactttttccctaaaacaatttaatttttgtcatctgttccagtatggaatctttgacagaatcgttcagatatgctggatttaattttctttttgcatatgcaaggtaagaaccatttgtctcttcaatcaaaactgccgtaaaaaaccgctcccagctaaaatatgttttgctttccacatattcccacggcttttccagcacctgatctgcccatttgctttttactacttttgcctttaatatcagccattcaaatgactccggcaaataaagcaccacttgatcttttccacccatcaactgcatcactctgtcaatttcagaaccaaatgccgcaccgtctgcaattacaagtatgcgttcatttttatgcatatttaaataatggaaaacatttgactttccattcattgtctcacatttcaattgctgttgcctacatacagaattaaaaaactgataaccggaattactgtcttccgttattacaacctctggtttaatatccttctttaaagtctgtgctccatatattctgtaaaactcatgataacacggttttaatgttccgtattttcctgaagtacgaattccatagatttcctccacactatacggcaaagaaggcaaggattccctggaaacaatgacataataattatctgttttctgaatagtatctgcgaattctactgtcttgataaattcgtttccttcatcaataaatacaatactatcctgcattgctgataactgttctttccacagtgaaccttcgagcacataacattttttgtcacacgtcagttccacgggcgtaccggatggattatttacgtattcccgaatcatatctaccaatgtggttttgcctgtcgcactgtctccccggatgaccgtcagatttcttcgaatttcaaaatcatattttaagcgctttgttgatacaataattctatgttttcccttcat

SEQ ID NO: 396 - DNA, 7069 bp, unidentified
  source 1..7069: mol_type = unassigned DNA
atggacactcaacaaatagatgttatggtagccgacgcctcacatgaggtatacgttgacactattttggaaactatcagaaatgctgccgccgtgcgaggaacgggaatcgcagaacgcacacacgaatacgtagcgacaaagatgaaagaaggtaaagcaatcattgctctctgtggtgacacattcgccggattcacctatatcgaatcatggggaaacaagcaatacgtggctacctccggtctgatcgtacatcccgatttccgtggtttggggctggcaaaacgcatcaaacaggcttccttccaactggcacgcctccgttggccgaaagctaagattttcagcttgacctccggagcagctgttatgaaaatgaacaccgaactgggatacgtccctgtcaccttcaacgaactgacagacgacgaatctttctggaaaggatgcgaaggatgtatcaaccatgacatcctgaaagctaaaaaccgtaagttctgcatctgcacagctatgctgtacgacccgacagatccacggaacattaaaaaagaacaagaaagaaataacatttaaaagatacagcactatggaagaaaagaagaaaaaagtagtggtggcattcagcggcggactggacacatcgttcaccgtcatgtacctcgccaaagaaaaaggttacgaagtatatgcagcttgtgccaatacgggtggtttcagcgaagaacaactgaaaacaaacgaagaaaatgcctataaactgggagcggtaaaatacgtaacgctggacgttactcaggaatactacgaaaagagtctgaaatacatggttttcggaaatgtgctgcgtaacggtacttatcctatttcggtcagctccgaacgtatcttccaggcattggctatcgcacgttatgccaacgaaatcggtgcggatgccattgcccacggttctaccggagcaggtaatgaccagattcgtttcgacatgactttcctcgtactggcgccgaacgtagaaatcatcacactgacccgtgatatggcattgagtcgtcaggaagaaattgactacttgaacaaacatggtttcaacgcggacttcaccaaactgaaatattcatataacgtaggtctgtggggtacctctatttgtggtggtgaaatcctcgactccgcacaagggctgcccgaaacagcttacctgaaacacgtagaaaaggaaggcagcgaacaactccgcctgactttcgaaaaaggagaactgaaagctgtcaacgatgagaaattcgatgacccgatcaaagcgatccagaaggtagaagagatcggcgccgcttacggtatcggccgtgacatgcatgtgggcgacacaattatcggtatcaaaggccgcgtaggtttcgaagccgccgccccgatgctgattatcggtgctcaccgtttccttgagaaatacacattgagcaaatggcagcagtactggaaagaccaggtagccaactggtacggtatgttcctccacgaaagccaatatctggaaccggttatgcgtgatatcgaagcgatgttgcaggaaagccagcgcaacgtaaacggtacagcgattctcgaactccgcccgctttctttctctaccgtaggtgtagaatcggaagacgacctcgtgaaaacgaaattcggagaatatggtgaaatgcaaaaaggttggactgccgaggatgcaaaaggctttatcaaggtaacttccactccgttacgtgtttactataacaaccataaagacgaagagatatgattaaagcaggaatcattggtggcgcaggatatacagcaggcgaattaatccgtctgctgctcaaccatccggaaactgaaatcgtatttatcaacagcagcagtaatgccggaaacagaattaccgacgtacacgaaggcttgtatggagaaacagatctaagattcaccgaccagttacctctggacgaaattgatgttcttttcttctgcacagctcacggtgacacgaagaaattcatggaaagccataacataccggaagacctgaaaatcattgacctttccatggactaccgtatcaagagtgacgaccatgactttatctacggtctgccggaactgaaccgacgagctacctgtacggcaaagcacgtggccaatcccggttgtttcgccacctgtatccaactcggcctgctcccgctagccaaaaacctgatgttgacagacgatatttcggtaaacgccattaccggaagtacgggtgccggcgtgaaaccgggagctaccagtcatttcagttggagaaacaataacatcagtgtgtacaaggcattcgagcatcaacacgttccggaaatcaagcagtcactgcaacaattacagaacagctttgactccgacattgactttatcccgtatcgtggcgatttccctcgcggcattttcgctacccttgtggtaaagaccaaagtagccctcgaagaaatcgtccgtatgtacgaagaatattacgccaaagactcatttgtacatattgtagataagaatatagacctcaaacaggtagtcaacaccaacaaatgcctgatacatcttgagaaacatggcgacaagctattgattatctcctgtatcgacaacttgctgaaaggtgccagtggacaagcggttcataacatgaacctgatgtttaacctggaagaaaccgtaggactacgtttgaagccttcagctttttaaaaacaaaagaattatgaaattattcgacgtatacccattatacaacatcaacatagtcaaagggaaaggctgtaaagtctgggatgaaaacggaaccgaatacttagacctttacggaggtcatgccgtaatctctatcggacacgcacatcctcactatgtggagatgattagcaatcaggtagctaacctcggtttctattcgaactcagtaatcaacaaactccagcaacaggtggccgaacgactgggaaagatttccggttacgaggattacagcctgttcctgataaacagcggagccgaggcgaatgagaacgctctgaaactggcttctttccacaacggacgtaccaaagtggtatcttttagcaaagccttccacggacgtacttcactggcagtagaagcgaccaacaatccgtctatcattgcacctattaacaacaacggtcatgttgtttatcttcctctgaacgacgtcgaagccatgaagcaggaactgtctcggggagatatatgtgccgttatcattgaaggaatacaaggtgtaggagggatcaagataccgactaccgaatttatgcaggaactccgcaaagcttgcacagaaaccggcactatcctgattctggacgaaattcagagcggatacggacgtagcggtaaattcttcgcccaccagtatgctgatatcaagccggacatcatcaccgtagccaaaggaatcggtaacggcttcccaatggcaggcgtattgattagcccgatgtttaaaccggtatacggacaattaggaacgacttttggaggaaaccacctggcatgttcggcagcccttgccgttatggacgtgattgaacaggaaaatctggtagagaatgcagccaaggtaggtaactacttgctggaagaactgaagaaattcccgcaaattaaggaagtacgcggacgcggactcatgataggactcgaatttgaagaaccgatcaaagaattgcgcagccgcctcatctatgacgaacatgtgtttaccggagcaagcggtacgaatgtactccgcctgttaccccctctctgtctcagcatggaggaagccgacgaattccttgcccggttcaagaaagtactctaattgctcattctgattaataaacagccaacaataaaagcagcctttacaagaaaacgatttcttattcaggctgctttttgttttttcgtaattaaccgttacctttgcctgtgacaactcattaaaaacaagcgtatatgaaaatagccattatcggtgcaggaaatatgggcggttcaatcgcccgtggcctggcaaaaggaagtctgatagcagattcggacatcatcgtatccaatcccagtgccgggaaactagagagactgaaaaaggaatttccgagtatctctaccacaaacaataacgcagaagccgccacaggagcagacattgtcattctagccgtcaaaccgtggctgatgcaaccggtcatgcgcgagttgaaactaaaaagcaaacagatacttatctcggtagccgccggtatcagctttgaagaactggctcattacgtcatcgcaccggaaatggcaatgttccgtctgattccgaacacggccatcagcgaactggaaagcatgacactggtcgccgcacgtaatacgaatgacgaacaggaccaatttatcctccgcctattcagcgaaatgggaacagtcatgctgattcccgaagataaaataacagcagccaccgcattggcttcctgcggcattgcctacgtattgaaatatatccaggcagctatgcaagccggcatcgaaatgggactccgccccaaagacgccatgcaaatgatagcgcaatccctgaaaggagctgctgcattgattcaaaacaacgacacccaccccagcgtagaaatcgacaaagtgactacaccgggcggaatcacaatcaaagggatcaacgaactggaacacaacggctttacttccgccattatcaaagcgatgaaagcctccaaataacgccacaaaattattaatcataaaataccaaccacttgtatgaatgaccaaattaaacaaatagcagaacgcctccgcggactacgcgacgtactcgaactgacttctgaggatatcgcccgcgacagtgacatttctgctgaagagtaccgactcgcagaaactggagaatacgatatttctgtcagtatgttgcagaaaatagcccgtacctacaatgtcgccctcgatgccctgatgttcggcgaagaacccaaaatgagcagctactttgtaacccgcgccggcaaggggaccagcatcgaacgtacgaaagcctacaaataccagtctctggcagccggattcatgaaccgtaccgccgacccgttcatcgtcaccgttgaaccgaaaggagatgacgagtcgatccattacaacaagcataacggtcaggagttcaacctcgtactcgaaggacgtatgcttatcaacatcgaaggcaaggaaatcatcctcaaccaaggcgacagcatttattttaactccaaacttccacatggcatgaaagcgctcgacggcaaaacggtacgttttctggcagtaattatgtaataacatcatggtagaaagatttttatcacagacctcctttacctcacaagaggatttcatcaagaacctgaaaataaacgtcccggaaaacttcaacttcggttatgacgtagtagatgcctgggctgccgaacagcccgacaagaacgctttactgtggacaaatgacaaaggtgaaagccgtcagttctcatttgccgacatgaaacgttacacagacatgacggcttcctatttccaaagtctgggcatcggccgtggcgacatggttatgctgatcctgaaacgccgctacgagttctggtatagcacgatcgcccttcacaaactgggagcaaccgtcattccggccactcatctgctgactaaaaaagatatcatctaccgttgcaacgctgctgacatcaagatgatcgtagctgccggcgaaggaatcatcctgcaacatatcaaggacgccctgcccgagtgccctaccgtagaaaagctggtcagcgtcggtcccgagattccggaaggattcgaagacttccacgcagggattgagagtgccgccccgtttgtacgaccccgccatgcaaacaccaacgatgatatctcattaatgtatttcacttccggcaccaccggcgaacctaaaatggtggcacatgactttacctatccactgggccatatcgttaccggcagcttctggcataatctggacgaaaacagccttcaccttactatcgccgatacaggctggggcaaggccgtgtggggaaagctctacggacaatggattgccggagcaaacatctttgtctatgaccacgagaagttcactccgggagacattctggaaaagatacagaattatcatgtaacttccctctgtgcacctcccactatcttccgcttcctaattcacgaagacctgacgaagttcgatctgtcttcactcaaatactgcaccattgccggagaagcattgaatcccgctgtattcgatacattcaagaagttgacaggcatcaaactcatggaaggtttcggtcagaccgaaactactcttaccattgccactatgccttggatgcaaccgaaaccgggtagcatgggattgcccaatccccaatatgatgtggacttgattgaccatgaaggccgttccgtagaagccggagagcagggacaaatcgtaatccgtaccagcaaaggtaagccgctcggtcttttcaaagagtattaccgggatgcggaacgtacccatgaagcttggcacgatggtatttactataccggagacgttgcctggaaagatgaagacggttatctctggtttgtaggtcgtgccgacgacgttatcaagagttccggctaccgcatcggcccgttcgaggtggaaagtgccttgatgacacatcccgcagttgtagaatgtgccattaccggagtgcccgacgagattcgcggacaagtggtgaaagcaacgattgtattgtctaaagaatataagaaccgcgcgggagaagaattaatcaaagaattgcagaatcacgtaaagaaagtgactgcgccctataaatatccgcgtgtaatcgaattcgtagaagaacttccgaaaacaatcagcggtaagattcgtcgtgtagaaatccgcgagaacgatcagaagtaa

SEQ ID NO: 397 - DNA, 17602 bp, unidentified
  source 1..17602: mol_type = unassigned DNA
  misc_difference 15386: note = a, c, g, or t
  misc_difference 15387: note = a, c, g, or t
  misc_difference 15388: note = a, c, g, or t
  misc_difference 15389: note = a, c, g, or t
  misc_difference 15390: note = a, c, g, or t
  misc_difference 15391: note = a, c, g, or t
  misc_difference 15392: note = a, c, g, or t
  misc_difference 15393: note = a, c, g, or t
  misc_difference 15394: note = a, c, g, or t
  misc_difference 15395: note = a, c, g, or t
tcaaccatagatttctttcatcattttgcgcagcaccggcagggaacgctccaccttctctgtatcgatgcaatatgccatgcggaaatatccgggacagccgaacgaatccgccggaacgagcaccagatcgtactgcagcgctttctgacaaaatgccgccgcgtctgcttccggtgctttcgggaagatgtaaaaggttccttccggcttcacaacctcgaagccacagtccgtcaggcattcgtagagcaggttgcggttcttttcatagacggagaaatcggaggtcaggtcgagcaccttcgataccgccagctgcatcagggacgtcgggcagttatggccgattcccctcgaaatctgtccgcacatatttacgatctccgccgcatacggacacgccggattgaccgccagatagccgattctctcgcccggcagcgacagcgccttggaaaaagagtagcagctgatcgtattggcataaaatttcgatacatacggctgctgtttgccgtcaaatacgatttcccgatacggttcatccgaaatcaggaaaatatcatgcccgtattgttctgcttttctcgtcagaacctgcgccagcttcgtcaacgtctccgccgaataaactgcgccggacggattgttcggtgtattcaccaacactgccgcaaccctcggtcccaacatttcttcaaacgcttcgaaattgatctggaagctcttcgtgtccgccggaacaacctttaaaacggctccggtcagatctacatatggatgatattccggaaaaaacggagcaaaggtcagcacttcatcccccggcacagtcactgcacgcagcgcatgcgcgattgccgccgctgctgcggaaaccgggaaaatatgctccggtccgtagttcatgtcaaatctgcagtttaaggactccgcaatcgccgtctttacagacgggataccgagcgtcgggctgtagccgtgcagggtcatcggatcttccttctcaatcaggtccagcagtgcctgcttaaactctgccggtgccggtacggacggatttcccaggctgtaatcgaatacattctctgcaccaattatctgcgcccgcttcgtcgccttctcggacaactgccggatcactgactttgcatccagcatttttcgatattgttctgcaatcatagtattatccttcttttctgcatctttgtgagtttgaaatctgtccatattctatcacactatttttgacagttccactttttcttccacagggcatatgttatactgaaaaaagaatggatataaacgtttttcagctgtcaaaaccacggtgcagttcctgctttccggcaaacgcacctgtaaataggaggattttatggcaacctatatcgggcttgatctcggtggaaccaatatcaaaatttctgttttcgatgatttttttcataagctcggggaaaaacgcacccccaccgaggttcgtttcggctcggagcacgtcctcaatcgcatttatgatgctgttctggcacttctcgatgagctgcacctgacctgtcaggatatcacctgcatgggcatcggcgtccccggcatcctcgatatcaaaaacggtatttcccgtttttccccgaattttccgaaatgggaggaggttccaatcgtcgcctggatggagagccatcttcatatcccgacctatatcgataatgatgcgcgtgtcaatctctatggggaatggaaattcggcgccggcaaaaaccgcaataacgtcctgatgatcaccctcggaaccgggcttggcggcgctgcggtcatcgacggacgcgtgatctacggcgctacaggttccgcaggcgaaatcgggcatatcaatatgttccgtgaaggacgggaatgccgctgcggaagctccggctgccttgggcgctatgtttctgccctcggtattttgcgcaccttccgggagaaagtccaactgggacagcacagcatcatctgtgactgggtaaataatgaccttgataaggccactgcagacatgctttcccgtgcctacgatgacggggatgctgttgctattgagaccatgagagaaaccggagagctgctcggctacggtctgtgcgccgttttcagcctgtacaatccggaaatcatcatcgtcggcggcggcatgtcccgtatgggcgatcgcctgcttcagtacacccgtgaaattctggatacccatgcattgcggattccctatggctgctgtacgatcgtcactgcagttctcggagacgctgccggaatgctgggcgcagcggtctatgcgaaggagcagtttaggctgagcgcggcgaacaacggacaaaactaaaaaaatgaaaggcaggtgcgatacactgcggcaatctgcggtgcaggcacgctctacaacataaacgagccggtacagattaaaacatctgcaccggctcgtaacggtttttaattcatgacaatagaatgctcgcagagcgtgcattctattgtttacagttcccctgcaatatccagtctcgtcgcaatgctggtcagcagtacaacgagcggcatcataatttcacacacctgaacaaagaagcatgcgatatcctctgtaattcctccgaaatgatggaacgccacatagcaatagtacaaaaatgcgagcagtgcaccgaccagacacggaatcgctacctgaatgtcgcacatcagcatgcccactacagagatcacgatataagcgatcataaatgcgatcacaattcctctgcttttgccttttccgacatacagggagcatttgctttcctgcgaatgcgggaagcattcgatcgaaagaccatagagcgctctggaaagtatgaagccatatgcaagaaccggccagctgtccagcggcatttcgctccaaagaccgacgatcaggaagaaatagcagacacagataataattgcgaagtatccgctgtgggaatcccgcagaatttccagcttgacttccctcggctgatgggaactgagcgcatctactgtccggaagaaaccatccagaaacgcgccgcccgataaaaagatcggaagcatcgcacagataaccgcgcccagcagatctttatcgatcagatacgggctgatcacctgccactgttttagaatgaacccgataatcgcgccgactagcggtacgaaaatcaaaatatacttcatatttctacgggtttttttgatctgcctggcaggaaaaatcgaatacatcgaaaaagccagacgaaaacttgcccaaacttctttcatactatcgtgtacctctcagattttcggattacttcagtacaacgtcatccgcatgttcgttccagatcaggcaaacccatgtttttccgcgatttagccggatcgggttaccgtctgcatccacatacagcgccggatcggtatccgaatatcttgaccaggttccttctaccatcttacctccggtaaatacctgaaccttgtaattgttcagatctgcaccaggctcccagccgccgtgcacatcaaatgccatatagcctttggaatcccggaactcgccgtgacaatactggaaaataacgttatcgactgtcagctgttcgccggttgtctcgtcaatatgcttgtcaccgtactgataacggtaatattttccgtcttcatcgttatattcaaaataagcctgcacattggaatagccgtttccaacaccggtcttttcaccgccgggatacatcaggacaacggtatcgttatccggatagtctgccttttcgcccagaggtgcaaaggcaaatttctgcttatgcgtatcgtgataagtcaggctgtattcaaatttctctgccgcttctgccagcgcttcaccggttgtatacacattgtggggtgctttccgcttatccgtccgcatgaacgctttggaagccggacggtcaattcctgcaaccgcgccgctgatgttgtccaccagatcgctgtttaacagatcgccgacataaggggtagcctgtccgaaatgcgcataaatcgcatcgaattccagtgcgctgtatacaaaataatcgcggctgcttctgatatagccgatcgtatccagattctgccagttttcaaacaacggcatcagacgggtcacatccgcgccttccatcggcgcttcataaatcacggatgcctgtccgattcctgcctgcggggttcctgccttaatattgttcagcataactgccatcgggcgctgttcgcgttcctcttcggtgcattccagaccggtcaggtagctggtcggaactgcgtcttctgtaacaacgctttccgtctccgctgctgcattttctgttccggttgtatcgttgctttccgttgctgcaacagctgaatccgtttcaggtacaggggttgtttctgtcgctgcagagccacatgcacataatgctgcagataatcccagcgccagacagaacaaactggtttttttcatatatcattctcctgaatatttttcttttttgaaaaggttaaaccaacctagtttaaatattgtactcccgcaggcggtaaaaatccagcctttttctgcatttattacaattctattacaaatttacggcctaattcttcagcaaatgcaattttaccgcaaatttcacaatcatactgcctccgggaattccgagcagttcttttttcgacatgacgccaagttttaacgccgccgcaaaatacgtcagtccgccgattgccaccgaaagcagcagtgcaaccgcattgccgagatatcctttcagcactgtcagcgtcagcccataataaatacctgcaaccacaagccccatgatcgcagaggataccagcggcaggacaaacgtcttctcgatttcctgatgatagccggtcgcttttttcaccgcgatgccatttaacaggcacatcataaaagaatataccgtaacggcgatcggcaaactgtaaataccaatatctgtaaagatcaggagggctgccgccaccacagtctgcaccgccagcgcaatcaccgcgtttgtaaccggcttcgacgccttgccgactgcctgcagaatcgaattgctcagtgtggaaagggaatagaacacgatgctcgcaccaagcgccgccagaaggcatccgcccagacggatgctgtccgtattcgtattatacaacagccatacgatcggtctggataataccgtcatgccgactgcagacggaatcgcgataaacatgatcgtcttgattgccacgctgattttgtgccggacgtcttttttcttctttgtctcaaagcttcctgcaatgctcggcaggatcgcggaagccatcgcagacgcgattgcaatcggaatattggaaagtccgaccgcttccgtatcgtaaataccgttaataatcgtaatatcatcataagaagcgttgtgtaccgattgcatcagattcagatacagggtctggttgatcagtgcgctcgcattatatgcaaacgtactcagcagaaccggcgttaccataaacagaatgatcttgaaaatctcgccggtttccagcaaatctctggaacgatcccgctctatcctgcggcggattattttccggttcatatggtaaatcatcagcataaacgccaatgctatcagcacgccgacaccggttccgactgcacttccgactgccccccacgcagcacgggtcagctcgtcttccccagcaaatatctgcatcagcccccatgccgccagcatgctgaccgccgcatttaaaatctgctccagaatctgtgaaacggacgtctgcaccatgcttcggtttgcctgaaaatatcctctcaaaacgccgagaagaccggaaaagaaaattgtcggtgcaagcgtccgaagcaccatcgccgcccgtcccggaatcagaaaatctgctccaaaaaacgcaaacagactggcgattccgcccacgacaacaacataaataatcgagcagtgaaaaatccgctgcgcatttttgtactggtgggttgccagtctctgtgaaattactttggataccgccgacggaatgctataggaagagatcagcaaaatcatctgataatagcgatacgccggcgcataatagccgtttcctgtctctccgataattcccgtcagggggcttctgtacaataggccgataattcgacagataatgccggcagcagccaaaatgccggcctgttttacaaaggaactgccttctcccttattttttgttcccatccgttacctttctgctcagtctgtcaggcagaaagaaagcagataatccagccgtctctctaccagctccagaacaaaaacatccggcttttgttcttctaccatagattgcgtaaaaaatccgttccaatgagccatatagcagtctgaaaggctgctcgccaccggtcccgccattcctccggcgaaggaatccctcaccatgaacagctttctcgtatccggcgcatctgaatgatacaccagagccgtcgcatcgtcaatagagactgcctgcaaattgttgccgttgtaaccggtcacgatataattttcttccgcaggcatatttttttcgtagtagctctgcagattcatcattcttgcaagatcatatccggaaaaggtatccggagtaaaggtaatgtcctccacctctggaagctcgtctcccaactcctttaacagcgcttttgccccaatatagccgccagcagcgttccaatgcgtgtcatagtgccagtacagggaatattccttcttatatttcagcatttcctctttcggatatacaatacggatatctgtattcttcttcagataagcgatcagctgatctgtccgcgtttcttccgcctttttataataggaaggaagatgctcttctccgtaaatcgtctccttattcggtgcaatcatcaggacaaattcactgccccggttggaaagccactgctccgatgtcgtaagctgcgatgcgatctgtgcaagctgtccttctgtaaacaggttcgttcccttataatcatcaatgtccgattccatgctgtaaaacagccagttgtccgaaccgatcacaaccttgtcgttgatggatttttcacaaaacagctttaaatttgtcaggctggaaaaggaaatcagctgactccgaaacggaaccgccgcgttaaacgcgctctccaccaatcccggataatctctgtaattgtccttcgtcagcttcggaatctctgttgaaaccgtattttccgtcgcatccgtctggaaacgatcctttgttaccgcccacacagctcccggcatcaaaagcaaaagcgcaaagcaaatcagccatgccgccgccatttttttattcatatgcattctccactcagaaattcagataaattgcagggctgtaggttccgttgaccaaaagcagcatcgacgctgcgatcaggaacatgcagtaaaccagttccaatacgccgccctttaatttctccgctgccgggcagaactttttgatgcctgcctgtatcagccccatgccaaggatgccgatgaccgtcatcacaatgcagcggtttccgaccagctcccgcagcgcataggtgctctgcgtatactgccacggcgtcaacatcctgcggatgtactgcagcgccggctgcagatttgccacccggaaaatcacccagccgaacaacaccacaagccccgtgtatacataacgcaaaaagccgattttgtccagaattttcttaaagccgatccgctccacaatgatgaaaaatccgtgcagcgcgccccatgcgataaacgctgtcgtcgcgccatgccataacccggtcgcaaaaaagacgatcgccagattcaaatatgtccgagcctttcctttccggtttccgccaagcggtatgtagaggtaatccctaaaccagctgctcagggaaatatgccatctgcgccagaactcctgaatcgaaccggacaggtatggataattaaagttttcacaaatatcgaatccgaacattttgcccagaccgatggccatatccgtgaaaccggaaaaatcatagtaaatctgaatcgcatacagaatcgccgcgcaccacaccataacgcccgtaacatttgtaatgtcctgcgcatagatcttatctacacttgcgccgacaatgtttgcgaccagcacctttttaccaagtccataggcaaagcgccggattccctccgctgtcttttccacggtttcctgtctgtttgtcagctgcggggcaaaatcgcgataccgcgcaatcggtccgactgaaatttttggaaaaaaggacagatacagtgccatattgagcggatttttctccgcctcataatgaccgcggtataaatccatcagatacgaaatcgctccgaacgtaaaaaacgaaataccaatcggaagcgggatattgcgcatctcatgctcgcttcccgtcagccggttcacaatccgcaaaaagaagtcaaaatatttataatacccaagaatccccaggtttaccaaaatgcccgccgccagaacggctttcgccgccacgctttcatcccgctgacatccaagcagcagtccgataccgtaatttgccgcaatcgaaacaagtaaaaggacaatataaaccggatcgccccacgcataaaacacaagacttgccaaaagcagcaggatatttttcagcgctgttttgcgcacgcacagcctgtccaacacaaatacaaccggcaaaaaagccgtcagaaaaatcatggaattgatactcattcaaaaactccgatcttattcgctgcccgcagcacccttggaacagcaatctgataatcagtcatcccgcgacggatactgttgtcctgatatcagaggcaaaagagtttttgatcctgatatcttttttattgtagcatacatttccttaaataggtaggggaatctgaggttctctttcctgaagcatctgcaaagttacagttcacacacgccattcgcagaaacgaatctgcgatactttccgctgcttcgcagtcatttttgttcatttgaaactctccaggaatgcttcgcagccctccacgatgtcccggtacgcggtttcgaaatccccggagtaccacggatcgtcaatatcgcgcggatgctttgagtaatccagcagccgatggattttatgctccgggtctccgccaacgattcgaagcatattttgaatattatactgctccgctgccagcagataatcataatattcgtaatcctgcttcgtcatctggcgtgcccgcttcccggacgggtcaatgccatgctcccgcagcttccgcaccgccggcggatagaccggattgccgatttcctcccgacttgtcgcagccgatgcgatttcaaactgatccgctatgccgcgttttgcaaccatgtcccggaggatgaactcggacataggggaacggcagatattgccgtggcaaataaaaagtatttttatcattattttatttctccttgttttgccccggaatgccctgttttgcaagggtttccgggattattgtgatatgctctgaaattacagattgtggcaaaccagagcagaattagacatgttgttactacctgttagtagtaaaattagtagtaacaggtaaattcttactactaaggattatttttcaaaaacaatttgttcatatttgcttgcaagaatattttctattgcatcaacttccatattaggataatcctctaatgcctttattaaatcactatcttccaacggaattacaagacctcgttcatccgcaaaagtatcagcacatcttttaatgaaattttcttctaaaagtttttcttttttctactaacccattttcgaacactattctaccgcacccagatagttgctgcgctattgtcatgatttatctaacgccctcccgatcaccttgggactttccgctataaaaattcctttctccgggtgatttttattcaaaagctgtcttctgtgagccttgcgaaaacctctaactccgatgcctggaaatcttttatttctattatatttaacattctaccgctaccttgatcacgccgttcctcttattttcaaaaagttcataggcttcttcgattctgctaagtgggtaggtgtgtgtgatcagtggttccgtgttgatcttaccttccgcgatcagtctcagcgtttcttcacaatcacaaccgtctactcctcctgttttaaaagtcagattctttccatacatatccggcagaggtaacgtctgggctttatcgtaaagtgccaccaccgtcacgattgcatttggccttgcgcattcccatgcaagacggaaagtagattctgctcctgcaacttcaagaacaacatccgctccaccatgctcagtgtttgcctgaacaaaatcaaaacattcttccggcgaaactgtaagaacttccggataatgttccctgataaagtgcatacgcttttcgtctttttcacacatgatgattcgcttcggatttttcagcataacagacagtaaggtacagatacctgtaggaccggctccaatgatcagcaccgtgtcatcctcagtgatctcggaaatacgtgctgcccagtaaccggtggcaagtacatctcctacaaataacgcctgtctgtccgtaactttatccggaatcttattcagcccctgatctgcaaatggtacacggacatattctgcctgaccgccatcgatacggcatccaagagcccagccgccattttcatcggtacagttattcacataacctttcttgcagaaaaaacattctccacaaaaagtttctacatttaccgtcacccgatctcctggtttcacattcttcacagcagttccgacttcttccacaattccaaccatctcatgaccgactgtaatccccgtcactgcccttggaacgcttccatgcttaatgtgcaggtcactggaacaaatgctggcaagtgtcacctttacaatggcatctctttcatgcatcagcacaggctttggcttttccattaattcaaattttccttttgaaacataagtataagtctgcattctttcccccatcactttctataataatttatccagaatttccgctgctgatctattaccaaatacgccattgccaaataacaaacaagataagaaggtgcaccggataaaacgcataacagaaatacttgaaccacttgttatggtacccctgctctccatgatataaccagattggaatcagtgccagcagtgcaaagctctgctgtgcaatctcaaaatgatgtcccagaatcgttaccggataatacagattccccagcataactacattcaaataatacagtccgacaagctgtgccgcaaaagaaatccaggttttcttgcgaaaaaaataaaaaagtaataccgtcagtattcctgcagcattgtaatctaccatggttatggttccaagcagaaaatccatcaaaagcacgaggcaaaccacaaaaaacgatatccatttcttttgtttcttctttgccttttcaatgatctgtatcgataacacccctaataaaaaggtccatagtacattttgatgaaacgggtaaaatacagaacttcccataatcaggttaaatggtatttctgaaattatggcaaatagaaaaagacgcagcatgtattttttcacattcgaagtataatagcatccttctgcgatcataaatgcgaaaatcggaaaagcaagtcttcctacgcatgtcatccattcctgtgctggaaatagtgtcgcccacaaatgatcacataacataaacagcattgccagaatatgtagtgtaaacgaatcaattcctctttttttctccataggttcttctccatctatccaggcatagatatctgccttttattcttttcattatattatggagcattatccaacgtcaatcaactcttgcgtcctaatctatcactaattcaaatactcaacgcattctactcataaggggtgttcatttcttataatttatattatgcttagattaaacagaaggaagtgaattatatggatttaatcaaaatcggaaaatatattgcagaaaaaagaaaagctcttggactgacgcagaagcaattggcagaaaaactgaatatgagtgacaaatcggtttctaaatgggaacgtggagtttcccatagttaaagataccacaccaaatataacgaatccacgcttatatgatactgcatgaaaaaaggtacttgataaaagcaatgaagcgcaatatcaagtacctttttgatttgttttttacatggttattaagagaattactcttattccgaagtcctcaatcgttccaccacagttcctttgttaaagaagtggagaacgatcagcggaatgaccgcagccagcaacagataaagcacgccgatgaccaaagctggaaccaatgtaatgtgcagagtaaagaaccacatagatggcgagttcaagacatttttcagcaccgtcacagcaagcagcagcgcaaccactccaccaatgatgtctgcaccagcggcatagtaaacgccttcataaaccatcagcctttgaagctggcgatttgtcataccgatactctgcatagtcgcaaactcatggcgacgggtaataatattggtgatgatcatatttgtaaagttaatcaatcctgccaatgccatgatacagccaatcagactacctacaacccaaaccatacttgcaacagaatttaattgttctttcagtaattttgttgaggtataggtaactgaggggttcttttcaacataactgctcagaaagtcctccatttgcggatgcagagaagcatccatattaaatccatagttcaacagggtcggggtcgtgtaaatctgtttgaatacggtgtctggtaaatacacaaaaggcgcatcgccgccaatatgcatcgtagccgtagttgttgtcggcgtttcgtcctcagtcccaacggtgcaggcttttgccagaattgtgcaggttttgactaactcaccatccctgtaaaaagaaatgctatcaccgatctgcaactgctctgacagggatgttgttttcgggccaccactcagtcggtctaatcggtttccgataatgacatattctccggttagcattttctgtttcagtacattaggatctgtttcaccatcataaatcatcatgtcagaccaaaaatgttcggaagcgccatagacatttccaaagaaaagattttctgcatccggggcagtattcagcgcataattcccgaaagacttgctaatcccattttcatattcaaaagtatttgtgcaagtaagtccctcaaagccgtaatccacaagcacgttaccgtcatctacggtgttacgataaagataccgttcttcttccagaccgttctgctcacggatcatatctactacttgctgtggaagtgcatcttcgtgatgtctaaagccctcctgaacattgactgcaatcgaattgtagacggtaaaatctgtttttgttgtgcgggtaatccacttttcttcatccatactctgtgtcacgatgataatagagttgaacagaacgatacacaaaagcatagaaacaacaatgaatacacaacggcgtctgttacgtcctaagttagaaaatgccatgtgagagagctttgctccactgattcgtgtaaccgttttctttttataatcatcctgctccgtataacgaattgcctccatgggagatacttttgatgcctttttggccggtttgcgggtactgataaacactgtcaaaatcgtaaacaatgcggctataacaaatagcataggagatgccgatgcctgcaaacttgccgtagaatactcataactgaaaattcgcattactaccggaagcaacgccctgcctgcaaagaacccggcaattaaaccgatcggcagaccgattagggtcagccataccgcctgccgattgacgatgcttttaatttgccgtgtagaagtaccaatcatcctcaataagccatattgccgaacatcctgcataacggaaatatcaaaaatattataaatcagcagatagccacacaatacaaacatcaaaacaaatactacggcaaataagatggactccgaagaaatcatggcttttcccatctggttttcaacagagaggataaagttatcggcagacatatcctctggattgccgccgatggagtagacaaagctatccatctgctcctgaatgttcgtcttgtctttcagcacaacttcagaaaaagtaacccctgagatttctccatccactgcgtgggtatttttcaccacatccggattatcttttacaaactgctctgagagaatcgccacgctgaccgtatcgttgcttgcttcccaccaaccggaaagcaccatatcataatgataggtttttccccgcagttcaaattccagaggaacttctgctccgatctccggttccacaccaagggccttcaaagccagttcggtagtagcaatttcattcgccttttccggcgctgaaccatgcgttggcacgcagaatgtaagttcctgctgtatgctgtcagcatagtttaattcaacagaatgacccacggcgttgcttgcatatccaatcgtccgccgatgacctgcctgctccacaaaatcactgtttttcagttgctcaaattgctcctctgtcatatagccgaaggttccatctcccttgctgcctttctgcatctgcatagagagctgcatggaggataccatgttaaatgccagtgaagtgatggatgtaaacaaaaatgctgtcagaacgatcgcaagaatcgccgccagattacgaaccttattcttcttgaaatattgtttagacagccgcttgatggtttttgtattattattgccaaatagaatgtcattcatagtcccgccccctttactgcacgatcttgccatcctcaatccgaatgatacggtcggcaagctgggcaatctcattattatgagtaatcatcacgagggtttggtggaatttctgacttgtggttttcaaaagccccagcacatcagcgctggtcttgctgtccaggttgccggtgggttcatcagccaaaacaatagcgggttttgacaccaaggcgcgggcaatggctacgcgctgctgctgaccgccggagaggttattgggcatattgttcagcttatcctccagccccagcatcnnnnnnnnnnttctttcataaacttcttgtctaccttgtttccgtccagctccacaggcagcacgatgttttcatagacatttagcaccggaaccagattgtagttctggaagatgaagccgatctttctcctacggaagatagtaagctgctcatcttttaatgtggagagttcacgcccatccacaataaccttgccggaggtaggcacatccagcccgccaatcatattcagtagtgtagatttaccgctgccggaggttcctacgatagcaacaaattcgcccttttcaatggagagggtcacaccatccaaggctctggtaatgttcggctttgcaccataatattttttcagttcagtcgtttgcaaaatgctcataaagaacaccatcctttctttttgataaatccattataacgaccaaacctcacagaaatgtcacagccagcataataaattgccctgaaatgtcacaatcctgtgacatttcaaaaaaacaggttattcatggggaagaaaaacggagaatgttgaacctgttcctacttgagaagttacttgtatataaccgttctgtaagctaataatttcccttgcaagatacaacccaatgccgattccctctatatcgtggacatcttcttcccgataaaagcgcctaaaaattgctccttgctggttttcgggaatacctttgccggtatcggtaatgctgactttcaggtgcatttcccagctttcaacgcaaacacgaatagaaccgtactccggcgtgtacttaactgcattatccaatatgttaaataaggcttctgctgtccatttgcggtcatgggaaacaaccaatgtttccgggcagtttacttcaacttgtatgtgctttctttcagcgttcagaaaaataccgcccagcgccatagcaagagtatcatagataggctgctgtttcttttcaagtgagataacgccagtttcaagtcgggaagtttttatcatagcctgcattaagaaatccagtttatcaagctgtgtgccactggcaagtagaaattcccgctgtttatccggtggcacttcttgttctaataaggtggcatttatcatttttaagtttgctatcggtgtctttacctgatgagaaatatcggaaattaactcctgtaagtcagctcgttcactggcaacgctgtttttgctttcctgcataacctcataaagacgcaccagccgatgattgattttataaaataggttttcttcttcggcaacctgtgatacatctatttttccattcatcatttcgtctaaggtgcagcaaagcatttcagaaaacaaagtcagctttcgccgtatcagtatcacaaaagcagtaacacaaagtagaaaaagcagaccaaaagccatgctacaaaataccacagacatttctttggtcaggatatatagaaccgaaaacatgaccactgataaaagtaaaatggtagttgccagtattatgcagactttatttaaggagagtttttttgaaatcatttttgcgctcctccaatccacatatagcccataccgtaaacggttttgatgtaggaatgctggttcgtttcaattttactgcggatgcggctgatcgttgtggttagtgcgtgttcatccacataattttcatctacatcccacagcttttcaagcaatacctgacgtgtcaggacagtttgagaatttcttgtcagcacttttaataaacgatattccaacgatgtaagggtaatcggctgtcctgcgagacaggctgataattcggaaaaattgatatacaaattcccgtcatcgtagaaatcgccgccggattgtgctgaaatgcggttcagtaaagcagatactttcttttggaacacgctgataggaaagggctttgttacataatcatctgcgcccaattcaaatcctttcagcatatcgctttccatatcatttgcggttagaaaaatcacggcggtatcaggacggcgttcttttacctcatggcatatatcaaacccgttcccatctggcagattgacatccaaaacgattaaatcataatcctgtttttcaagaaatcttatggcaacagcctttgacatagccccatccacggaatatccgacagccgacagattatagcttaatgtcttattcaaaagctggtcatcttcaacaaccagtattcgcat

SEQ ID NO: 398 - DNA, 17861 bp, unidentified
  source 1..17861: mol_type = unassigned DNA
atgaaagtagtaatcctggctggcggccttggcacgcgcatcagcgaagaaagcatctataaacccaagccgatgatcgagatcggcaacatgcccattctgtggcatatcatgaaggaatattcctactacggtttccacgactttgtcatctgcgcgggctacaagcagcacatgatcaaggagtggttcgcggattacttcctgcataccagcgatattacgtttgatttcacccgcggccagaacgagatgatcgtccacaaccaccacaccgagccgtggaaggtcactgttgtggacaccggcctcaacacgatgaccggcgggcgcatcaaacgcatccgtccctatatcggcaatgagaccttcatgatgacctacggcgacggcgtctgtgatgtggacattgccaagctggtggcgttccaccgtgaaaacggcaaggtcgccacgctgaccgccgtccagcaggagcagcagaagggcgttctggatattgccgaggataattccgtctgttctttccgtgaaaagaaggccagcgacggcgcgctcatcaacgcgggctatatggtgctggagccgcagatcttcgactatctggacggcgacgcctgcgtctttgagcagaagccgctgcagaagctggctgaggagggtcagctgatgagctatatccacaagggcttctggcagtgcatggacaccgcccgcgagaagcaggtcctggagaaaatgcttgccaccggcaacgcgccctggaagaagtgggaggattgatgatggtacattacgatcctgaattttaccgcggcaagcgggtgttcgtcaccggtcacaccggcttcaagggcagctggctctgcaagatgctgctgatggccggggccgaggtcacgggctacagcctgcagccgccgacgcagccgaaccttttctccatcgccggcgtcgaggacaagatgcacagcgtcatcggcgacatccgcgactttgacgcgctgaaggccgcttttgacgcggcgcagcccgacattgtgctgcacctggccgcgcagcccatcgtgcgcgacagctacaaggacccgcgctacacctatgagacgaacgttatgggtacggtcaacctgctggaatgtgtgcggctggcccagcagcagggcagagcgccccgctcggtgttgaacgtcaccaccgacaaggtctaccacaacaacgagtgggcctggggctaccgcgagaacgagccgctggacggtttcgacccctactccaacagcaagagctgctcggagttggcgacgcactcctacatcaacagcttttttgccgataagaccgtggctgtctcgacggcccgcgcgggcaatgtcattggcggcggcgactttgccaatgaccgcatcatccccgactgcgtccgcgccatggccgcgggccgtaagatcggcgtgcgcaacccctactcgacccgcccgtaccagcatgtgctggagccgctggcggcctacctgctgatcgcccagcgccagtacgaggacaaccgctttgcgggctactataatgtaggccccgacgactgcgactgcgtcaccaccggcacgctggtggatctgttctgccgggcctggggcggcgacgccgcctgggagaatcaggccgaggccaatgccccgcacgaggccaacttcctgaagctggactgcagcaagctgaaaacaaccttcggctggacgccgcgctggcacatggccgagtgcatggaaaagaccgtcgccttcagcaagatctggcttgccaacggcgacgtcccggcggagatggaaaaggaaatcaatatttttttggaggagcaataattatgtggaagaacgaggcagaagcccgcgagcagatcaaggcgatggtcgccgagtattatcacgacttcaaggagaaaaagaccccctatcaggaggggaatcgcatcacctacgcagcccgcgtctttgacgagaaggagatgtgcgctctgaccgatgccacactggacttctggctgacaacaggccgctttgcagaccggttcgagaaggagttcgctaagtggatcggcgttaagttcgcccatctggtcaacagcggttcctccgccaacctgatcgccttcatggcgctgaccgcccccgagctgggtgaccgccagatcaggaagggcgacgagatcatcaccgtggcctgcggcttccccaccaccgtgaccccggccatccagtacggcgcggtgcccgtgtttgtggatgtgaccgtgccccagtacaacatcgacgtcaccaagctcgaggccgccctctcccccaagacgaaggctgtcatgatcgcccatacactgggcaatccgtttgacttgtccgcagtcaaggcgttctgcgatgcacataatctgtggttggtcgaggacaactgcgacgcgctgggcacccagtacaccatcaacggcgagacccgctttaccggcacctggggcgacatcggcacgtccagcttctacccgccgcaccacatgacgatgggcgagggcggctgcgtttacaccaacaacccgctgctgaaccgcctgatcctctccttccgcgactggggccgcgactgcatctgcccctccggccaggataacttctgcggccaccgctttgacggtcagttcggcgagctgcccaagggttacgaccacaagtacgtctacagccactttggctataacctcaaggtcaccgacatgcaggccgccatcggctgcgagcagctgaagaagttccccaccttcatcgagcgccgccgccacaactgggaccgcctgcgcgccgcgctggagcccgccgccgacaagctgatcctgccggagccggctgccaacagccgcccgtcctggttcggcttcctgatctccgtcaagccggagagcggcctggaccgcaacgccgtgacccgctatgtggagagccacaacgtgcagacccgtctgctgttcagcggcaacctcatcaagcacccctgctttgaccagatccgcggcaccgatgcctaccgcgttgttggcgaattgaccaacaccgactttatcatgaacaacaccttctgggtcggcgtttaccccggcatgaccgatgagatgatcgactacatggccaagacgattatcgaggctgtgaatcagtaaaattttgacaacgaggtacggacccctatgatgcagcaaaaagtgaaaacgacccgcgcacccggactgcggttggacaaaaacaggcggctgacgcctatgcagatttactgctgggcgacggtggcctgtctggcggtgctgctgcttgccctgctggccagccgtggtgcgctgctgcatcaattcttcttttatgatgtcaccgataccggtatggactttttccatagtattgagtatatgcgtggacgtatgccctacggacagttcgatacgctgtacccgccgcttgcaaatctgtttttctatgtgttgtatttgcttgtgccaaagacacaatcagatacctggacggaatcgtttatctcgtctctcaacatgaagggaacagaacgggatttgcgtttacagcaagcgacgatgatgctgtttatcgtctttgttatcgtggtggtcttaggaattgtatcgatgacagaacgcctgacgcgcagctgcggggggcggaaaaagctgctggcattctgtgcagtgttcagctatggggtactgtacggcttggaacgtggcaatattctgctgctgtgctggccgttaatggcattttttatcctgtaccgcaattcagaaaaaccacttttgcgggagttggcctgtctggcactggcgattgccgccggtttcaagctgtacccggcgtttctgggcgtgctgctgctgcgcgataaaaactatctggccgcggtgcgcacggtgctgtacggtgttgtctgcctgtgcttcccgctgttcttcttcaatgaaggattgtttggcctcacactgtggttccgtgtactgtttgattttagcggcagcagaggtgaaccgtggatcggcaacggtttctccaacattttggcagaggctggacatgcggtggacaagctgctgggcacgcagctgggctatggcagctacgcactgctgggcattgtgctggctgcggtgctgctggtgtgcagcttttttatggataaggagtggaagcgcattacagcaatcattctggcgatgctgatgttccagtcccagtatgattatgtatggtgcctgtttttgattccgctgttcctgtttatggagcaggagcgtgagctgcgcagggacaacgtgctgccctatctggccttgatggtgccggtgctgccgctgccgctgtttcggcgggaccagatggagacgtcctttgtaccgcgcaacacgatttgtcatgtcatgctgctgctgctcattgtctggtgctttgtccaggcagtgcagggggtgcgtgtacgctgtgcggaaaaaccggtcaagccggcacacggacacccggcagccacggtgctgctggccgtttgtgtggcggtggccggtgtgggcggccagcagctgtggcagcgcacccacaactggggctttgactacagctacaacggccgactggatgccgaaggcatccagcagaaggacgtgttggacagcgacggcaacccggtagaggcaacatggagcggccgcggtgcgtatattatgatttacaaccacgcgccatttacgcaaaggatggtggtcacgttccagacaggctacggcatggatttgaagcgcgcctatacgatgacgtttgaagcaccgaatctggaagatgctgatggtacaaccggaaagcagaagcagacgaatattaagattgaccatgaggggcagaccgtgtgctacacggtagatgtggcccccggccagacccaaattgatgtgagctatgacggcccgatggcggtctatgatgcttcttcgcgcaaaaacggtaccttcacggtgacaaacctagtggtggccagtgagggcgctgtggaggaaaccgaataacggaaggaaacatatactatgcagaaattgctggccctgctgggcgcaaaaaataaagaggaatttgtggagctgttcaagcagttcgtcaagttcggcctggtgggcgtaagcaatacggctgtgtccatggcggtctactatatcttcctgtggatcagcccggacctgtatatggtcggcagcattctgggcacgattctgagcattgccaatgcatttttctggaatgataaatttgtctttaccggcaacgccaatgactggcgcagcaagctcaagcggctgggcaagacctatgtcagctacggcggcacgtcgattttgtccaacgtgctgctctggattgaggttgcattcttcagcgtcagcaagtccattgcgcccatcgtcaacctgctggtgacgattccgctgaactttgttatcaacaagctgtggacgtttagagatgagcaataatcaatgaatagaaaaataaagacatgggcgtatgcaattcttttgttaaatataattgttgcgggaatcggtattgcaaagcttttatttgatgtttttaccggcaacggaaatacacaagttggaaacaatcaatatggatgccgtttatccgttaggatggacgacaattgttgaaaacgttgcgttactcttgatggaagtatcgattgtttttgaggaattgttttttaggagtagagaaaacggatgaaaaataaagagcgaaatggtaatattgagctgctgcggtttgtgttctgcgtaatgatggttttataccacgcatggtatgtgcgcagaggatatattggcgttgagttcttttttatggtgacggggtatttcctcgctgaaaagatatgtaggctaaatgcaagggaagcgagccgcccatcggtagaaaatgccatgaaggaagcaacgcgagatgttacgaagcgttatcgctcaatatttccgtacttttttgtcgccaccattttgggatttatagtgcgtgcctatgcacagaaatgggacaatgcagcaatcctgttgggcgtgcagttgattccagcggatttcttatacttgcaaaaccttggattttcgacaacatctgccacgggggtattatggtatctttccgctatgacttttgcggtttggacgctatatccgttactgcgcagacattataacgtgattgtgcaagcagctccgatgggaagccttttgatactgggagtgattctgcaaaactgtgggtcgctggacgcgccatgcacatttctgtttggctgggtcaatacaggaatattacgagctttcgcgggcatcctaggggggtgacgataaataacattgcgtcaaaactgaggaaaatcaatgttggtgaaaaaacttccgcagcaatgacgatagtggagttggctggatatgtgtgggtactttaccacatttgggcgatgaatgaaacgcgtgttgcgttggacggcattgtagtcttagctcttggggtcgcgtttactattactgtaagcggaaaatcacttttttatgggaaatttaataatggttttgtgcgattcctggggaagacaacgatgcccatttttttaagtcacttctactgtgttcaatatttgccgaatatattggcaaggtatagtattgaagtgacagaattgcagcgcttagggatttcctttgctttctgtgcaatagcggcgggaatagtctattgtgtgggacaagttatagataggcaaatgaaaaaggttggtatcttttttgaacagcaagtgattaaaaagagcgaataagttgctgaaaaagtttaaaagataatgcttggtagggtagcatagcaatgttggcgtaagcaacacggctgtgtccatggcggtctactatatcttcctgtggatcagcccggacctgtatatggtcggcagcattctgggcacgattctgagcattgccaatgcatttttctggaatgataaatttgtctttaccggcaacgccaatgactggcgcagcaagctcaagcggctgggcaagacctatgtcagctacggcggcacgtcgattttgtccaacgtgctgctctggattgaggttgcattcttcagcgtcagcaagtccattgcgcccatcgtcaacctgctggtgacgattccgctgaactttgttatcaacaagctgtggacgtttagagatgagcaataatcaatgaatagaaaaataaagacatgggcgtatgcaattcttttgttaaatataattgttgcgggaatcggtattgcaaagcttttatttgatgtttttaccggcaacggaaatacacaagacggattgcttttccagaacctgcatctaacagcgtacagcacggattcattcatggacttctttaatagcattcagtatggaaggaagccctatacagcaggagtgatttatccgccactgataaatttgatttatgctatattcgggatggggattccggacagcgttaaagcacaggggacacttgcatacaggacatcgctacaaggaattgtggcattagtgctgttttatgtggtagctgtattgctatatatcgttgcgtggaaaggtgattctcgcttcaccaataaagaaaaaatctttttaataacagctacattttttacgctccccttcatttttgcggtagagcgaggaaatagcttactttggtgtgttccgcttacaatgttatttgtaaataactataataagaaagaaaaaagaaaacgtatactggcaatcgtagcgttagcacttgcagcctcaatgaaaatgtacccggcgttttttggaattttgcttgtgcgtgaaaagaaatggaaagaagcactaacggcagtggttgttggggcgattacaatgtttgcaccttttcttttaatggaaaagggaaatcgtagtccgctactatggcttagtaacattgcaaaaacaagcgaaatgtttcaaagcactggctatgggtataaagtaaacttgtctaacacaatagggtttattgagagtgaatttggcatacatattacgggaacaaattttttgataatagcggttttacttatcaacagccttttggtgctaatcaagaagaatatgcctcagtggaagtgcatagcgttgctggctcttatcacaatcttggtgcctggatttagctatacatacacaataatgtttatgctgattcccttcttttgctttttaggaagtgagcacgatcaaaaatgggactgttattatctgattctttttatgctgatgtttgtattgctaccgataaaaaatcagtttggcggtttggaagcaatcaatatggatgccgtttatccgttaggatggacgacaattgttgaaagcgttgcgttactcttgatggaagtatcgatagttatcgaagaattgcctttaaaaaacagggagaaataaagatgaaacagcgtttagcggattatgtggcggactttctggcggcgcgcggtgtgacggatgttttctccgtcgtgggcggcggcgctatgcacctgaacgatgcgctgggccataaccccaatctgcatgtgacctacaaccaccatgagcaggcctgcgccattgcggcggaagcctacgcccggctggaaaataagatcgcggcggtctgtgtgaccaccggccccggcggcaccaacgcgctgaccggcgtcgtgggcggctggctggactccatccccatgttcatcgtctccggccaggtgcgctatgacaccacggcccggtacgccttgcagtacaccggtacgccgctgcgcgccatgggcgaccaggagtacgacatcaccaagtccgtccagtacatgacgaagttcgccgccatgctggaggaccccaaggacattcgctacctgctggaaaaggcgtggcatctggctacaacgggccgccccggcccggtctggctggacatcccggtcaacttccagggcggctacatcgagactgacgagctgcgcagctacgaccccgccgaggatgacgcccagctgcccccgtcggtggacgacaccacgatccggacgattctggaaaaaatcaagaacgccaaacgacccgtgttccacgcgggctatggcatccgcctgtccggcgggtatgcggcgttccgctccgtggcggaaaagctcaacatccccatcgtcacctactggaacgccgtggacctcatcgaggatgacaatccgctgtactgcgggcgcgccgggaacatgggtgaccgcccgggcaactgggctatccaaaacgcagacttgattctggccgtaggcacgcgaatttctatccgccaggtcggctacaactggaagacctgggcccgcgcggcagaggttatcatggtggacattgaccaggccgagctgaaaaagccgaccttgcacgtcgaaatgccggtctgggccgacgcaaaggactttttgaccaagctggataaggtcgccgcggcccccgtgaacgcgggcggcgagtggctggccacctgccagcgctggaaacgtgactaccccgccgtgctgccccgccagtgggaggaaaacggcgagactgccaacgtctacgcctttgtgcgctatttaagcagtcgcctgccggagaacagcctgaccgcggtctccaacggtgcgtgctgtgtcgtcggtaaccaggcgtatgtcatccagaagggcagccggatggcaaacaacagcgccattgccagcatgggctacggtctgcccgcagccattggcacctgcatcggcggcggacgccgccagacgatctgcctcgagggcgacggctccatcatgatgaacctgcaggaactgcagaccatcctgacgaacaagctgccgatcaaaatcttcctcatcaacaacaacggttaccactctatccgcctgacgcagaacaaccttttcaaggagcactgcaaggtcggcatcggccccgagagcggcgacctgtccttcccggagtttgaaaagattgcaaaggcgtttggctacccctactacagcgcccacagcaacgccgagatgaagcaggccgtggacacggtgctggcactggacggcccggctttctgcgagattttcaccgacacgaaacaggtctgggagcccaagagcagcaccaagcgcctgcccgacggcacgctggtcagccccccgttggaggacctggcccccttcctgccgcgtgaggagctggaaaagcagatgttcatcccgctgatgccggaagtgtaagggagtgcgtgattcaaaaatggcaagcattcaaagacaaatccacaccgccatcatcaccggtcctacgggggcaatcgggatggcgctgtgtgcaaagctgctggcggagggtgtgacggtctacgcggtcacccacccgggcagtgcgcgggcggcgctgctgccgcaggacgcgcggctgcatgtggtgccctgcgatgcggcggagttggccgcgctgccggagctgatcccggaaaaagccgatgcgttcttccactttgcgtgggcgcacacgatcggcccgggccgcaacgacatgccggcgcagatcgagaacatccgctacaccattgcggcctgccgcgccgcggcgcagctgggctgccaggtctttatcggagccggcagccaggccgagtatggccgcgtggagggtgtgctgaccgcgcagaccccctgcttcccggagaacggctacggcatggccaagctgtgcgccggccagatgagccgcgtcgagtgccagacgctgggcatggcccacatctggacgcgcattttgagcgtctacggcccgcacgacggtccggccacgatgatcagcggcaccatccgtaagctgctgcacggcgagaagcccgctctgaccgcgggcatccagcagtgggactacctgtacgccgccgacgcggcagctgcgttctacgcgctggccgtcagcgggcaggacggcagggtctacccgctgggcagcggcacggcccgcccgctgaaggactacatcgaggcgctgcgcgacgccatcgacccggcgctgccgctgggcttgggggaggtcccctacggcccgctgcaggtcatgcacctgcaggcggacacgtcggccttacaggaggacaccggctggcggcccgcgaccccgtttgaagaaggaatccgcgaaaccattgagtgggtaaggaaagagacaaaatgagtgagaaaaagacgatttcggtaatgatcccctgctacaacgaggagcagaacgcccgccccatctatgaggctgtgcgcgatgagctggtcaagagctgcccgaactacgactatgagattttgttcatcgacaataagagcgaggacggaacccgtgccatcatccggcagatctgcgccgaggacaagcacgtcaaggccatcttcaacgtcaagaacttcggccagttcaacagcccgtactacggcatgatccacacctccggcgattgcacgatcacgatgtgcgccgacttccaggaccctgtggagatgatccccaggtttgtggccgagtgggaaaagggctacaaaatcgtcattggccgcaagacccagagcaaggaaaacccggtcatgtactggctgcgcggctgctactacaagctcatcaagaagatgagcagctgcgagcagatcgagcagttcactggctttggcctgtacgacaagagctttatccagacgctgcgcaacctgaaggatccgacacccttcatccgcggcattgtggccgagctgggccccgagcgcaaggaaatcgagtacacccagccccagcgccgcgcgggcaagacccacaacaactggtacagcctgtacgacgccgccatgctgagctttaccagctacaccaaggccggtatgcgcattgcaacgttcgcgggcttcctggtggcggggctgagctttctggtcggcctgttctatctgattgccaagctgctgttctggcagagcttccgcgccgggtacgcgccgacgatgatcgccatcttctttatgggcggtattcagctggcgttcctgggctttttgggtgagtacgtcatggctatgaacacccgcatcatgaaccgcccgctcgttgtggaggaagaacgcctcaactttgggccggacgaccagtgaccggcatgaagcaggagtttggttatttcctgaaaaacgcgaaattccgcgcggcgctggggctgaccctgctgctcagctacggctatgccatcgccacgacacgggtcagcattgactcgctggaaggggaccgctacatcggcacgggcggcgtcatgctgtccaccggccggttcggcatgaacctctgggccgcggtgctgggctacggcagggccgagccgagctatgcctttggcattgacctgctggcggcgctgctgctggcgctggcggcggtgagcttctgtgcgctgctgcgcaaggccgcgcaggatcgcatcagcatgttcggctatgggctgtttgcctgcctgtttgtctcctacccgctgatgaacgaaatttgggagtacagcggcgcgaatgtctgcgtctgcggcggctatttgctggacgccgctgcgctgaatctgctgtgggacgcgcgccagcccggcgtgccgtggcgcggcagggctctgcgcatgtgcgcggcggcgctctgcctgatggtggtctgttcgtcttatgagtcactggcggcggtgtttgtgctggctgtctttgcgcttttaacgctggagcagctactggccgccgagcgcccgcggcttgcggcagtcctgaccgagggactgtggtacgcggcggcgctggtcggcggtctctgcctgcgcgtgctggtgacgtcgggcatccatcttgtgctgccgcaggctgcggccaacggcgccaccgaaattttgtgggcgttctacccatttgtctatcttgcaaagctgcttgtcaagggcattctgattaactacgcactgcgcggctgtttctacctgcccattgctgaattggcggtggcggcgcttgtatttatcgtactggttatcgcgcttgctgtgcgcaaaaagcggcctttgctgctgctcaccggcgcggggacgctgttctcactggtgctgctgtcgtttgtgcaggggcggtactcgccctaccgcacctgtcaggtgtttgcgctgcttgtggcgctggcggggctggccgtgtatgagctgctgcgccgcgctgcggcccggcgggctgtgctgctgggcagcgtgcagctgctggcggtgctgctctgtctgcaccaggccatgtacctgaaccatctgctggccgtcgattaccagcgctccgagcaggaggccgccgtggtgcgcactctgggcaccgagcttgtgcgcgactacggcaccgataagcccgtggtgctggtgggccgttacacgctgggggagaatatcacccggtacacgacggctgacccgatgcagcacccgctgtaccgcttcttccgtgagcacacgagctgggagagcggcgacaccgtcaagtacgtcgagaccaactgcaactcggtgctgaactggtcggtcacggccttctccgaggtggacgacgtctacggccaggcagcggagcacctgttccgctactatggctttgctttggacatgacccacagcgctgccctgcatgagcaggcgcagacctacgccgacgcccaccacctgccgggatacccccgggcgggggcgattgtcgattgcggggactatgtgctggtaaatctgcaataagaataccgcggaaaagtttgcgcttctccgcggtttttactttctttctgtattttgccgatgttttcagccggtcacggtctcaaagggcttcgtcaggtgcccgttcctgtcggcctcgcaggtgcggcgggcctacttcaaatactccaccaaaaacgccactgtcgtctcccgcagcgctttgtccagcgcggcggcggtggcggtgtcctcggatagatagttgtggttcccctcggcaaacggctccagcacgaccctgccgtcgggcaggctctcgacggcggctatcgtctcggcctgggtcgtgtcgctcaaaatgccctcatggccggtgtaggtcaaaagtgtcggcagggcgctctcccgcagggcggcgttcgggtcggaatcgcgcatctcggtgaacagcgttccgctgacatcgacgccccaggtgctgatgctgccgctcgcctcggcctcagcggccagcgcttccacggcggaaaagtcgtcgatgttcaaaaactccatgccgcgcaggcccgcgccgttggcggggctccacagcgccagcgccgtgatgccgcccctgcgctgcgggtagaggctggccagccgtccgcccatgctgtggcccaccagcgctgtgcggcctgtgccgtaggtctgctgcatgtaggtgatggcgctctcgacgtcgtcggtcatgttggacagcgtgtaggccgtgaacggctcggtgctgttgccgcagccgggaaaatccagccggtaaagccgtggcagagcacgacgagcggcagctcctccccgcgggccagcttgccgggcagctgtaccgtggcgtaaatgtccccgcgcgtaccgggtatggtgacgtcctgcgctttcggtgcgggcgtcagcagaaagagcgatgccgccacgcagagcgccagcgcggcaatgcagcctgcaagggtataaaaagcgcgtttatacgtttgtttgtgcatagaattacctccgtaatgcctctattaaagcctatgcggggcaaaaagtcaagacgcacagaatacacacaaaaaaacaggtgacaaacccggggcggatgtggtatactaaaaattacaaattggttaaaaagtcagacccggggcgcaggcgcagccttgccccggcttttgtcctgttttaccggaggtgcttgactacgaattctatagcgaaccgtatgccccgcctgctggctatgctgtttgtgctgctggggctgttctgcgcggcggcactgcctgcccatgcggaggactacgacacggtgatggaccgcctgtcccgcctgcaggcgctggcgcgggattactcggccagtcaggccgacacgcccgacccgatcgagctgacgctggcctacacccgcacgggggagtacaacaccacgatctggcagctgaccgccggtgtgcgcgacgccgggtttgagagctacgtcaacagcagtgaccccgatctggcgtcgctgcagaatatgaacaccgtcgtcctgcccaacggagagagcatcgactttgggcacctgctggcgtcgatgaaccttgtctacaacggcatacccatcacgggcagctggggcggcgactgtgaggagctggccaggcagtattacggccaggccggcgatgccgcgggctacgccgaggcgatgcgcgcttcctttaatatggacgatgacggcacgctgagccgcttcagcaacggggacctgcgggcggacctcgactccgtcgtcgtcggctccaaggtgacaaaggacaccgacctggccgaggcgctgcgcagctactacgcgaatctgaccgagtatgaccgcgtcaaggagttcatctcactgagcttcggcacggtggatacctcgagcacggcctttgcggacgccgtgtacagcgctctgctggaggattccggtatgcagctgctgttctacatgaacggtatgtggaccgtcaagggctggcagatcaaggacgactacgcccccgccgtgcgcggcgcaacagacctgtttgccgagtacctggccgacgcggtcaatcacgagaagatcaagagcgagacgaatgaccgtctggttgccatgggcgggcaggcactggccgacgcgctggaggcgttgggcgacaccgacgccgcccaggccgcactgaccgccgccgaggagatggccaataacgcccaatcgacggtttcctccggttcggatgtggtctccgccgcgcgggagaatttgcagacaaattttaacgtgaaggtcttccagctgattttgctgattgcggcagggctggcggcgttcatgctggtgttcagcatggtgatgtttgtggtgcaccgaaaagaaaattgagtttggactgcgtgccgctctcttgtgggaaagagagcggcacgcttttttggttgggcgcggggcaggcgggcaggccactttttctgttcacaccccgttcacattccgtatattcaccccgagttatccacggcgtataacggttatccaccgtggaaatgttgaaaactccgtggaaagcgtggaaaactctgccgcccggacccgttcaaaagcggaaaaccgggaaaatctacgtagaaaaaacgtttattttccacattttccacagcggcgctgttgaaaactgtggaaagccggggaaaacgcgaattgcgctttttgcaacacaaaatacacattttgtaaataagggcttgcactcaccgcgcgacagcgctataataaacctaaccatcacccgcactgctgtgcggcggtgcgcttgagtataaaagggagagtgtgaaattatgttggacattaaaatcaccaaaacgacccatccgaaggaaaagccgcaggacgagtcgaagctcggcttcggcaagcagttcagcgaccacatgttcctgatggactataccgcgggcgagggctggcatgacgcccgcatcgtcccctatggcccgtgggagatggacccggctaccaccgtgttccactacgcacaggaaatttttgagggcatgaaggcctaccgcaccgcagacggcaagatccagctgttccgccccgactgcaacgcgaaccgttttaacgattccgcggaccgtctcggcatgccccccatcccgccggaggacttcgtgcaggctgtcaaggcgctggtcgatgtggaccgcgactgggtgccccactccgacggtgcgtccctgtacatccgcccgttctgcatcgctaccgatgtgggcctgggcgttcatgccgccaagcattaccgctttgccatcatctgcgcgccctccggtgcctactacgccgagggcctcgaccccgtccgcatctatgttgaggatgagtacatccgcgccgccccgggcctgaccggctttacgaagtgcggcggcaactacgccgcgtccatcaaggccggcgagctggctgaggagcgcggcttctcccaggtgctgtggctggacggcgttgagaagaagtacgtcgaggaagtcggctccatgaacatcatgttcaagatcgacggcgagatctacacggccccctgcgtgggcaccgttctgcccggcgtcacccgccgctccatcatcgagctgctgaaggactggggctacaaggtgcatgaggagcgtgtcgccattgccgacatcatgaaggctgccgacgagggcaagctggaggaagtctttggcaccggcacggctgccgttgtctcccctgtcaaggagctggattgggagggcaaggttgcccacatcagcggcggccacattggcgagctgacccagaagctgtatgacacgctgaccggcatccagtggggcaagctgcccgacaccaagggatggatcgttcctgtggaataa

SEQ ID NO: 399 - DNA, 24170 bp, unidentified
  source 1..24170: mol_type = unassigned DNA
  misc_difference 19009: note = a, c, g, or t
  misc_difference 19010: note = a, c, g, or t
  misc_difference 19011: note = a, c, g, or t
  misc_difference 19012: note = a, c, g, or t
  misc_difference 19013: note = a, c, g, or t
  misc_difference 19014: note = a, c, g, or t
  misc_difference 19015: note = a, c, g, or t
  misc_difference 19016: note = a, c, g, or t
  misc_difference 19017: note = a, c, g, or t
  misc_difference 19018: note = a, c, g, or t
atgaaaacggtggtattgggcagcggcggctggggaacggcgctgtcgttggtgctgcaccggaacggacatccggtgaccctgtggtcccacgtgccggagaaggcggcgtatatggagcgggccagagagaacccccggctggagggagtccctctgccgccggagctgcgcctgacggcggatatgggctgcctgacggaagcggagctggtggtggtggcggtgccgtcctacgccgtgcgggagacggcccatgccgccgccccgctgctgcgccccgatacgctgctggtgacggcggccaagggcatcgagcgggatacccacctgcggatgagccagatattggagcaggagaccgggggagcctttcccatcgccgccctgtccggcccctcccacgccgaggaggtgggtcgtgggctccccaccggctgcgtggcggccagcgtgtctcaggcggctgccctcacggtgcaggacgcctttatgaacgaccgcttccgggtgtataccagccccgatatcgtgggagtggagctgtccggcgccctgaagaacgtggtggcgctggcctgcggcatctgcgacggtatggggtatcaggacaacaccaaagccctgctgatgacacgggccatggtggagctgtgccatctgggggagcggctggggggcgaccgccagaccttcggcggccttgcgggtatgggggatctgatcgtcacctgcacctccatgcactcccggaaccgccgggcgggcatcctgctgggacagggcaagtccgtggggcaggcgctggcggagaccggcggcgtggtggagggctactatgccgccgccagtatgcaccagctggcggaaaagaccggcgtggagatgcccatctgccggtgcgtctatgagatattgtaccggcagcggccggtgcaggaggtggcccgtgagctcatgggccgggccagaaagggcgagatcgaggacggctggcgctatcccgtgggataacgccggggaaggagggacgtatggagcggatcctgctggtggaggacgatgcacagatcacggcgtcactgtcggcatttttgcagagtgagggcttttccgtggagacggccaccggggagacccgggccaggcagctggtggagcagacggctccggggctgctgctggtggatgtgcagttggcggagggcagcggcttcggcgtgtgcgcctatgcccggagccggggtctgccggtgatcttcctcaccgcctccggcgacgagagcagcgtggtgctggggctggacatgggggccgacgactacatcgccaagccctttcggcccagagagctggtctcccgcatccgcagcgtgctgcggcggtacggcaaggagaagacgctggtgccgctgggcggtgtgatggtggatacggagaaggggcgggtcacacgggacggccgggatgtgtatctctcggcgctggaataccggctgctgctggtgtttctgagccaccggggaaaggtcctctcccggtcgcagctgctggaggagatctgggacgccgccggggatttcgtcaatgacaacaccctgacggtgtatatcaagcgcctgcggaagaagatcgagaccgaccccgcagacccacagatcatccggacggtgcgtggcatcggctacatggtggacgcatgagcatctggaagaacacggaggtgcggcggacggccctgtggctgctgctggccacggcggtgtgcgccgtggcggcggccctgctgtatcccatctgcggcctgctgacgctggggctgggggcggtctgcggggccatctggtacggctccacccggcggcgctaccgggaactggagcgcatgagccgggacattgaccgcattctccacgggcaggagcagcaggtgctgccccagcaggaggagggagaactggccatcctccgcagcgagatcgggaagatgacggtgcggctgcgggagaacgcccagcgacagcaggaggagcgtgtccgactggcggatgccatggcggatatctcccaccaactgcggacgcccctgacggccatgcgcctgaccctgtccctgctggagcaggaggagctgacgccccagcggcgtctggcactgatgcgggagctgaagaagctgacgggccgtatggagtggctggtggaggccctgctgaaaatggcccagctggacgccgggacggtggtgttccacccgcaggacaccacggcggcggagctggtgcgccgtgcggcggagccgctggaggtccccatggaggtgcggagcatccgcttcaccgctcaggcgggggaggagcggcttacctgcgacgtgccgtggagtacggaggcactgggaaatattctgaaaaactgcatggagcacgccgcctcatgggtgcaggtaacggcacgggagacagccattttcacagagatcacggtgcaggatgacgggccgggcttcgacccggaggagctgccccggctttttcagcggttttaccggggcaaaaacgccggggagaacaacttcggcatcggcctgagcctctcccgtcaggtgctggcccagcagaacggcacggtgcaggcggaaaatgtcctcaccggcggcgcacggtttatcctgcggtggtataagggcacgatatagatgccctcataagccccaccaggccggtgggaaaagtgcaggatgaaaagaaaatttaccttctattcataaaaaccgccgggaagtgtgaaatgacctgccgccgccggttgcattttgccgaggcttgtagtataatttcacaatatgtaagtccgcccaaccgggcgcagactgaaaaacaacgaaacggatcaaaccgactaaggagtgcgtatcgatatgcgaaatatacccttcagccctccggatatcacggagctggagatccaagaggtgtgcgaggccctgcggtccggctggatcaccaccggcccccgcaccaagcagctggaaaaggagctggcagagtactgccatgtggcgaagctggtgtgcctgaactccgctacggcggcggaggagatgaacctgcgggtgctgggcatcggtgaaggcgacgaggtgctggtgccggcgtacacctataccgccacggcggcggcggccatccatgtgggggccacggtgaagttcatcgacagccggaaggactcgctggagatggactacgatcagatggaacgggccatcaccgacaagaccaaggcggtgatcccggtggatctggggggcatcccctgcgactatgaccgcatctatcaggcggtggaggggaaaaaggcactgttctgccccaagggcgatgtgcaggaggcactgggccgggtggccgtggtggccgactgcgcccatgggctgggtgcctcccgtcacggggtgcctaccggcgctctggcagacttcacctccttctccttccacgccgtgaagaacttcaccaccgccgagggcggtgcatcggcgtggcgcacgctgccgggtcttgacgacgaggagctgtaccatcactatcagctgttgagcctccacggccagtccaaggacgctctggccaagaccaagctgggggcgtgggagtacgacatcgtggggccgtggtataagtgcaacatgacggacatcatggccgccatgggtctgaagcagctggagcgctatcccggcctgctggagcggcggcatcagctgatccagcgctatgatgaagccctgcacccgctgggcatccggaccctgccccactttaccccggactataccagctccggccacctgtacctgacgtggacccccggcatcggggaaaaggagcgcaatgagatcatcctgcggatggcggagcggggcgtggcctgcaacgtccactataagcccctgcccatgatgacggcctacaaggccatgggcttcgatatcgctgactatcccaatgcctaccaccactatgaaaacctcatcaccctgcctctgcacacccgcctctccgatgaggatgcggcctatgtgacggagcagtttgcggacatcgtgaaggagtacctccggtgatgctgcggaagtgggaggatctgccgcaggagatgcggacggaggaggttcgcccgtactatgacctgctgcgaaagaagcaggggagcctgctttgcaagcggctgttcgatattttggcatcgctggtgctgctggtgctgctgagcccggtgtttctggtgctggccattgccatcaagctggactcccacggcccggtgttttacaggcaggtgcgggtgacccagtacgggcgtgaattccgcattttcaagttccgcaccatggtgcagaacgctgaccgcatcggcagtcaggtgacggtcagcggcgacagccgcatcacacgggtgggcaaggtcatccgcagctgccgtctggacgaggtcggccagttgctgaacgtgctgggtggctccatgtcctttgtggggacacggccggaggtgcccaagtacgtggcccgctacaccccggagatgatggccaccctcctgctgccggcaggagtgacctccgaggccagcatccgctacaaggacgaggcggagctgctggacaaggcggaggatgtggacgagacgtatgtgcagcaggtgctgccggggaaaatggcatataatctggcgagcatccggcgctttggcttgggtcaggagctgctgaccatgctgcggacggtcaaagcggtgctgtgaccccctccggaggatacaaaggttgcaattccggtccgcagggagtataatactccgttgcggcgatagccggagaacaaaacaaagaggacgccgcctgcccccagcgggccgggtggcggtgagaggtcaactatggaagaaaagaaagaggtcacgatacaggagatccagagcaagctcctggagatcctgctgtattttcagaagttctgtcaggagaacgggctgggcttcgtgctggccggcggcacctgtctgggtgccgtgcgccacaagggcttcatcccctgggacgacgacgtggacgtgttcatgctgcgggatgactatgaaaagctctgccgtatctgggacgaaagggcggacacagagcactattcctgcgtccgctccaacgatcgattcaacatccgtcactccgccacggagatcaaggacaacaacaccaccttcatcaaccgccacagcgcagatctggacatccatcaggggctgatgatcgacgtgatcccgctggacgccgtgcccaagtccaagtggaagcagctgtggcagatggtggactccatgatgtactgctgcttcaatttccagcgtctgcccgcccacaagggcaaggtcacctactacgccgagaagctggcgctgacgctggtgccgtccttcaaggcccggtacaagctgtggaagggcgccgaaaagcgactgagccgctactcgctggcggatgcggagtacgtctcctccttcggcgagggcgctaccatcatgcgccagaggttccccatccggtggttccgccacccggcgtatctggagttcgagggccatcagatgccggtgccggaggactatgacaagtggctgaccatctcctacggcgactatatgcagctgcctcccccggaggagcgggtctaccgccacgatgcggtattcatcgatctggagcacagctacaagcagtataagggcatccactactgtgtggatgaaaagaaagcgtgagagtcatgtcgaagctgagaaatatgttctccacccggaagtgtatgcagatcgcaccggagacggagatgatgcacgagctgacgccggaggagctgaaggcgctgcaggcgtgctttctggagatcatcaaggacatcgatcgggtgtgtcaggagcacggcctgtgctatatggccgccggcggtactgccttgggttccgtgcgccacaagggctttatcccatgggacgacgatgtggatatcctcatgccccgtgaggatctgaaccgcttcgtggagctgttcgaggagtgcatgggggacaagtacgagctcaccacccccaattccgataagtaccagctggagagcatgatctccgccgtatataagaaaaacaccctgaaagcggcgtttctggactataacacgccgtttcccaagggcgttcacatcgatatcttcgccattgagtccgtccccagaaaccccattgtccggggcatcaagggcgtaacggccatgggcctgcaatacattgcggtatccaccctgttctaccactaccgcagcccggagaagaagaagttcttcagccagtccttcgccggaaagttcaactatggcctgcggtgcacagtgggcttcctgttctccttccgcccctataagaagtggggcgacctgtttgaccgcttcgtgcggtgcaagaaggacacgggattgtgggccgtccccacggatatcggccactatttcggacatattatgcccaaagaggtatattatccccccatcaaggggccgtttgaggacttttccatcaacctgccacatgatccggacacctatctgaaaaatcagtacggcgattactgggtcatcccgccggaggccgaccgggagaagcactattccgtgggtttctgtctggactgcgccgccgaggaacagaaaaaggacggagcacaggagcaatgagcacgcatcccattgacatcgtgatcccatgggtggacggatctgacccggtctggcaggcggatcacgccaaataccgggcctccaaaagcgccgacaatcaccccgcccgctaccgggagtgggggctgtttcgctattggttccgaggcatcgagcagaacgccccgtgggtgcgaaaggtacacctgctgacctacggacacctgcctgcatggctggagcctgaccatcccaagctgcatatcgtcaatcaccgggacttcatcccggaggagtatctgcctaccttcagctcccacgccatcgagctgaatatgcaccgcatcccggatctggcggagcacttcctctatttcaacgacgacgtgtacctgatgaagccctcccgaccggaggatttcttccgggacggcctgccctgtgacacggcggtgatgggcgtcatcaaaaacaacgacaccgccaacttcatgccctatatcatgctgaatatgatggcgttggtgaacatgagcttcgataagcgcagcgtcatccggcagaatttcggcaagtggttctatcccggctacgggaagggcctgctgtataacctgtacctcctcccgtggggggacttcacaggcttccgcaattaccactcctgcgtctccttctgcaagagcacgctggaggaggtgtgggacaggttcccggaggtgctggacgccacctgccgccacaaattccgggaccgggcggacgtgaaccagtatctgttccggtactggcagctggccagcggccggtttgcccccaaaaagcccgacagcacctatcttaccatcggcaagcagagcgagtcggaggtggagcggctgctgcggggcgggaagtaccgggtggtctgcgtcaacgacgaccccatggacttcgatttcgatacggagcggcagcagctggtggatatcttccagcgggccttccccaggccctccgcctttgagcggtcatgagccgctcccgaaactgagagaacggacggatgctatgaaaaagctctcacgagccaaaaataccatgcggaataccctttggggcgccatctaccgggtggccaccctcatcgggccgtttgccatcaagaccatcatcatcaaggagctgggacaggagtataacggcctgtccaccctgttcacctccgtgctgacggtgctgaatctggccaatctgggctttaacagctccttggtgttcaccatgtacaaggccattgccgaggatgacaagccggccctgtgcgccatgctgaaattctaccggaaggtctaccgcatcgtgggtttggtgatcctgggcatgggtctggcggtgatgccgtttttgccatggctggtgaaaaacgagtgtccgccggatgtgaacctgtacgtcctcttcgccatctatctgtcggagagcgtactggattacctgatgttcgcctataacaacgccacgtttaccgcctttcagcgcaacgacgtgacgctgaagatctccaccgtgcgctatgtggtgcagtataccctgcaggcggcggtgctgctgatcttctccaattactatgcctatatcatcctgctgccgctgatggtgatccccaacaacgtggcggtgtatctggcggcccggaagcactacccggacatcgtgtgtcagggtgagctggacccggtgaccaaaaaggacatctataagcgggtggggacgctgttcggccataagctgggcaacacctttctggtgagcatcgacagcatcatcatctcctcctttctgggactgacggcgctgtcgctgtatagcaactattactatatcctcaccgccgtcaatggcctggtggagatcgtcaccaacggcagcctctccggcatcggcaataagctgctgacggactcccgtgaggacaactaccggttcttcaaaaccatgacctatggctgggtggcgctggtgggcggcgcagcggcgtgtatgctgtgcttttaccagcccttcatcgccgccgtgtggcttggcccggagtatctgctggatgaacggctgatgatgctcatcgtgctgtacttcttctcgtggatgttccgcatcatgcagctgacctaccgggatgcagcgggcctgtggacggaggattggctcaagccctatgtgggcatggccgtgaatctggtgggcagcatctggatggtgaaggccaccggcagcatcgccggcgtgctggttcccaccattctggtgttcttcttcatctataccccgtgggaagcgtgggtggtggtgaaataccagttctaccgcagctggaacgaatacatgggaaagctgctgggctatgtgctgctggcctttgccgcctgcgccgcctgctacggtgcgtgccggtggctgtcgccggacaataccatcctgtcactgctgctgaggtgcgtcatcgtgggcgttatttaccccggcatctggctgggcgtcaccggacgcacggcggagtggaagcagctgtggggcattctgctgcgctttttgcccaaggggaaaaaggccgcataggccggtggcataatctatacaaagtaggagttataccatatgcaaaagagagaactgcggcgtgcggtattcggggatgagagctgtatcggacggcttccgtggctgaacacggcggtgctggtgtatgtaggcgtgacggtggtgagctttgtgctgctgcagatcgccccggtgctgacgtggatggccaaaaccccgctgtaccacatttccacctatttgggactgataggcgctgtgctgatggcgctggatctgttcaccaaccggggcctctggcgaggtatctggtgctggctgctgtatggcgtggcctttatggatgtcatcgcctccctgcgtaccatgcgctacggcgtgaaggacaacctttttgacctgtgctgggtggtgatccagtttgcgctggtgtacagtctggcccagcgggtaggcaaggaacggatgcgccggttcctgcggaacctgttctatgtggtgctggtcatctggggcattgcctgctgcgtgggcctgtatcaatatctgttccgcatcggctatacatatgtcgccaatcccaataccaccagcccggagctgacacggcagggctattatcagagccgcctgttcggcctgttcatgggtctggactatgcggcatataccagtatgttcctgtttgtcggctgtatgcagggggtcgtgacccgtgggaaacactgggcggcccgtgcggcactggccgtggcggcgctggtgctggtcacgcacgtgatcctcagcgtgtcccgcagcgccctgatcgccttgatcctgtatgccttctgcttcacggtgctgctggtgcgtaaccgctgcggcagtatgaagcagttgaaacggctgggtgtcagcgtgttggctggtgtgtgcgccgtggtggtgtgctggggctgtacggagggtatccgggctggtatgcagcatatggccgtgggtagcgtcatcgaggagccggatgccatcgagcggtcacaggagggcgatgtctccaacaaccgcttcgagatctggagggactatctatcccttgccggtgagatcggccctgcgggactgtccctgtccaactacaacgactatatcggcgaccggcatccggagatgtacatcgtgcgctactttaccgatcagttcaaggatacggtgaaaacggatctggtctacgagtcccataacaactatctgtttgtgtttatcagcacaggctttgtgggagcagggctgttcctgtgcttcctggtgctggcgctggtgcgggtgattcgctatatcctgcggcatccgcagctgtccctgtggacgatcacgacactggcggtggtggccttcggactggtggaggcgctgttcatgaacagcgtattcctgaagatcaatgatgtgtcctttattttctggctggcgctgggtgcgctgatgctggaaacggaagataaggcgcctgcggcagagcgtactctgtgacaggtaccggtgaaaggagaatatagtttcatggacatcaaaaaggatcatatcaactttgcggtgggtccggttcagatctcggaggagatctcccggatcggtgcagaccccgtgccctacttccgcacgccggacttctccgccctgatgaaggagaacgaggcgctgctcaaggagttcatggatgccccggaggatgccagagcggtattcctcaccggctccggcacggcttccatggatgccgtcacccagaacgtgttcaccaaggacgaccggctgctggtggtggccggcggcagcttcggtcaccgcttctgcgagatctgcgaggtctacggcatcccccatacggccatcgagctgcggcagggccatgccctgacccccgccgatctggccccctatgccggacagggctacacgggctttctggtgaatatgcacgagacctccaccggcgttctgtacgatatggacatgatctccgccttctgccgtgaaaacggtctggtgctggtggtggatgccatcagtgcctttctggccgacgacgtcagcatgaagcgctggggcgccgacgtggtgttcaccggttctcagaaggcgctggccgtgcctcccggcatctccatgatggtgctcagcagccgggctgtggagcgtatctacgccaaccgccccgcctgctactatctggacctgaaggccgccctgaaaaacggggagcggggccagacacccttcactccggcggtgggcatccttatccagatcaatgcccgcctgaatcagatcaaacgggacggctttgcaaacgtacaggctcagatccgtgccattgccaaggatttccgctcccgcatcgggaagtatcccttccacatcgtgtccgattccctgtcctatgcggtgacgccgctgtctcccaacaatccggaggtgtccgcccaccagctgttcctgaccctgaaggacgagtacggcattatcatctgccccaacggcggtgagctggcggataaggtgttccgggtgggccacatcggccacctgaccgtggaggataacgacgcactgttccgggcctttgatgacctcatggcccgtgggattctgaaggcttgatcgatatattacaaggaggaagaaacatgaaagttctgttgcttgcggcgggtcgaggcccccgcatcagccggtatttggccggcaaccccaagtgtaccgtggacatcggcggtcagaagctgatccagtacaccatcgagctgttccacaagaagggcatcaccgacattgccatggtgctgggctaccgggcggaggtcattcaggagacgctgaaggactacgagggtatccgctacttctataaccccttcttcgacgtcaccaacagcatcgcctcggcgtggttcgctaaggacttcctgtcccagtacgatgacaccctcatcatgaacgccgacgtgtatctggaggagacactgctggaccgcattctggagtgccacaagtccccggtgatgtttgccgacggcacccgcaaggaggaggccgactacaagtataagtacgagaacggcctgctggtgaagtacggcaaggagctcaccggcagcgatatcaccggcgagtacatcggcatcggccgcttcagcaaggatttcatgccggagttcatggagaagctggacggcatgatccgcacccagcagcacagcgtctggtgggagaatatcctctatgaaatggtgggcaagcgcccggtatacgtggaggagatggacggcctgttctgggccgaggtggactatgtggaggattatgagcgcatccttcgcttccgcggctataaggcagacttctccctgaacgtggagaagatctgaggaaggacaggcggcccggcgtcagccggagccgccggaaggaagaacggatgaaacaagaaaacggcaaaagagccatgaccgccggactgcggcggacgatggtgatcttcgtgctggatctgctgtgcatcgccgggtcctttttcctggcgctgtggatgcggtttgagttccgtctgggggccatccctcagatgtacctcaacgagtatttgaagatcatcgggccgtggatcgtcatctgtctggtggtgttccagctattccggctgtataacagcatctggagctttgtcagcatcgacgagctgttccgcatcattctggcctatggcgtgctgctggcggccggactggcctatgtgctgattttgaagatcgatatgccccgctccttctactttgcgggctttatcatgagcttcatgtccaccacggcgctgcggttctcctaccgattcatgcgccagttgatggcggggatcagcacggagaagagcgagcgggaccgcattctgatgatcggcgccggcgaggccggacgccagctgatccgggagatcaattccaatccccggctgggcagccgggtggtgtgcatcatcgacgacaaccccagcaagcgccgccggtatctggacggtgtggagatcgccggcgggcggcaggagatccccgatgcggtgaagaagtaccaggtcaataagatcatcttcgccatccccacctgcgacggacaggatcgcaaggagattctggacatctgcagcaagaccggctgccgggtgcaggcggtgccggggatgttccagctggtcaacggcgaggtcagtgtcagcaagctccgggacgtggagctgcaggatctgctgggccgtgaccctattcaggtgaatctggaggagatctgccggtatatctccggcaaggtggtgatggtcaccggcggcggcggttccatcggcagcgagctgtgccgccagatcgccaaaagcaaccccgaacagctgattatcttcgatatttatgagaacaacgcctacgatatccagatggagctgtgccgcacccatccggagctgaatctggaggtgctcatcggctccgtgcgggacatgggccgtctggacgatgtcatggccaagtaccggccggagctggtgttccacgccgccgcccacaagcacgtccccctgatggaggacagccccaacgaggccatcaagaacaacgtgttcggcacctataaaatggccatggcctcggtgaagtacggtgtgaagaagttcgtgctgatctccacggataaggcggtgaaccccaccaacatcatgggcgcctctaagcgcctgtgcgagatggtggtgcagatgatgaaccgccgcagccccaatacagacttcgtggcggtgcgcttcggcaacgtgctgggcagcaacggcagcgtcatccccttgttcaaaaagcagatcgctgagggcggcccggtaacggtgacgcacccggagatcacccgcttctttatgaccatccccgaagcggtgtcgctggtgctgcaggcgggatactacgccaagggcggcgagatattcattctggatatgggccagccggtgaagatcgacaccatggcccgcaaccttatccgcctgtccggtcatgagccggatgtggatatcaaggtagtctacacgggcctgcgccccggcgagaagctgtatgaggagatcctcatggcggaggagggcctgcaggagacctccaacaagctgatccacatcggaaagcccatcgtcatggacgacgaggagttctgccaccagttggatcggctggagaaggcctgtcaggaggagacggaggacatgaaggacatcgtggcctcggtggtccccacctatcgccgcaagaaataattctgcaaggacaaaagcctttcaaggacaacggtaagagcaagagcagccccgacggaattttccgccggggctgctctttcactgtcgggagactgctctgtaaggctgctctgagagactgcccttccgccgggacggttttgtgacgtttttgtaatgaaacctgtcaccgaaacgtcatcttcgtgtggtatactggacaacagaaagtcaaggagggacacgactatggaactgatgcagatccagcatctcagtaaggtatacggacagggtgaaaatcaggtgcgggcggtggacgacatttccttcaccgtagagaagggggagttcttggccatcatcggcccttccggctccggtaaatccactctgctgcacattttgggcggtgttgaccgccccacctccggcaaggtctttgtggatgggcaggatgtctacgcccagaacgaggatcagctggccattttccgccgccggcaggtggggctcatttaccagttttataacctgatccccgtgctgaacgtggtggagaacatgaccctgccggtgctgatggacgggcgacaggtgaatcaggagcggctggaggagctgctggacgtgctgggtctgcggggccgggagaagcacctgcccaatcagctctccggcggccagcagcagcgggtgtccatcggtcgggcgctgatgaacgccccggcggtggtgctggcggatgagcccaccggtaatctcgacagcaagaacagccaggagatcgtggagctgctgaagatgtccaacaagaagtacggccagacgctggtcatcatcacccacgacgagaacatcgccctgcaggcccaccgggtcattgccatcgaggatggccgcatcacacgggatgagcgcatccgggaggtgctggaatgaacgtctttcaccgctacacccggcaggctctgcggaaaaaccgctcccggacgtgggtgaccatcgtgggcatcatcctgtcagtggccctgttcaccgccgtgacggagggtgcttacagcggcgtgcagtatctcgtgggggccgccgagtacaccgtaggccggttccacggctgctaccagaacctcacggagcagcaggcgtcgcagctgagccgggatgaaaaggagatcacggagcagtctgcgtggcagctggtgggctgggggcaggtaggggcggacaatgcttataagccctatctgcggatcatgtccatggaccccaccctgccggacctgctctccatccgactgacccaaggccgcctgccggagaaggccggggagctccttctgccggagcatctgtggtccaatggcagcgtccgccatgcgctgggggacaccatggagctggagctgggccaccggacgctgggtagggaggagctgacggccgatgacccctatacgcagggggagacgctgacagataccacgccccacacctacactgtggtgggcttttaccagcggctggatatgacgacggagcccttctcctgccccggctatactgccctgacctgtcaggagcagggctatcagacggatgaatttttccgggtggcccatcccagccgcttttacagctatatggagggaaacaacgagaaatatccggggttggagtggttttccaattccgacctgctgaattactacggcgccaccaccttcttctccgtgaaccggatgatctacagctttgcggtgatcctgctgctgatgatctccttcggctcggtgtcgctgatctataactccttctccatctccgtggcggagcggacccggcagttcggtatcctgaaatccatcggcgccacccgcaagcagattcgggacagtgtcctctatgaggcactggtgctgtgcgccgtggggatcccactgggtctgctggtgggctgtctgggcatcggcatcactctgtactgcctgcgggacagcttcggattcctgatgggggcgagcggcaacgccctgcaaatgcactttgtgctcaacggctgggcgctgctggcggcggcgggcatcggccttgtgacggccatcatctcggcgtggatccccgccaagcgtgccgtgcgggtgtcgccggtggaggccatccgccagaccaaggacgtgaagctccggggtcgggaggtcaggacatcccgcctgacggaaaagctcttcggtttctccgggatgttggccgccaagaacttcaagcgtaaccgcaagcgctatcgctccacggtggtgggcctgttcctcagcgtgacactgttcatctccgcctcctccttctgcgcctatctgacggatgccgtagaccaactggggggcgacagcacactgggcgtgcagctgtattacagcgagtccctgccggagggcgtgacgccggagcagcggctgggacagctggccgccgccgacggcgtggaatcgggcttctacaccgccgacagctacgccagcctgcactttgccaaggaggacatggatccggactactggaaggacaccggcctggagggagaccgcagcgccgccatgtacttcctccgggatgaggacttccggcagctgctgcgggacaacggcctgccggaggaggattacttccgtcccgatgcacctcaggcggtggcgtgggatatgctggacatctggcgcagcaccgagggcagtaagtacaataagctgtaccattaccacctgctgaacggcagcagcctgcccatcaccggaacggagagcagctatcagcccatggatggctggttcaccgagggagaccgcatcacacgggacggtacggaatatgtgctgtactatccggaggactatatagacgattactataccgcccgcagcgagggggagaccccggacgagagccgggcacaggcggtgccggcatcggaggccgtcctcacccggagctataccgtgggcgctattttaaaggaggctcccgatttcctgggtaccggcgacctgtatctgctgtacccgtacagtatgtatgaggccgtcaccgggcaggctcccgccgccgacgccttctggttccggagcagcgaccacgccgcctcctacgagagcatggggcagatcctgatggagctgggcaacagccgctctgagctgcaggatctggccgccaacggcgagaaccagcgggccatggtgacggtggtgaacgtgttttcctacggcttcatcatcctcatctccctgatctccatgaccaatgtgttcaacaccatctctacctccatcgctctgcgccgccgggagttcgccatgctgcggtccgtgggactgacccagcggggctttgcccggatgatggactacgagtgcatcatctacggcgcacgggcgctgctgtggggactgccggcatcggtgctggtgacctatggcatctatcgcagcgtggcccagagcatcgccgcccggttttacatcccgtggtacagcgtggccatcgccgtgggcagcgtgttcgtggtggtgttcgccaccatgctctacgccacccggaagatccgcagcgaaaaccccatcgaggcgctgaagcaggagaacctgtaagccccgtctcgcaagccgaagaaacagcagccccggcagaactgccggggctgctgtgcttctgacactcgtgatcgccgcctgcgccctgcggcgaagatggggattgacaggcggcggccgggaggctatcatgaggacagaaagaaaaaggagggccgccatgtcacaggtcaccaagcgggcgctggaggcgtcgctgaagcatctgctgctgcaaaagccgctgaacaagatcaccatcaatgatattgcggaggactgcggcatcaaccgcatgaccttttactaccatttcaaggatatctacgatctggtggagtggagctgtcaggaggatgccagccgggcgctggcggggaaaaagacctacgagacgtggcagcaggggcttttgcagatctttcaggcggtgctggacaacaagcccttcatcctgaacgtctatcgctccgtcagccgggagcaggtggagaactacctctaccggatcacctacgacttgctggagggcgtggtggaggagaaagctcaggggatgtccgtgcggcaggaggacaaggagctcatcgccaccctctataagtacctgttcgtgggactgatgctggactggatcaagggggacatgaagggcgacccccaggtcatggtgcagaagctggagctggtgatccacggcagcgtggcagcggccttggatcggnnnnnnnnnnggacggacaagcctgcatcaaacggggcggaatgataaaaaactgaacatctcccatcccggtgataaaaaacttatcaccgggatttttctgtttattgaacaaattgcgcccaaggtgtatgttttcatcatcagaggaaaacataccagcgagacgccgccgacctcccgtgtgcgtgctgagaaggggacggggcggcgcagcggtcaacagaaaggagcgcatttttatgtattattccagcggtaactatgaggcctttgcccatcccaggaagccggagggcgtggacaacaaatccgcctacatcgtgggcagcggcctggcggcgctgactgccgcctgctatctggtgcgtgacggccagatgaagggcgagcgggtccacattctggagaagggtcccactgccggcggcgcctgcgacggctggaggttcgagaacatcggctacgtcatgcggggcggccgtgagatggacaaccacttcgaggtcatgtgggatctgttccactccatcccctccattgagacggagggcgtcagcgtgctggacgagtactactggctcaacaaggccgaccccaactattccctgtgccgggccacggtgaaccgtggcgaagatgcccataccgacggcaagttcgatatctccgacaagggtgccatggagatcatgaagctgttcttcacccccaacgaggagctgcaggacaagcgcatcagcgacttcttcgacgacgaggtgttcggcagcaacttctggctgtactggcgcaccatgttcgccttcgagaactggcacagtgctctggagatgaagctctatatccagcgctatatccatcacatcggcggcctgcccgacttcaccgccctgcgctttaccaaatacaaccagtatgagtccatgatcctgcccatggtgaagtatctggagggcttcggcgtccagttccacttcggcgtgcaggtgaccaacgtggagtttgactgcaccgcccatcggaaggtggccaagcgcatcgacgtcatccgggacggcaagaacgaggccatcgacctgacggagaacgatctggtgttcatcaccaacggcggctgcgtagagaactcctccatgggcagccagaacacacccgccccctacaacaccgagatcaaggagggcggcggctgggatatgtggcgcaagatcgccgctcaggatccctccttcggccatcccgacaagttctgctatgatccggagcagaccaactggatgagcgccacggtggagacgctggatcagcgcatcatcccctatatcaagaacatctgcaagcgggatcccttcaccggcaaggtggtcaccggcggtatcgtcaccgtgaaggactccagctggctcatgagctggaccatcaaccgccagcctcagttccgccagcagcccaaggatcactgtctggtgtgggtgtatgccctgttcaccgataagcccggtgactatgtgaaaaagcctatgcgggagtgtaccggtaaggagatctgcatggagtggctgtatcacatcggcgtgccggagagcgaaatcgaggacatggccgccaatagcgccaacaccgtccctgtgatgatgccctatatcgacgccttcttcatgccccgtgcctacggagatcggcccaaggtcgtacccgacggcgctgtgaacttcgccttcctgggccagtttgccgagacaccccgtgacaccatcttcaccacggagtactccatgcggaccggtatggaggccgtgtataccctgctgaacgtggatcgtggcgtgccggaggtctggggcagcgtatatgatgtccgggatctgctggatgccaccgtgaagctgcgggacggcaagaaacccatcgatatggagctgaatctggtggaaaagatggccctgaagaaggtcctcagcaagatccacggcaccgatatcgagaagctgctgaaggagtatcaggtcatctgaggcccgctgggtcggctgctgcggcagtcgatgaccttctgaaaacaaaaaaaggagaggccatgtcacagccctataaggcggtaatttcaaaatacggaaagtgacattcgcaaaggcaagcaataagactctggctcacaaggtcggagccttattgttttctgcctgtcatatatcgcatctttgtgcctcggcagttttctgcgtatcatgaaaacgtcaggaggtgtcggacaatgagaaaacaggaatatcacacctatctaaccgagcaagagcagttggatgtaattaaattgcttattgatctgaatactgcccttgccgccaaaggcaaatatactgatgccgtagatgacttgctggtgaagttgaccattgcaaggagaaagaaactcaagatctcctacatctaataagtatgattgagccgcttatctcctgatcagagcatggctttgtgcgatgagggcgatgagaggaaaccggcagcagaggggaggcccttgcgggtcaaagaatttgtaggcggtaaaaataacggatccccattttgttttcggcatagaacggccctcctgcgttcatgggagctgctctcatatcccggagcgcaaaaaagaaatgccccttcgccgtccgacatgggcagagtgatatttatgatctcacattctctatgggatacccggtcagatccgccggatatatgttctgttataaccgaaggatgatccatctggcaagtggtttttccggaggttttttcggtcgagaggagggagatttcaacttgacgcagggtaacttttgtattatggtgtacttaccatccatgaacaagggtaaacacggttttgccgggcagaaatccgcccatactgcgtcgatcctcttgaccatacggaaagtatgctctgcgggtctttccttgtctggccgcatttctgctccggcaaaactgcaaggcccctgccaacgatggatcttcgagtgatttttgttttttgagatgcagacggcgcctgccaagacgaaaaggacaaaaggcgccggaaagacacgctgccaggcgtgattgccctcgtccatcgatggtaccggacgtggtaccaaaaatggacattgacaggacaaaattcctgtcagcgatcggtgagaaaagtgtccggttcgtgtcagaaatcggccagatcgggggagaccttgttgtgaccgtttcaccgcacctgctgccaagagcatttcggcagcagagaacatttcggcagcagaggacatttcagcagtgaaggatatttttagtaaggaggattttccatgcctaccatcaaaaccggcatccgcttctccaaaaagcagccgctgagcgagcaggagctgcggcagcttcacgcctactggcgtgccgccaactatctgacggcctgccagctgtatctgatggataacccccttctggagcgcccgctggtcaaaagcgacctcaagcagaccatcgtgggacactgggggacctgccccggccagaacttcatctatacccatttggatcgggtcatcaagcgcaacgatctggatatgatctatctctccggtcccggccacggcggcaacgccatggtggcgcaggactggctggacggcagctataccgaggtctatcccaacatcacccgagacaaggaggggatgcagaagctcttcaagcgtttctccttccccggcggcatccccagccatgtggcgccggagacccccggctccatccatgagggcggcgagctgggctactcgttggcccacgccttcggcgccgtggcggataaccccgatctgatcgctgcctgtgtggtgggcgacggcgaggcggagaccggcccgctggccacctcgtggcacggcaacaaattcgtcaaccccatcaccgacggtgcggtgctgcccattctgcacctcaacggcttcaagatcgccaaccccaccatcttctcccgcatgagtcacgaggaggtggagtgcttcttccgtggctgcggctgggagccgtacttcgtggagggcgacgaccccatggtcatgcaccagcagatggcggcggcgctggaccgggccatccgggagatcaagcgcatccagcgggaggcccgcaagaccggcgaggccaagcggccccgctggcccatgatcgtgctgcgcacccccaagggctggaccggccccaaggaggtggacgggctgccggtggaggactgctggcgagcccatcaggtgcctatctccatggggacagacaccgatcggcacctcgcccagctggaggcgtggctgcgctcttataagccggaggagctctttaaccccgacggtacgccggtggagctcatcgcctccttcccgcccacgggccgccgccgcatgggcgctaaccctcacgccaacggcggcctgctgctgcgtgacctgcggacccccgatttccgggactacgccgtggacgtcaaggcccccggcgccgtggaggcgcaggatatgtatgtgctgggtacctacgtccgggacgtgatgaagctgaacatggagtcccgcaacttccgcatcttcgcccccgacgagacggcctccaaccgcttgcaggcggtgttcgaggtgacgggccgccgattcctggaccagcagatccccggcatcgacgaccatctggacccggacggccgggtcatggactccatgctctccgagcatttctgcgagggatttttggagggctacctcctgacgggccgtcacggcttcttcgacagctatgaggccttcatccgcatcgtggactccatgttcgcccagcacgccaagtggctgaagatgtgcagcgaactgccgtggcggcaggatatcgcctcgctgaactatattctggcctccaacgtctggcagcaggaccacaacggctttacccatcaggaccccggctttttggatcatgtggccaacaagaaggccgacgtggtgcggatgtatctgccgccggatgccaactgcctgctgtcctgcttcgaccactgcatccgcagccgaaattacgtcaatgtcattgtggccagcaagcacccccggccccagtggctgaccatggagcag

SEQ ID NO: 400 - DNA, 9140 bp, unidentified
  source 1..9140: mol_type = unassigned DNA
aaaagtatcctgaggggttttcctttgaaagactatattgaagaacgagctattgggatagccaactatatcatcgaccacaacgccacagtgcggcagacagcgaaggcgttcggcatctcgaaaagcacagtacatgcggtagtaacaatatggaacgacatgaaagcaaaatcatatggaaaattgaatagaactgaaacaagggcactctcgggtagatatcagggagtgcttttgctataatgaaatcaggtaaccttgagtattggtgaggggagatgcaaaatgacaggaatatatgattgctttggttatggctctggctatgatgtctcttttgaagaaaggtacaaattgattagaaaatcgggatttgattgtgtaatgttgtggtggagcaatcagtttggcagaggagacggttatcaagaggatgtaagattagccagaagagctggtttatttgtagaaaatatccatgcgcctgtgcatgagcagaataatctgtcactggacaatttgagtggtgaaggcgtatttcaaagttatctacaatgtgtagcggattgctgtgaatatgatataccgaccatggtgatacatttgccaaatgataataatcctttaaatcaaacaggaatcagacggttggcagaacttataaacaaggcagaacaaaagaatattcagattgcttttgagaatttaagtaacattaaaaatttgaaaatagttttaaataaattcacttcaaataatgcaggctattgttatgatagttgtcatcatataaattatgcaccggatgaagatttgttgggagtgtatggaaaccggctgatggcaattcatttacaggataacggcggtagccataatcaacatcaattaccattcgacggcaatattaattgggatacagttatggagaaaattgcctgtacaggataccggggagctacaactttagaaccaatgaattgggattattctcatttagatatttgtcagtttttggaattggcttatgaaagggcaaaaaggcttgattacttgcgaaaataatgtaggtgatgaaaggatggaaacagacggggagtttaatcagatttctgattgattctgagggtttgggagatacgcccaacaagcaaaaatgcattttgtgtgtacaaatgcactgcttgccaagttgtgaatatagaattgattgtaaactggaatttagaaaaaacaaggcagagaagaggatgttgatcataaaaatgtatgcgcattagaattgagacgcttgaaaaggtttagtaacataaaatcttttcaagcgttttctttcacttttacggctttgaatggaatatgatgtagtcaggatcggtgtaatttttgaaaaagtatggtggaaatggacaaaagtccagtattttgggaacgtaatttgatttcaagtggattatgcttagattaaataaaaggtctggtctaatctaagaatccttctcatagtatgggagagaaggacaggcgaggtaagggggtgtagctttcgcttgaaacggacgaaattaaattatcgttttcataatccaaattcagcggaagatactgcagatttcctgtgcaaactcttaatagaagtaaatgccgggaaggtagagagggcaatagagaaaactgcattgtatgcagagagtggggattacatattagaaaatttatcggaaaacaaggaaaaattatttgtggggtaagaggagcaaggtgagagccttgctttttgctttgatatctaaaagaaatgaataatcaacacttaaatgagaaaaaaacacgtttaagtgttgattattttgaaaaaatgcatataataaaaaatagaaaagaagatgaggtagcaattatgttgatacaatttaattttaaaaattttagatcttttagagaagaagtaactttggatttgtctgccactaagatgacagaattttctgaaagagttgtgaccatcggaagtgaaaagatactgccgattgctgctatttatggagcaaacgcaagtggcaagtcaaatatatacagtgcatttgagtatatggctgagtatgtagtggattctttcaagtacggagatgaggaagagaagtttgaggagtatagacctactccgtttttgtttgattccacgtcagcagatgcagagtccagttttgaggtctattttactattccaggagataagaacgagaagacatataattatggattttgcgttgatcaggaaggtgtaacagaggaatggctgaattctaaggctaagacagccagaaagtacagtacagtattttatcgtggaaattctgacagtgaattagatttatcaggcttgccaaagaacagcagggataatataaagattgcgctggaaaagcaggtgttgattgcttctttaggagctaagttaaaaattagcaaatgtaaggcaatcagagactggttcttgataaatgaatttgcagattttggtgatccggttactaactttttcttatctcatagattgccaagaggctttgtggatgataagaacgttcagcagaaggttgtagaatactttgcatcttttgatgaacacattaaggatttcagagtagaaaaggttccgaatgatggcgagtcaaaggaagataaatataagatcaatgcacttcataagatgattgactctgacaagatggcagaaattcctctgggtgcagagtcggcaggaacattgaagatgtttgctctttatccggaattgcaggaagtattagaaaagggaagtgtattttttattgatgaattaaatgcacgattacatccgcttttggtaagaaactttttgcttacattcttgaacccgaatattaatgttaaccatgcgcaacttgtatttacaacgcatgatacctggcaactttcaaatcagttgctgcgtcgtgatgaaatctggtttgttgagaaggatgatcgaggtgtttcaacattatattctcttgcagattttgtggatgaggatggagcacgtattcgtaaggacgaaagctatgagaaaaattatctgattggtaagtatggtgctattccgaccttaaagagtattgatatgtttaagggtgctcaatgtccgggggacattggttcagcaccgaccgaagtggaacggagagattgagcatggcaaaaggggatagaacagggaacagaaagacaagagagcaaagaataacaatcaaagtaccggaattgggatattacttaatcgttacagacacagaagggacagaacgttgcttttttacaggattacatcaatccttgccggaaaaagttagaaacaaacttgtcattaaagtcgtagaaacaaagacaagaagcatgattgataaatgcctggagctaacagcttatgaggcgcaatatcgtattccttggattgtgtttgacagagatcaggtaataggatttgataaaatcatcgctgaagcagagaaaaaagacatacaagtaggatggtcgaatccatgttttgaaatatggatgtatgcctattttggtgcaatgccggcaattcaagattcatggacatgctgctctgagttcgggcgagtatatgagagcaagacgggacagaagtattccaaggcagatgaaaagatgtatggaaaaatttgccgtgtgggaaatgaggtaaaggcaatacggatagcacagcagaagttggaacagtgtgaacgtgaaggtaaaaagaaaccatcagagatgtgtcctgggacgacggtgtataggttggtaggagagattaaggaaaatgcaaatggataacaaaatacgaaaaaagtcagatatagaaggagtagatgaactttatgaacaccttgccgaaggtatcagtagcatgaaatccggtgaaatatatactatcgaagaagcctggcaggaaattgaccaactataatgaaatcaaccacaatccctatcataacccctcagatactttcatacactgtaaaaaagtattctgaggggttttcctttgaaagactatattgaagaacgagctattgggatagcgggctatatcatcgaccacaacgccacagtgcggcagacagcgaaggcgttcggcatctcgaaaagcacagtacataaggacgtgacggagcggctggtgcaggtgaatccgtcgttggcgaaacaggcgcggaaggtgctggatatcaacaagtctgaacgacatatccggggcggactggctaccagagaaaaatatctccatcagcactagatgttcgggcaggcaatagcttctgtacgggaaattatcttgaaatggctgatgacaccttatataatgaatgcatatcacgtattacatttgtgaggggagaatacgatggcaacagattttttgaatgatgcacggagagagatcgaaggacggacagaagacttttacggggaactgaaagccttctatcagggaaatgcaaaagcagagcagaacctgatggaacagacgacacagcccttttggcagagcctttgcttaagtgggaaaagattacagcagcgggacctgacggtggatatggagatgcaggaaccggtgcggccggcggattacgatggcccgaaaaaggacggctatgattacacctgccaccggaccaaagctgtgaagatgagacgtacctattaccgtaaagggaaaaaaatcgcgaccctgaagacaccggagatcgtggaagccaattttttgaaagcggatgtgcagggggatatggcgatctgcccaaactgcggtcatgaaggaaaattgtccagctatatcgatggctgtgatgcctgtggagcaaagtttctggtcagtgatttcgagacgaaggtatccggcttttcgttggaagaggacgcaaggcagaaaagcatttccaactttatcaaagccggagtgacggtaggaatcgtagtggttgcccttgcactgctggcaatctgtgcgggcggcattatgtttttactgctggctttggggagaaatggttataacgcggtcaaagcggcagcggcaatgatgcttggtatcggattcgctccggtgtttttccgttctttgtttttcatggcgatcatattcgtagtaatgattgttgtaatggaggaacatagaaaaccgaaaattcaggacgagtcaaaagtaaaggcactgatcccccaattttccacaggtaatttcctacagaatctggagtaccagctacggatgatccacatggcagataccgcagagcaggtgcgctttttcgcggtctgtgatctgacaggtactgtggagcggtatcagaatgtggtggattgctgtatctgcggcgtacgttttttgaaagcggaagcggtggaggaccggtacaggctgagcgtggaagtgaaaatgcgcctgacgcaggatacgggtagtaaaattcgcaaccgctatgagaaactgcggctggaactggaaggcagacaggagatcgtgacacagcatggcaaggcacttcgggaatataaatgcccgaactgcggtggcagtgtggatatcttaggcggcggagtatgtgactactgtaatgtagcagtggattatcggaatttcggctggatcatcacatcctatacgaatctgggacagccggagaacccctatgccaaaatactggcagcagccctgggcatctacggaattatcctggctttcagcctggtgctcatgatctgttccgaggacggaaaagaaaccctggagatctggcagagcatcggcaggtcatcggaatacctggaagccgtgaagcaggatattgtatatccggatgatgtgctggaaggccttgcggagacggacagtgaggaaagcatatttgcttccgcgaagacctatgcctgcggagacagcgaggcagtaaaagaagcttattacgaagcccttttagagagtggatttatcgagctacagcagtatccggaaggattttctgtatataagatcgaggatccttcagaatatgccgtggatgaagaagaggagatgttctatctggtgatctgtgcagaaaatgcaccggagggaattacagtaactgcgaccttggtggatgaaaattgggacccggtgcaggagtaaaacagaatacgtgaatacgacaagggacccgggcgaaagcttccgggtcctttttagagggaaagtgtttgtagttagcttattgggtgagaggaattctgtggaccaccctgcgatagagcttccacaggagcacagcagggaaactgattgccagatatgctgtggataaaagtccggtagcaccgcctacgattgcaatgattaaaattccaatattcataatgaattcctcaactttctgtcattctgcaaagcattcgatgaagcttttaaaaaacctcacataccgtattatagtaaacagatctccccgggtgaatagttttgccagagccttaacactattttgtcgggttatttacagaatctttgcaacacatttacagaatcttaacgggtggaaacgataccgggagttaggtttgcaatagtagggaatatcaagtataatagaaaaaaattgactgttgctgacaatgacagtttaagaaaatgggaggtagaatatgagtatgacgctggaacaggctaaggagaagcttgcaaagtatggtcaggaacatgttctgaagtattacggggaacttaccgaagaagagaagcgggggattctggatcagatcgaggctacagatatgagcattttggaagcttgtaagcacaaggaggatctggcgaaaaaaggagtgatcactccgcttgctgcaatgcagttagatgagatcgaggcaaacagagagaatttcacggcgaccggtatcgaggcgatccgtcaggggaaggtagcagcggttctgttagcaggcggcatgggtaccagattaggctctgacaatcccaagggaatgtacaatgtgggactgactcatgagctgtatatttttgagtgtctgatcaataatctgctggaagtcgtacatcagtcagatgcatggatccatctgttcgtaatgaccagtgataaaaataacgatgccactatcgcctttttacaggagcatgagtatttcggatacaaggcggagtatgtgcactttttcaagcaggagatggcggcggctaccgattacgagggtaagatttatctggaggagaagggcaagttgtccacctctcccaacggcaacggcggctggttcatttccatgaaaaataacggcatgctggatatcgtacataacgagggaattgaatggctgaatgtatttgccgtggacaacgtcctgcagcgtatcgcggatccctgctttatcggtgctacgatccagagaggctgtgtcgtaggctccaaggtggtccgcaagaatgcgccggatgaaaaagtaggcgttatgtgcttagaggacggcagaccttccatcgtggagtactatgagctgaccgatgaactgatgaacgcgaaggatgagaagggcgaacccgcgtataactacggagttatcctgaattacctcttcaaagtacaggatctggagaagatcatggaagaaaaaatgcccctgcacatcgtagagaaaaagatcccgtatctggatgagaacggagaaccggtgaagccggagactcccaacggctacaaattcgagagcctggtactggatatgatccatcagatggacagctgtctgcccttcgaggtagtcagaagaaaagaattcgcccccatcaagaataaaaccggtgtggattcggtggagagtgcaagagaactgctcgttgagaatggcgttgtgctgtaaacatttcgacagcttttcacaacataaggttattgaggaaacaacagaattacagtaatctgatactgtaagaaacgaagaaataatctcatccggatctgacagatgagagatcgtgcggtcgcagcagtgaacaaatggtattgtccggtatgcggcggataggagagagtatgagaattttggtaacaggtggtgccggattcatcggcagtcataccgtagtggaattacagcaggcaggctatgatgttgttgtattggataatctctgcaatgcaagtgagaaagttatccccagagtagaagccatcaccggcaaaaaggttcctttttataaggcagacattctggatcgtgaagcgctggaggagatctttagtaaggagcagatcgatgcagttattcattttgcaggactgaaggcagtcggcgagtccgtacagaagccctgggaatattacgagaacaatattgcaggtacattgactctggtagatgttatgagaaaacacggtgtgaagagcatcatcttctcttccagcgctaccgtatatggtaatcccgcatttgtccccatcacagaggaatgccccaagggacagtgcaccaacccttacggctggaccaaatccatgctggagcagatcctgaccgatatccagaaggcagatcctgaatggaacgtgatcctgcttcgttacttcaacccgatcggagcacacaagagcggcaccatcggtgagaacccaaatggtatccccaacaacctgatgccttacatcacacaggtggcagttggcaagctgaaagagctgggtgtcttcggtgatgattatgatacccccgacggaaccggcgtgcgtgattacattcacgtagtagacctggcaaagggtcatgtgaaggctctgaagaagatcgaggagaatgcaggactgaagatctacaacctgggaaccggcgtaggctacagcgttctggatattgtgaagaactttgaagcagctaccggtgtgaagattccctatgtgatcaagccccgtcgtgcaggcgatatcgctacctgctattccgatgcttctctggcagagaaggagcttggttggaaagcggagaacggcatcaaggaaatgtgtgaagattcctggagatggcagaagaacaatcccaacggatacgaagaataa

SEQ ID NO: 401 - DNA, 5544 bp, unidentified
  source 1..5544: mol_type = unassigned DNA
  misc_difference 780: note = a, c, g, or t
  misc_difference 781: note = a, c, g, or t
  misc_difference 782: note = a, c, g, or t
  misc_difference 783: note = a, c, g, or t
  misc_difference 784: note = a, c, g, or t
  misc_difference 785: note = a, c, g, or t
  misc_difference 786: note = a, c, g, or t
  misc_difference 787: note = a, c, g, or t
  misc_difference 788: note = a, c, g, or t
  misc_difference 789: note = a, c, g, or t
atgaaaaccatctatcttgtcaccggtgctgccggttttatgggcactaatgtctgcgcacagcttttggagcgcggtgatgccgtgcgcgcttttgtactgaagggcgaccccgctgtaaaatttatgccgaaggccgtcgaaatttttgagggtgacctctgcagtgccgaggactgcgagaaattctttgccgtggaaccgggcacccagaccgtctgcatccactgcgcgagtatggtgacgatcaacccgaattacagtgaaaaactcatcgccgtcaatgtgggcggcaccgaaaatatgctgaatgccgccaaaaatcacccggagtgcaaaaagttcgtctatgtttccagcaccggcgccatccccgagctgcctaagggcgagagcatccatgaggtatacagctttgttccctacgatgatgatcgcgtggtcggctggtacagccgcagcaaggcaatggcgacccagaaggtactggacgccgccgcggacgggctgaatgcctgcgtggtgcatcccagcggtattcttggcccaaacgaccccgccatcgggcagacgacccgcacgctgatccagattttgaacggtgagatgcccatcggtatgcagggctcgttcaaccttgtcgatgtgcgcgatctggccgccggcacgattgccgccgctgaccgtgggcgcaagggagagtgctacatcctttccaatgacgaggtttcgctgaaggagctgtgtgagatgctcaaggctgataccggctggcgcggnnnnnnnnnngccgcggctgcctgttttatctgccgctgtcttttgcgcattttgccgccaagcagatggaggcccgcgccgccaagaccggtaagcctgctgtgctgaccgagtttgccgtttacaatctggagcgcaacaaccattttgactgctccaaagcgaaaaacgagcttggctttgccccgcgtccctacaaggaaacactgcatgatctcgctgtatggctcaagcaggagggaaaaatcgcatgaagaagctgtatgaatctatctgcaagcttatgcaaatgaatgaccagcagtgggagtgctatctccacgcactggattccctgcactgacacaaagaaaagggggtgcctattatgaagaaggtttgtgttatcacaggcagcggcagcggcatggggcttgccacggcgaagctcgtctgtgaagaaggatattacacgattttggtggggcgcacggcgtccaagctggaaaaggcagtcaacgatctgcgcagtgcaggcggcgaggctgaggcgttcagctgtgatgtttccgaccgtgaaagctgctttgcgctggccaaacacgccgccgaatgcggcgaagtaaaagcggtattgcacattgcgggtctcagccctcacatgggcgatgcagagaaaattcttcgcggcaatgcgctgggcacggtgaatatcaacgatgccttttatgaggtcatggcaccgggcggctgtgtgatcgacacctccagcatgagcgcctaccttgccccgcagtttgtcatgcccaagggtgcgtacaagctggcgcgcaccgaccgtgaaaaattcatcaaaaagctggtggcgcgggcaggcattgcccctaaggacgcccgcccgggtctggcctacgccatcagcaagcattttgtaatttggtttgccaagaccgatgccgcacgctttggcgggaaaaatgtgcgctgcttaagcgtgacccccggcaactttgacacgccgatgggcgcactggaaagcgggcaggcggatgtattcaaaaaatactccgccctcaagcgcaacggaaagcctgaagaaatcgccgctttgtttgcgcttcttctggatgagcggctgggctttctgaccggagcagacattcttatggacggcggcgttgtggcaagcggtgccagcggattgagcaaataaaaaagggcagcaaagtaaaccccgattttagcttttggggtctgctttgctgccttttggattttgtgccttcgcttggctgtactttagtgcagctcgctttcgcagcggtccagaacggcggcgataacctgatccatgtcgtaatacttgtactcacccaggcgtccgccgaagatgaccttcggctcggcgtcggccagcttcttgtactcggcatacagtgcgccgtttttagcatcgttgacggggtaatacggctcgtcaccgggcttccactcagaggaatactcgcggctgatgatcgttttgggcaggtcgttgccgttctcgtccttgccgaactcgaaccatttgtgctcgatgatgcgggtccatggcgtctcgcggtccgtatagttgacggcggcgttgccctggaagctgggcttgtcgagcagctcattctcaaaccggacagagcggtactccaacgtgccgagtttgtagtcaaaataagcgtcaatcgggccagtgtagacgattttgtcagccagtgcgtccagcgcggccttgttttcgaggtaatcggtgttcagccgcacctcgatgccgtccagaagattggcgatcatcttggtgtagccgccgatgggaatgccctgatacagtgcgttgaaatagttgttgtcaaaggtcagccgcacgggcaggcgcttgatgataaaagcaggcaggtccttgcagtcgcggccccactgcttttcggtgtagcccttgatgagcttttcataaatatcgcggcccacaagggagatggcctgctcctcaaggttctgcggctcgtgggtgatctcgcggcgctgctcctcaattttggcggctgcctcctccggtgtgacgacgccccacattttattaaaggtatacatgttgaagggcagcgaatacagctcacccttatagttggcaacgggagagttcgtaaagcggttgaactcggcaaaccgggtgatatagttccagacctttttgttgttggtgtggaagatgtgcgcaccatacttatggacgttgataccctcgatgttctcggtataaatgttgcccgcaatgttggggcgcttatccacgaccagcacggattttccgtggaccttggcctcatgggcgaagatggcaccgtacagaccggagccgactaccagataatcatatttcatataacaggtgttcctctctttaaaaatcacagggatattgtgcggtaatggcattgagagccttactccaccgtcaaaaagcggcagaaaggcatttcagtctctgccgaatagatctcttgtgtagaccttgtcctgcacatcgttgaggcaggcatcgtagcggttggccagaatggcctgactctgccgcttgaatttgtccagatcgttgaccactgccgaaccgaagaaggtcttgccgtcctccagcgtaggctcatagatgatgacctgtgcgcccttggccttgatgcgcttcatgacaccctgaatcgagctttggcggaagttgtcgctgttgctcttcatcgtcaggcggtagacgccgatcgtgacgggcctttcgcggctttcgtcaaactcattttcctgatcgtagccgtagtacccggccagcttcaacacgcggtcagcgatgaagtccttgcgggtgcggttggactccacaatggcctcgatgagattttccggcacatcggcgtagtttgccagcagctgcttcgtgtccttgggcaggcagtagccgccgtagccgaagcttgggttattgtaatggctgccgatgcgcgggtcaagacatacgccgtcaatgatctgcttcgtgttcaggcccttgctctccgcgtaggtatccagctcattgaaataggcaacgcgcagcgccagataggtgttggcgaacagcttgacggcctcggcctcagtaaagcccatgaagagcgtatcaatgttctccttgatggccccctcctgcagcagtgccgcaaattcgtgggcggctgcgacaaggtgcgcattctccgggtcggtgccgacgatgatgcgggacgggtagaggttgtcatacagggccttggactcccgcagaaattccgggctgaacaggatgttccggctgccgagcctttcccgcaccgacaccgtgtagcccacgggaatcgtcgatttgatgaccatgacggcatttggattgacctccgtgacaaggcggatgactgcctccactgcagaggtgtcaaagtgctgggtctggctgtcgtagttggtgggtgcagcaatgaccacaaagtccgcatcggcgtaggctgcctttgcgtccagcgtagcggtcagatccagctccttctcagccagatatttctcgatgtaatcatcccggatcggcgatttgcgcgcgttgatcaatgcgaccttttccggcaggatatccaccgccgtcacatgatggtgctgggaaagcagcgtggcaatcgaaagccccacatagccggtcccggccaccgcgatcttatattttttcataacagttatactccgcagctgcgaattttccgtaaggcagcagtcaaaattacgccgtgccggcttaccgtatgtgggtttattatagcacgtcaccggccacaattcaatattgccgctttcctcagaattgtttgaacaataatccagtattgaaaacaatcgtctctactcagtctttgctgtatctgctaagatagaatcacggtactggtgtggtgtcagaccggtttgtttacggaaaacacgataaaagtaattgtcatccaggaatccgatctgctggcagatctgtgcattggacagattcgtatcgcaaagaagcttcattgccttttggatgcgcaggtgcgtgatctgctcgttgatgccgcagccatagagctgccgggaaagatagtacagcccggtacggcttaacgaaagatcacggcagatcgtttcgtttgtcaatgtctcatccagatgttccgccagatagcggctcagcttttcctgcgcactgcccgctgccagccgcgtcagccccttttggtacaatgcagccgccgccaaagccagcagatccgctgctgatttcagcaccggatagggcgtgtgcggcaaggcattataggctttttgcagtgccgttttatcaattgcgtaagccgagcagcatttttgcgcatagctccactcgctctgctcgtcggccccctgtacaatgtggctcaacagcaaaaagcccacaacagcaccatcgatctggactggcgtgatcacttcgatcaaccccgcatggcaggggtagatgatcgtctgcttttgccgcgttgccttgcggcaagccgcctggtcacacaggtaacagccggtcttgccatcaggcacactgcggatcaagcggcaataagctggcagttccggcggataggcaagcacttcgattccatacgaatcaaaaacggcggagcgcagccccgtaaggcagtgaaaatcctgcaagaggaccaaaagctcctttttattgaaaacggttcccat

SEQ ID NO: 402 - DNA, 9763 bp, unidentified
  source 1..9763: mol_type = unassigned DNA
ttaaaggtcaaaatgttttgtattttcagccaattcttctgacagtttgcgaagttctccggtcgctttattgcacaccgaaagaatttcattaaactcaagcatggatgctgaggtttcttccgtgctggctgcattttcttctgcaattgctgccaatccatcaacaattgatgtaaccttatttttcttatcttctagagcttctgcctgcttacgaatctgcacaatggcatctgccactgtgccaatctcattatgtaacagattgaacatctggcttgtttccgaaagcttgtcattttgaacactaatcttatccattaccttactcatcgtctgaacgcttgtatcagaattcaccaaaagtgtatccacaatttcaacaatcttttctgccgactggcgggactgctcagaaagggcacgaatttcatctgccacaacagcaaatcctttaccgtgttcacctgctctcgccgcctcgatactcgcatttaaggacaatagattcgtctgagcagcaatatccgtaatcaattcagttgcttctttaatctgttttgccgactggttcgttaaatcggtctgcttctgtacttcaataactgactgcttcgtctgctcactaatcgcatttaattcttccagattactgccggcggtctcattatattcttccatcttctcagaactagcatgaaggttctccacatttgccgaagtctcctccaacgcctgtcccatctcagcaacctgctggttcgcactcatcgtttcatccgcctggctggtcgcaccggaagcaatttcctcaactgccgtatttacactgtcaaccgaatccgtaatattcgcaaaggattccgcaaactgatttgaaaaaccatccagtgctttcgcagaagatgtaatgtttgtaagaatctcgcggagcgaatgaatcaaactctgaatcgctcttgcaatatcaccaacctcgtcgcctcgttccaaaagtaccggcttcatctcaaactgaagggcaccttttgccacattaccaagatttgacacggcaccatcaatactctttacaatacgtttcaccataaaaagtacaataataaatgccgccaaaaaaattgtcaacataacaaccgccattgatataatggtatttctgagactctgtgtcacctgattctgggtacgtccgcagaatacactaccggcaacctctttcgtacccggctggtagagtggcacataatagccataataatctgttcccagcacatctatatttgttgcaaaatactcttcaccttttttcaaggtatcataaacctcggatgacatttttgtattaatttcacgttttccggattcatcttttaatgttgtcacttctctgacatcaccaaaaaacaatgatacttcaacttcctgctcattttttagctggtcgaccagtttataatttccactcaacatcgtattgcccttatagagattatcccccttcatgacaaacttttcattcccctcagttgccaaatatgtctgtcgtaaacttctggcaataccgcttacttctcgttttactaaatcttcagataaatcactttgtttatatgcactcaacaaaattccggcaatcgttatcagaaaaatcggaataaccaccgtcagacttaatttcaacgcaagacgtgcaccttttttttgattcacaagaaattcccccttttaataaaataaaactataatatataaatattatgctatattattataacatctttctccttttggtacaagagataagttgttattgttgcgttttgaataatcaaagtacgcaggaaaagttgtttgtgtcaagtgttcgttggcacttttttgttttccgtaattccgtagaaaagcgttgcgtctcgtgggcgctcccgctaattgagtgcgtagcggtatgggcactgaaattaccagtgccacataccgacgtactcaaacccacgagtcacaaagtttttctacgaaattactggaattcaaagcaactgaccgcgaacatttaccacaagccaaccatccatcccccacaattggtctatagcaaaagttttcctacattatctaaaaggatgatttttttcagcacaccacaatcggcagggaaaagttttgagtggaatgcgttatatgtgcgtgggtatctgatatgcgtattgtgcatatcgatacccctacgcacatatcagcgggagcggcgcatgacactcaaacttttccctgccgactgtgaagtcctgaaaaactctcctcctaaataatgtaggaaaacgtctctctctcatgatactgccgcaccaattcagcgagtgtaactctctcaagcacatcatctacagcatgatccacttcctgacccaaatcgcgaaccagtgcattcatcgtgcggttgttttcactttctctgtagccatccaaatccacggcatttcgctggccctcaatggcaccgaccacatctttagcggtacatcgtctggtttcttccggaagataatagccgcccttgctgccgcgaatcacgcgcacaatcccggcgtgacgcagtttagaagccacctgttccatatatttctctgacaaatcgtattccttagccacctgtttgaccgtcaccgtactgccatcatgcagtgcaaggtcaatcagaaaaaataatgcatactgaccctttctcgtaatatacataacaacccctctttcctaatttctatcctgctccaaagaagcaattgccacggcaccatcggaaaccgctgtaataacctgacgaagcggtttggttctcacatcgcctgccacataaattcccggcacattcgtccggcagtcctccccggcacaaatatagccggcatcgtttctctcgactacatccttcacaaatgctgtctgcggctccatgccaacagcaatgaaaataccggataactcaatttctttttcctccccggtctggttctgtgtaagaatcactttctgtaccataccgtctccggcaatttctttcacttcataataaggaagaaattcgatattttccgctgccatcactttttcggaaagttccttagccgcgcgaagaccttccctgcggtgaatcaaatacactttttcacaaagatttgccagatacagcgcatcctctaacgccacatcaccaccgccgacaaccgccgtcgttttattcttaaaaaatgcaccatcgcaggttgcacagtacgaaacgcctgcaccggtcaattcttcttccccttttacggaaagttttttatgccctgcaccggttgccactaacacattttttgtgcagatggtttcaccgtcttctaaatgcacttttttatattcggattcattttccacggaactcacttctgcgtctataaacggaacagaaagtgcatccgcatgttctctgaatttcattgccagcgaatatccggattctccgtaaagtcccagataattgtccacgcgttccgtcgtcacaatctgtccgccgctaaatcctgccttctcaatgacaacaacatctaacattgcacgttttgcataaacggccgctgacaagcccgccggtccgcttcctataattaccaaatcttttacctgttctgccatcgtatccctcctaatctacttctgattggcaaactttctaatctgctcacatgtcttttcgatatccttatccgtatgtgccgctgacacaaacatagcctcaaactgagacggtgccaaataaatgccctctttcagcatcgccttaaaataagccgaatagcgatttgtatccgaggtctgcaccgtatcataatcaaccactttttcaccggtaaaaaacaaactcataagagagccaacctgatttacacagaccgtttctccaaatgtttcacgcatcactgctgccagtttttctgcctttttctcaatggtttcataaatcgtatccgaatcacgcagaattttcagtgtctcaattcctgcagtcattgcaatcggatttcccgaaagcgttcctgcctgatacacttccccaagcggtgcaacgcacgacataatttcttttctgcctccatatgcgcctaccggcataccgccgccaatgatttttccaagtgtcgtcaaatccggtgtcacgccgtaatactcctgcgcacctccttttgccagacgaaagcctgtaatgacctcatcaaaaatcaaaagagattgatacttttttgtaatctcccgtaaaaaaggcagaaaacctttttccggacaaaccacacccatattggctgccaccggctccacaacaaccgccgcaatgttatcaccatatttttcaaacaatgcttttaccgattccggtttattatactcagcaatcaatgttgtctctgtataaccctttggcacaccggcactgtccggcacagcctgcaaaagtgccgcagaacctgcctttaccaaaagtccgtctgagtgaccatgataacaacccttaaattttacaatgtaatctttgccggtatatcctctcgccacacggatggcgctcatcaccgcttccgttccggaatttaccatacgcatcatttccatcgatggcatcatgtcatgaattaacgacgcaatttcatattcttttttcgtcggcgccccaaaggtaagtccctgttcacatgcctgtttcaccgcttcaatcacagccggatatgcatgtcccaaaattcccggaccatacgaacaaacataatcaatataatcattcccatcctcatccaaaatatgagaaccttttccactttttacaaataccggtgttccgcccacattgcggaatgcacgaaccggcgaatttacaccaccgggcagaaagtgttcggatttttcaaataactgttccgactgtgtcatagccttacttcctttctctattgataaaactgctcaagcgccctgcctaaatgttctaaatcgcattgctctggaaccacatccacatcgattccatacgcctgcagtctttttttcgtcacttcaccaatcgccgcaaccgcaacatgctcttttttgcggtcacgctcccattctcctatcttgtccttacccatccgggaaacaaacgcctcaacgccggatgcgctgaaaaatgcagccacgtccatattcttccacatggacaaatcccctgaaaaagccccttcaacatcataaaaagggatttccgtaatcgtaacagacttcttttgcagttctaaaacaagttcttcacttgcctgcaaagcccttggaagaagcagatgttctcccggtttcacgacatctgtaagccctttggcaagtgcctctgtcgtaaactgttttggcatataatccgcataaaatccatacgtttccagtgcctttttcgttccgctgccaacgacagcaaaacgaaccttcgcaaactcccgtctgtcaatttgtttcttatctgcctcagcaaaaaataaatgaaccgcattctggcttgtgaaaacaatccagtcatatttttttatctgagataattcatccaaaagtttctctgcaccatctgtacagacaactttcatttcacaaagaggaaaaacaaaagcccctttgtcttccatcatttcacgcagtttattatgcagtttctgcgttgctgttgtaccgatttttttcccggcaagcacaccaaaatcctcactgacaaaatgatattttgccgtctgtcccacaacaaaaaccgctggggaagtaattttatttttaattactttatccgcaatatcaaaaagtgttccatagacacgtttctcatccggcatcgttccgtgggaaatcaccgcaacaggtgttaactcatcctgtccctgttccatcagccggtctgcaatcatgcggatatttgcgacactcatcaaaaatacactcgtgccatcctgtttcgtaatatgggaaaaagattgctctgccccctcttttgtgtgaccggtaaacacatgaaaactgcgactttccttacgatgagtcaaaggaattccggcgagctcactcactgccactgcacttgtcaccccgggcaccaaagcaaatggaattttctctttctgcagtgctaaaacctcctcgccgccgcgtccaaaaacaaatgggtcaccgccttttaagcggacaacatttttatactgttttgccgtctgaatcagaatctcattaatctcttcctgcttctttgcgtggctcatcggtttctttcccacataaattttatggcagttttcaggaaccacagaaagcagttcctccgacaaaagcctgtcatatatgaccgcatcgcatttttgcagcagacgaagtccttttaccgtaattaactccggatttccgggacccgctccgattaaataaaccatactatgatttcctctcctgacacaatttttctacaagattttgccaatctcctctgtccccctgcaccgaccgccggattacttctccctctttttcttccatcagagaaagattcatcctatgtccatcgagggtacacaaaacaccaattggctcatggcatccggcatttaatttcgtgaggaccgcgcgctctgtccgcagacactctgctgtatgaacatccgaaattttttcggcaagttcattagcaagcgttcctttttttgtctccatcgcaatcactgcctgacctgccgccggaagcatctcctttacagaaagatactcgtaaacaaaatccgaatcgttgtcaataccctgtcgcctaattccggcagcagccaacacaatcgcatcgtactcgcctgcccgcagtttattgagccttgtgccgatatttcctcgaagacttttgcagacggcattcggatacatctttttaatctggcactgtctgcgcagactccctgttccaatggtaaaaacagaatcctttgtaaaggaagtttcctttttgtaaatgagtacatcctgcacacaggcacgctccaaaacaccggcaaccgtaagtccgtctttacacgggtttggcatatcttttgcactgtgcaccgccaaatcaatcgtatcgtctaaaagcgcctgttcaaattcttcaacaaacacggcttttccgccaaaggaaggaatcggcgaatccttttccttatcgcctttggttgtcatatacacaatttcgtattcatactccggaaatgcctcctgcaattttgaaacaaccagtccggtctgaatttttgccagttcactttttcttgtaccaatccgaatgactgattttttccactctttttttaccatgtccaacataatctctttccgtttttcttcctccggctctgttttcaaaaccgcatttcttttttcaagaagcgtctttgccatatctccgcagttatccggcagatggctcctaatactcttttttatctgagaagctaacgccggagcactgccaccggtcgaaaccgaaactacgacatcatcctgctttataattgccggaaaataaaaaccgcagtcttttttgacatccactacattgacaagaatccgtttgtccttacaaatggcagcgatatgggaattgacttcactgtcattcgtcgccataatcaccacatcggctccttcgatatcaccatcctcaaatggtctttgaaccaataaaagggcatcttgtttcgattcaattttctgcaattcatcgcaaatttttggtgcaatcaccgtaacacgtgccccaaacgacagcatcatagaaacttttcggtatgccactttgccaccgccgccgataacacataacttatcctgcatctgaatcataaatgggaaaaatgccatttcgacctcctcgatatagaagaaagaaggcagacgctaccttctttcctttttattacgaaattactaatttctcttttgtcacctgtttttcctcatcgacacggaacgcattcaataccggattgtctgcttccatcaacgataaaatcagataatttgccttggaatcataggcaagccgtttgtcctcctccgatggtctcgatggagactccggatgagaatggaaattgccaagcggcacatagccatttttacgcatatctttgactgccgcaagctgctctttcggatccatggaaaaatgctcgttgctctcatccatgtttgtcagaagataaacctttttcacatactgtttttccccttccacaacaccgccaatcaaaccacaggcttcattcggaagaccttctttgcagtgagctaacattttctcataatcactttttgtcaaaaataacatatccttttcttcctttccgcctactttccgtcacactctacctgctcgtaatcaattaactccgtaattgtcggatgatcaccgcagactgcgcaggtgccatttgcctttggcagtttaatcgtgtgaaattccatcttaagggcatcataagtcaaaagttttccggtcagcaaatcgccaacaccaatcagatacttaattgcttccatcgcctgcaaacttccgataacaccgcccatagcaccgataacaccggcctgtttacaggttggaacagcatccttcggaggcggatccttgaaaacacagcggtagcatggtccttcccccggaacataggtcataagctggcccttaaagcggatgattcctgcatgggaaaatggtttctttgccattacgcaggcatcgttaatcaaaaatttcgccgggaagttatctgtaccatcaatgataaaatcataatccgcaatcaaatccataatattttccgatgttacaaactcgcggtatgtatttactaccacatcactgttcatcgcattcatcgtctcttttgccgattttacttttgctttgcctacatctgccgtgccatgaataatctgacgctgcaagttcgacaaatctacctcatccgcatcgacaataccaatggttccaacaccggctgctgccagatacattgctgccggagcaccaagtccaccggctccgataataaggactttgccgtttaacagctttttctgtcctttcacgcctacttcctgcaaaataatatgccgggaatagcgctccatctgctcatttgtaaacgccattaatttgcgcctcctcccatgaaataaagaaattctacgacatcattttctttgagtgccgttgtagcaaaatctgtgctttccacaaattcatcgttcactgttacggttacataatccgggttttccactttctcaacctcaatgagttttgcgattgtcaaaccctcatcgtatgttttcttttctccagctacggttactaccattttcatatcctcctttataaaacttcctctacagcttcttctaactctttccgctttacaagacctcggattcggtttacttcttttccctctttgaaaaacaaaagggttggggaagctgctacttcatatttttgtgccagttcggcatcaaaattcacatttactttgacgacgataagtttatcctcatagtcatcttcaattccgcctaaaaccggcgataattgtttacatggaatacagctatccgaataaaattcaacgataaccggaagagacgccttaagaacttcggcttcaaactcttctgcattcactcgctttgccat

SEQ ID NO: 403 - DNA, 5852 bp, unidentified
  source 1..5852: mol_type = unassigned DNA
ttaatcatccagaacagaatctaaaatcgcaatcattttatccacatcgcttttttcaataataagcggcggaataaaacgaatgacatttgcgcctgcgctcataaaaatgacgcctttttccaatgcctttgtaatatagggaccggcaggaacggaaagttccaagccacgcatcagtcccataccacgtgtctcaacagcaatttcttttttctccaccaatttctgcagacattcactaagatactcgccaacttcttctacgtggtttggaatttctctcttttcaaaaatttccagtgtcttggctactgctgcgcaggcaagtggatttccgccaaatgtcgtaccatgatctcccggcacaaggcatttagccacttcttcttttgccgcaattgcacctacggttataccatttccgattccctttgccatcgtcacaatatccggcacaatatcgtatttctggtacgcaaacatcttaccggaacgtcccatgccacactgaatttcatcacaaatcataatgatgtcattttcatcgcacaatttgcggattccctgtaaaaattcagcgtttgcaggataaattccaccttcgccctgaacggcttccacaatgatggcatatgtattttctgtaaccgctgcttttacactctcgaaatcgttgtaatcagcaaatgtaacaccctgtaacatcggttcaaacggctctctgtattttgccgtaccggtaacggacaatgctcccatgcttcgtccgtgaaatgctttattcatcgagataatctcatgacgattttcatgcccctgcataatggcatattttcgtgccattttcaaagcgccctcattggcttccgtaccgctgtttgccataaatacacggtcaagtccggttgcctttgcaagacctttcgctgcctgcaataatggctccgaataaaaatagttagaaaaatgaattcctttatcaatctgtgctttcaaagcatctgtgtattccttatctccatagcccaatgcacaaacggcaattccggcaccaaaatccaaatattcttttccgtctgtatcgtataatttcacgccttctccatggtctaatacaaccggataacggttatacgaatgaactaaatacttctctgattcatctatcatctgtttcatatcacatgctccttcctaatcctgctcatgcggatacaatgttgtgtggttatcaataattgctgtaccaataccttttttggtaaagaactcaagtaacagacaatgctgtctgcgtccgtccagaatatggacacggcttacaccttcttctaccgcttccacacagtttcttattttcggaatcataccaccgccaatggttccatcctcaatcaactgttttgcctcatcagttgtcaatacagaaatcaatgtttccgggtctttcgggtctttgcagacaccctcaatatccgtcataaatgccagtttttctgcatgaatacactttgcaactgcacttgccgcatcatcggcattaatgttatatgcctgataattttcatccataccaatcggcgcaataatcggaataaaatctttggcaatcaaagtgtcaatcaaatcggaattaacggattttacttttcccacaaaaccgatatctcttccaccggctgtttttttctcacaaagcattgtgccaccgtcttttccgctgatgccggctgcctttactccaagtttctccatcatctggactaaatgcttatttaccttatttaaaaccatttctgccacttcaatcgtatcggcatctgtcacacgaagtccttctacaaattcgctctcttttcccatatagccaagccatttactgatttcttttccaccgccgtgaacgataatcggctgcatgccaaccagtttcaacaaagcaacatctttaatcactgattcctgcaatttttcatccagcatagcgcttccgccgtattttacaactacttttttcccgttgaaatcacggatataaggcagcgcctcaatcagcgtttccgccttaagtacaacttctttcatcttatcttccatctttttatcctctctaacttctgtaatcgccatttatttttacataatcataagtcaaatcgcatccccaggcaattgccgatgcatccccctgcttcatgtcgcaaataaatgtaactgcatcttttcctaataaaatagtcgcctcatcttcactgtaatctgtcggcacaccatcttttactaaaacaatctgctcatcctcagcttctaaaatcaaatcgattacatccgggtcaaagtctgcaccggaataccccagtgcgcacaaaacacgtccccagttcgcatccttgccaaacaccattgctttcacgaggtttgaagtcacaaccgatttgctaaaaatctttgcctcttctttattcttacagtgaactgctcttacttccatcagcctcgtagcgccttctccgtccgctgccatctgttttgccaaatccgttgcaacaaaactcagtgcctctttgaattttacatatccattcgttcctgctttgatttcaacaccggattcgccattggcaagcaccagatatgtatcatttgttgatgtatcgcggtcaaccgaaatcatattaaaactatctgacacaatttcggaaaccatttcctgcagtaaatcatgtgaaatttttgcatctgttgtcgtaacgctaagcatcgttgccatatttgggtgaatcataccggaacctttgctcatgccgccaacagttacggttactccgtccacctcaaagcttactgcagcttccttcggaacagtgtccgttgtcataattgccttagccgcaagcagacctgcttcttttgtatctgccagtgcatcctttaaaagttttgcacctttttgtatcggttctttttttatctgcattccgataacaccggttgaagcagtcaagacctcttttgtcgaaacgccaagtgcctctgcaatttgtgaagccatgtactcattaatttctttaccttcgcctccggtacaggcattggcaattccactattcaatacgaccgcatgaacatcctttttgctctcaacaatttctttatcccaccaaaccggtgctgcctttactacattcgttgtaaaagttcctgcacagaccgccgggctttctgtatagacaagggccatatctgtacggtttttatatttaattcctgcctctgcgctcgccgccataaatccttttgctgcggtaacgccgccttctattgtattcatcatattttcctcctttacggaaccatcggtacaagccggagcccctctgcctcatcaaatccaaacatcagattcatgttttgaactgcctgtccggcagcaccttttgtgatattatccattgctcccatcataatcacgcgatgcgtgcgctcatctacttttacatttacatcgacaaagttgcttccctcaacccatttggtctccggacacacaccctcatccagcacgcgcacaaaatattcatcttgatatgctttcacataagcctctcgaatctgctcttttgtcacaccttctttatattttgcatatgccgtaaccaaaataccacggttcattggaatcaaatgcggagtaaaattaagtgtaacatcttttccgctaatataggaaagctgttcttcaatctccggtgtgtggcggtgcgtggctactccatatgccttaatattctcatttacttcgcagtaaagatttggaacttttgcacctcttcctgctcctgatgttccggattttgcatcaataattaaagtatccatatcaatcagtccttctcttgcaagcggtgcaatcgaaagtgttgaacaggttggatagcatcccggattagcaatcaaacgtgcctttttaacttgcttgcggtttaactcacacaatccgtatacagcctcatccaaatactgagggcttttatgtgtgatgccgtaccatttttcataaaccgcaacatcttttattcggtaatccgcactcaagtcaatcacctttgcctgggaaaggatttcgtcatccagaacacctgccaaatacccctgcggtgttgcggtaaatatcacgtctgcctcttttgccaaagtatgtaaatcatcacttttacaaatattttctacaatctggaaaacatttccaaaaacggaactaaatttcttatccacataacttctcgaaccataccatacaatctcaacttctttgtgctgcaataataatcgaaccaattcctgtcctgcgtaccctgtagcaccgataattccagcctttatcatagcatcctccattccgccgtactttggcagctcactctttttattcatcatttatgcatatttatacatattatacacaaacctcaattattatacatcttttccgataaatatgcaatacctaactagaatttattcgtcattctttgaaaataattgattttatgcttgcataatattcacttgtggtgtatattagaaaaaggttaataccaaaaaatacatacggaggttctattatgaaagaaaaagttattttagcttattccggcggcctggatacaacagcaattattccatggcttaaagagaattttgattatgaagttatctgtgtctgcattgattgtggacagggtgaagaattggacggtctggaagaaagagctaagttctgtggtgcatccaaactttacattgaggatgttgtcgatgagttctgtgatgaatatgtagttccttgtgtacaggctcatgctgtatatgagaacaaataccttcttggtacttcgatggctcgtccggttattgcaaaacgtcttgttgaaattgcaagaaaagaaggcgctactgctatctgccatggtgctaccggaaaaggaaatgaccagattcgtttcgaactcggtatcaaagcacttgctcctgatttgaaaattattgcagcttggagaagtgataaatggacaatggattcccgtgaatccgaaattgaatactgcaaggcacatggaattgatcttccattctccgcagattccagttacagccgtgaccgcaacttgtggcatatcagccatgaaggtcttgaattggaagacccggcaaacgagcctaacttcgatcatcttctggttcttggtactacaccggaaaaagcaccggatgaaggtgaatatgtaactatgacatttgaagctggcgttcctaagagcgtaaacggaaaagaaatgaaagtttccgatattatccgcactctgaatgaattaggtggaaaacatggtatcggtattgttgatatcgtagaaaaccgcgttgttggaatgaaatcccgtggtgtttatgaaactcctggcggaacaattctttacgaagctcatcagcagttggaagaattaatccttgaccgcgatacaacaacattgaaaatggatatggggaataaacttgctcagatttgttacgaaggcaaatggttctctcctctccgcgaggcagttcaggcatttatcgagtcaacacagaaatatgtaaccggcgaagttaaattcaaactgtacaaaggaaacattatcaaagccggaaccacttcaccatacagcttgtacaatgaaagcattgcaagtttcacaaccggagatttgtatgaccatcatgatgcagaaggtttcattaacctctttggtctttctaccaaagttcgcgcaatgaagatggcagaagtagaaaagaataataagtaa

SEQ ID NO: 404 - DNA, 6127 bp, unidentified
  source 1..6127: mol_type = unassigned DNA
  misc_difference 5331: note = a, c, g, or t
  misc_difference 5332: note = a, c, g, or t
  misc_difference 5333: note = a, c, g, or t
  misc_difference 5334: note = a, c, g, or t
  misc_difference 5335: note = a, c, g, or t
  misc_difference 5336: note = a, c, g, or t
  misc_difference 5337: note = a, c, g, or t
  misc_difference 5338: note = a, c, g, or t
  misc_difference 5339: note = a, c, g, or t
  misc_difference 5340: note = a, c, g, or t
ttatctttcattcctgtcgatctgcagatttttataatattgcattggagtaacaccatactctttcttaaatgccctgaaaaaatgattgtatccgccaaatcctccaagttcataaacctcacggatactttttccctgctctatatagtgtctgcacagatccagtctgctctttacaatatatgaatgtggcgtttcgcctgtcatcttcttgaattctctcacaatatgatagcggcttacataaaactcgttttccaggcgctccaatgatatatcttctgtcaggtgttctcttatatatatgaaaatatcatccattacaacatgctttttcttatttaattttagctgtacgtcctccttgacagacgaccgcaacgcaagtaccagaagcattgtcagcaggcttttctcatacaatgtgtgtgcaaatttaggagattccttaagcattgaatacagctttttggaaatattctttataagcatggcagattcactctcagaatgaactgtcttaacctgaaagggaacgatatcaaatgcctcgtcaagtcttgtattttcatctgataagctctgcaataactctgttcccacatagagcacatatagttctaacggatatttgtttcttcgatattcaatcttcactttattgccaggcttaataaatattaagtcctccatggtacagaccgccttttcattttcctgacgtaaatatcccataccacctgtcacaaaaataattgtatggtttttcttctgtccaaaactgcgctgtccgctatcttctatttttatatattccatctcataactctgttttttcatatgttaattttgcacattccagcatccatatttttgttcattttgtcaatttatacaatacatcaattttccatagtttgcaagcaatttttgtatatgtttatctctctaatccccatataatgaacatgtagctaccaaaacaacacaaaaatgagaggtattattatgaaagaaacaagaccattttccatgaaggacaaaatcggttacactcttggcgatttgggatgttgctgtacagaacagttccgagccatgtatcttgctattttttataccctggtgctgaaggtcaacccggtgcacgtaggaatccttatgcttatcacaaagctatgggatgccataaacgatcctttaatcggtgcactcgttgacagtcaccagaacaagggtaagggtaaattcattccgtggattaaattctttgcttttccaaccgcagtcctttgtatcttaggcttcgtcaacgtaagtaattttgcttatggtgcccgtcttgcttacatgttcatcacatatgttgtatatgaaattatgtacacatgtgtaagcgtaccatttggaagtctttcaagtgttatgacagatgatgtaaaccaacggaccgacctttcacgcttcagaagtcttggcggcacaatctttatgaccgtcatcgttattgccggtccattattcttatacaaagacaaccagcctgtaccaagccacttccttattatggcagccatctgtgctgttatcggtttcatctgccttatgtttacatcacactggtgcaaggagcgtattatcaccgagccagttgccaaagaaaaagagaagcttaactatttagacgtgctgaaagccatctccaaaaacaaagctttacttggtgttatgttatccagctttattggtatcgttggtgccggtatggtaaacggcttaaatacctacttattccgtgactatttcggaaatgtcgccattatggcagtttcaggcatgttaagcgttatctggtcgcttatcgcattcattgggacaaaatttgttgcaaagaaatttggaaagaaagaatggattatgtatagtgcaactttctcagttgttgtttatgctattttattctttttccctcttgagaacccaatgctctttattattatcaacggaatctgttatcttggtgtcagcggtttccaggtattagtctgggcccttgtaaatgacgcaattgactatcaggaacttcagaccggaaaacgtaacgaaggtatcgtgtactctgcatatacatttttccgtaagcttgctaatgccgtatccggaagtatgagcagctttgcacttgcaatcgcaggctttaacgtaaatgaggccgttcagagcgaagcattctccggacgtctctggaaaacatataccggattatatgtagccgggtacttattagctgtacttgtattaaagtttgtataccctcttacaaaagagaaaacagctgaaatgttacagaatttatcagacaaacgaaatgctgcaaacgcagaataacttcagaaaccgaggtatcttgcattgacaaaacaagttgaaataacaaaccgctcaggtcatgtcttacgcggaattgtaaatattccggatgaaggctcgcgcttccccgccatcattaacgtacacggatttaccggaaataaaagcggatacaaaaatatctatacccacacagccagatttctggctgaaaacggatttgccagcgtccgctttgatttatacggaaatggcgaaagcgacggtgagttcgaggacatgacattcaccggtatcttacatgatatcgaagatattataaactggacaaaacagcaggattttgccaatcctgataaaattattttatcaggccagagcatgggcggctatgcagctgccactgctgcgcctatcgttaatccacatgctctcatactcatgtgcccgggagccggcatgtggtttggatgtaaagaccgcgccgaggcaatggaagcacagggaatcacaaaagcagatatagaggggctttgcttccctacttcttttaaccatgatttatatcagtatgaaccgttttcatccgcagcgggatatacaggtgctgttcttcttatcagaggaacggcagacgatctggtagatgatgctacctgtcatcgatatgaagcactctataatggcaaatgcagttacaaaacaattgaaggcgcaaatcacaactttgcaagcggttctgcaagagctgaattagacaggctcatattagagtttttaacaccattgaaataagataatcactttgaaaggatgtgtgcacaatgaaattattagagcccattaaagttggaaacattgaatttaaaaaccgtattatgtttcccccacttacaacaggatacgaagaaaaagatggatctatcggcgaacagagttttcgtttctatgagcgccttgcaaaaggtggtgttggatacattgtcattggagacgttgctcctctttcaacattctctcctacaccaaaactttactctcctcaacaggcagaaggcttccagcggcttgccgatgcatgtcataaatacggtgcaaagcttggaatccagctgttccatccagactataacgtcgcagctttaaacgaaatgtttcaccagggaaaaatgcaggaggcaagagccaaacttcaccatgatatgcagcactttgtaaatgaagtaactgcggaagaactggatgaaattattaagcacatggaaaattgtgctgttttagcccacaaagcaggcgttgactgtatcgaagtacatggagaccgccttgtcggatcgctctgctctcctattttaaatcacagaacagatgaatatggcggagaccttgcaaaccgtacacgtttcgccttaactcttgtacggcgtttaaaagcaattgtcccagatatggttatcgactacaagcttccaatcgtaactcctcttggagataacggctttcggggaaaaggtggtcttccacttgatgaggcctgcatttttgcaaaagaattagaagctgccggtgttgacacattgcatgtcgcgcaggctaaccacaccggaaatatgggggataccattcctgctatggggacacagccatatggttttatggtttcatactctaaaaaaatcaaggaactcgtttccattcccgtatccgtggttggtcgtattgtaacaccggaagctgctgaagccgttattacaaatggctctgctgacatcgttgcactcgggcgttcactgcttaccgatcctgattttgcaaacaagtgtgccgatggacactgctgcgatgtcagaacatgtatgatgtgtaataaaggatgtacagacaatatccaaaaccgtgcattcctaagctgtgtattaaatgccgagaatggttatgagacaagccgtcagattactcctgcagtcacagcaaagcgaattgcaattatcggtgcaggaattgcaggacttgaagcagcacgtgtcgccgctctgagaggccatcaggtaactatatttgaaaagtcactccagatcggtggtcagcttcttattgccagcgttccaccccgaaaagaagaaatgatgagaagcattaactactatcttaacgtgcttcccgaattatcagtgacattccgtctgggtcaggaatttaccggaaaagactatgattcgtttgatgaagtaattgttgcaacaggtgcaacgaatgcaatcattcccgttccgggcaaagatcttccaatcgttacaagtgcatgggatattcttgctaaaaaagaaattgtattcggcaacgtatctgtcatcggcggtggtcttgtaggtgttgaaactgcggaataccttgctgcccgcggatgtaacgttacaattattgaaatgatggatcagattgcaaaggaagaaagcagcacgattctcccaactttgatgagtgaattagagcattccaatgtccagatccttacctctgcaaaactatcagagatcaatgaccatgcagttattgttgagaaaacagaaaatgaaaaaacctcggtcttagagatcagatcggatttcgttgtaatggctgttggtgcaagaaagaatcttccggatctttcggcttgtccgctcccgcttcattatattggcgattgtgccggagagcgtccgagcaatatcgatcatgccattaaatcagcatatgatgccgcatgtgaaatataaaaggttttttccctattcgtacccagtatatattcacattcgcagaatatctgcagacatgaaattacgggcgtgtcagtttctgacacgcccgctttcattctcatcttatcatttgtattcttgccgcagtcttcctacaaccggaaatgctccatgctgtctgcaagcactttcatgtcgccctccagcttctcgnnnnnnnnnnttccgctggagcgctccaccgttccctccagctcagttgtcatactggaagtctcctccgtggatgccgcattatctgtcgcaagatgcgtcagcacctcgatgctctgggtaactttctcacgctcctcattcgcagtgcggatcatatccgtcaccacgcggatggaattcgtgcacgcctccagtgccttctgcatatccagaaacatctcgctggtatgattcagcgcctctacctgctgcttcgacgcatcattcatctgtaccataatgcccatcgacttctcggaattctctgtcagctctccgataatgtcgttaatctcatgcgctgtatctgccgactgtgtcgcaagacttccgatctcttccgcaactaccgcaaatccgcgtccggcttctcccgcgcgcgccgcctcgatcgaagcattcagtgaaagcagattcgtctgatctgcgatctcactgatcagcgtcgccgccttgctgatcttattgacggatgcattggtactctccgtctgtgtatacatcgactcgatatccgcctctgtcttattgttcgtatcgatcaattcacgaagcttagcgagcgacttatcggaatactcctgcatctgattggcattgccgaccagttcttccatctcgctggagatcttctcgatgccttccgcgatcgtcatgataccgttggacgcttccgtcgtggatcctgcctgcgtcgtgctgttttccgcaatctcattgacggcaaccgcaacgtttccgatggactcctgcat

SEQ ID NO: 405 - DNA, 15870 bp, unidentified
  source 1..15870: mol_type = unassigned DNA
  misc_difference 10775: note = a, c, g, or t
  misc_difference 10776: note = a, c, g, or t
  misc_difference 10777: note = a, c, g, or t
  misc_difference 10778: note = a, c, g, or t
  misc_difference 10779: note = a, c, g, or t
  misc_difference 10780: note = a, c, g, or t
  misc_difference 10781: note = a, c, g, or t
  misc_difference 10782: note = a, c, g, or t
  misc_difference 10783: note = a, c, g, or t
  misc_difference 10784: note = a, c, g, or t
  misc_difference 10785: note = a, c, g, or t
  misc_difference 10786: note = a, c, g, or t
  misc_difference 10787: note = a, c, g, or t
  misc_difference 10788: note = a, c, g, or t
  misc_difference 10789: note = a, c, g, or t
  misc_difference 10790: note = a, c, g, or t
  misc_difference 10791: note = a, c, g, or t
  misc_difference 10792: note = a, c, g, or t
  misc_difference 10793: note = a, c, g, or t
  misc_difference 10794: note = a, c, g, or t
  misc_difference 10795: note = a, c, g, or t
  misc_difference 10796: note = a, c, g, or t
  misc_difference 10797: note = a, c, g, or t
  misc_difference 10798: note = a, c, g, or t
  misc_difference 10799: note = a, c, g, or t
  misc_difference 10800: note = a, c, g, or t
  misc_difference 10801: note = a, c, g, or t
  misc_difference 10802: note = a, c, g, or t
  misc_difference 10803: note = a, c, g, or t
  misc_difference 10804: note = a, c, g, or t
  misc_difference 10805: note = a, c, g, or t
  misc_difference 10806: note = a, c, g, or t
  misc_difference 10807: note = a, c, g, or t
  misc_difference 10808: note = a, c, g, or t
  misc_difference 10809: note = a, c, g, or t
  misc_difference 10810: note = a, c, g, or t
  misc_difference 10811: note = a, c, g, or t
  misc_difference 10812: note = a, c, g, or t
  misc_difference 10813: note = a, c, g, or t
  misc_difference 10814: note = a, c, g, or t
  misc_difference 10815: note = a, c, g, or t
  misc_difference 10816: note = a, c, g, or t
  misc_difference 10817: note = a, c, g, or t
  misc_difference 10818: note = a, c, g, or t
  misc_difference 10819: note = a, c, g, or t
  misc_difference 10820: note = a, c, g, or t
  misc_difference 10821: note = a, c, g, or t
  misc_difference 10822: note = a, c, g, or t
  misc_difference 10823: note = a, c, g, or t
  misc_difference 10824: note = a, c, g, or t
  misc_difference 10825: note = a, c, g, or t
  misc_difference 10826: note = a, c, g, or t
  misc_difference 10827: note = a, c, g, or t
  misc_difference 10828: note = a, c, g, or t
  misc_difference 10829: note = a, c, g, or t
  misc_difference 10830: note = a, c, g, or t
  misc_difference 10831: note = a, c, g, or t
  misc_difference 10832: note = a, c, g, or t
  misc_difference 10833: note = a, c, g, or t
  misc_difference 10834: note = a, c, g, or t
  misc_difference 10835: note = a, c, g, or t
  misc_difference 10836: note = a, c, g, or t
  misc_difference 10837: note = a, c, g, or t
  misc_difference 10838: note = a, c, g, or t
  misc_difference 10839: note = a, c, g, or t
  misc_difference 10840: note = a, c, g, or t
  misc_difference 10841: note = a, c, g, or t
  misc_difference 10842: note = a, c, g, or t
  misc_difference 10843: note = a, c, g, or t
  misc_difference 10844: note = a, c, g, or t
  misc_difference 10845: note = a, c, g, or t
  misc_difference 10846: note = a, c, g, or t
  misc_difference 10847: note = a, c, g, or t
  misc_difference 10848: note = a, c, g, or t
  misc_difference 10849: note = a, c, g, or t
  misc_difference 10850: note = a, c, g, or t
  misc_difference 10851: note = a, c, g, or t
  misc_difference 10852: note = a, c, g, or t
  misc_difference 10853: note = a, c, g, or t
  misc_difference 10854: note = a, c, g, or t
  misc_difference 10855: note = a, c, g, or t
  misc_difference 10856: note = a, c, g, or t
  misc_difference 10857: note = a, c, g, or t
  misc_difference 10858: note = a, c, g, or t
  misc_difference 10859: note = a, c, g, or t
  misc_difference 10860: note = a, c, g, or t
  misc_difference 10861: note = a, c, g, or t
  misc_difference 10862: note = a, c, g, or t
  misc_difference 10863: note = a, c, g, or t
  misc_difference 10864: note = a, c, g, or t
  misc_difference 10865: note = a, c, g, or t
  misc_difference 10866: note = a, c, g, or t
  misc_difference 10867: note = a, c, g, or t
  misc_difference 10868: note = a, c, g, or t
  misc_difference 10869: note = a, c, g, or t
  misc_difference 10870: note = a, c, g, or t
  misc_difference 10871: note = a, c, g, or t
  misc_difference 10872: note = a, c, g, or t
  misc_difference 10873: note = a, c, g, or t
  misc_difference 10874: note = a, c, g, or t
tcagatcgccacatcctgccactgtccgccgatcagttcgcgggtggatttgaacccggcctttttcagcagttcgaatgcttccgcacgtccgtcgttcaccaggtcgggatagtggcagtctgagtttaccatcaccggaatatccagctcatgtaagcggtgcagatagtcggtatgcgggtagacctcctgtttcttcacgaggtttttcgtgttgacttcgaccatcaggcccttttcggcaatcaggtgcagacagtcgttgaactgtttttgataccagtccgcttgcaggtcgaagccttcgcatttgtgcccgttcatgtatatcttgtccatgtgcccgacgatgtcgattccgcctgcctcgatcattcgccgtgtggaactgaaatagtgggcgaccagcttgcggatatctccgtcgtagtaggcgtcgacagacttctggtattcccggaaaggaccgtcgatacacaccatattctcttccgcaagcggctgtgcgatcggaagaaagtggatggaaccgatacggtaatcgagcggcagattgcggaagtaggggatggacgcgttgtagctttcgtctaagaaatcgatttccagtcctacgtatatttccaaccggtcactgtatttctttttcagtcgttctatttctgtcaggtattcgggcatgtcgtctttagacatgttccagaatgtttcgaacggcagtggtgaatgggatgaaaaaccgtaggcgcggaacccgtgcgcaacagcgaatttaatgaagtcttccggcgtgctccgaccgtcacagaatgtacaatggctatggtagttactgagttgcataaatttttacttgtaaaagggcaaagataatttttttatcccgaaagacaacctgtttgataaaaaaaggcttgattgctgcctaagggttagcggcagaatcaagccttgaaaaacacgtgaataatgaaaaatcgtatgttttattttattacgttcagttcttttccaactttgataaatgcagcgattgctttatccagatgttccgtttcgtggcctgcggacaactgtacgcggatgcgggcctggcctttcggcactaccgggtagtagaagccggtaacataaatgccttcttcctgcatcttggctgcgaaatcctgggataatttagcatcatacagcataacggcgcagattgcggactgagtcggcttgatgtcgaaaccggctgctaacatcttttcacggaagtagctgacgttgttcatcagtttcgtatgcaaagcatcgctttctttcagcatcttgaacatttccaggctggcacctacgatagcgggagcgacagagttggagaacagataaggacgggagcgctgacgcagcatgtcgatgatttctttctttccggttgtgaatccgcccatggcgccaccgaatgctttacctaacgtacctgtgaagatatcgactcttccgtatacattatattgttcagccacaccgtgtcctgtcgggcctactacaccggcagagtgggattcgtcaaccattaccaatgcgtcatatttttctgccagttcgcagattttgtccatcggagccacgtttccgtccatagagaacacaccgtctgttgcgatgatgcggtgacgttgtgcctgggcttcttgcaggcaacgttccaggtcggccatgtctgcattggcataacggtagcgttttgccttgcaaagacgtacgccgtcaataatggaggcatggtttaaagcatcggagatgatcgcatcttcttcagtgaacaacggttcgaacagaccgccgttggcatcgaaacatgcagcgtacaggatcgtatcttcggttttgaaatagtcggagatagcggcttccagttgtttgtgcagatcctgtgtcccacagatgaaacgtacggatgacatgccgtatccgtgtgtgtccatagcttctttggcagccttgatcagacgttggttgtcagacaggcccagatagttgtttgcgcagaagttcaaaacgtcgcttcctgcgtttactttgatgtcggctctttgaggagtggtgatgatacgctcgttcttatacaatccggcagctttgatgtttgccaattcctgagtaaggaaatctttcagtttaccgtacataactttgttttttgttagtatttttaattaagttgacaattatatctctattatcgcagacaagtggcaaaatattattcttgaaaccatttttttctttgtctctgatttgtctgccgatgcggcaaaggtcatattttttttgaatatataggctaaaaaatacaagaaattcataccggaatgtttttattctctatacctttgccatcgaaaaaacttaaaagaacatcaaacgcaatgaagaatgtattagtaattggttctaccggtcagattggatcagagttaaccatgaagttgagaggtatctacggtggaaacattgtagcaggttacatccccggacaggagcctaaaggcgaactgctggaatcagggccttctgcaattgtcgacattacaaacgaacagcagattgctgagactgtgtccaaatataaggtagatacgatttataacttggctgcactgctgtcagccgttgcagaagcaaaaccgcagcttgcctggaaaatcggtatgggcggtttgtttaacgtattggaagttgcgcgtgaaatgcattgtgctgtattcactccgagttcaatcggtgtgtttggcaataacacgccgaaagacaagactccgcaggatacgatccgtaacccgcgtactatgtatggcgtcacgaaggtttcaggcgaattgttgagtgactactataatatccgtttcggtgtcgatactcgttccgtacgttttccgggacttatctcctatgtgacacctccgggtggtggtacgaccgactacgcagttgatatctattattcggctgccaaaggtgagaagttcgtatgtccaatcaagcagggtacattcatggatatgatgtatatgccggacggtctgcgtgcagctattgaaattatggaagccgattcgacgaagttcgttcatcgtaactctttcaacattgcatccatgagctttgatcctgaaattatctacaacaacatcaaaaagtatgttcctgacttccagatggaatatgatgtggatccgttacgtcaggctatcgcagaatcatggcctaactctttggatgacacatgtgcccgtgaggaatggggctggaaaccggaatatgatctggattccatgactcaggatatgttggctaaattgaaagaacgtttcaataagtaagaattaattttccgatcattagcagatcggtaggaaagaagcgactgcccggtgtcggacagtcgcttttttgtttggatcgtttttatccagtattgtaggctgtttcaatcataatgtgtctgttgtttgtgcagggaatgactaagtcaaaagtgtatgaaaaattatgttgtaaaacatgaaatggttaaatcaggttaagagaaagcttttttttgtggaaatattatgctgcataacataaactctctatatttgcactgtgtttttcatggtattagatttaaggttaacaatgaagattggctgtctgtgaagatagcctttttttgtttatacccggttgatgttgtttcctccgagaagcgatcattttatccgaattgcccgttcttttggtattcttgattatatttgtatatctgaaaagattcattgtaataaaaatatctttatatggaaatgtacaaagcaaatgacaaccggtatgccgatatggcttataggcgttgtgggcggagcggattgctattgccggtcatctctctgggattgtggcataatttcggcagtgtagatgtgttcagtaactttattcagattgcgtatgccgctttcgacaatgggattacacattttgatcttgccaataattacggtcctgtgtatggatcggcagaggaaaatttcggccgtatcctgaagaaaggtctgggacaatatcgggatgaacttgttatttccacaaaagccggatatgacatgtggcctggtccgtatggcaactggggaagtcgcaagtatctgatggcaagccttgaccagagtttgaagcggatgggattggaatatgtggatattttctattcgcatcgtccggacccacagacgccggtcgaagaaacgatgggagcattggctgacatcgtccgccagggaaaagccctgtatgtcgggatatcgaattacactgccggacagacggaaaaagcacttgccgtattgaaagaacatcgtgtgccttgtttgatccatcaagcgcgttattcgatgctggatcgcaggatcgaaccggacttgttgcctctgttgaagcaggaaggagtagggatgatcgccttctcgccattggcacagggcatgttgacggataagtatctgaacggtattcccgataattcgcgtgcggccaaatctacgggccatcttcaacgtgaacaggtgacggaagaaaaaataaataaagtaagacaactgaatgaccttgccaaacaacgcggacagacgttagcggaaatggcgattgcctggctgttgaaagacgaccgggtgacgagcgtcctggtgggagccagttcggttgcacagttgatagataacctgaaggcgttacaaaatacagccttttcagcggaagaaatacaaatgatagaaaatatattacagtaatatacactgataaatcatcatttattaatccaaacaattaatgaaaccattcttatatcaggttgcatcccttttttattctgaatacggggcggaagtgagccatctggcctttgttttcccgaatcgccgtaccgggctgttcttccagaaatacttgtcggaagtatctgagaagcctcttttctcgccgacgatcctgacgatcaacgatctgtttgtacagttgagcggaaagcaggctgccgatcggatcagcatgctgtttaaactatatgatatttatttgagacatagcggttcttccgaaacgttcgacgagttcttgtattggggggaaatgctgctgaatgattttgacgatatcgataaatatatggtagatgcccgtatgctcttcaccaatgtgacggacctgcgtgagatagagaatgattttagttttctgagccctgaacaaattgcggctatccggactttttggtcttctttttacccgaaaggagatacgcccaaccaggaacaatttctggcggtctggcagattttatatgccctatataccgatttgcgggaagcgcttgccaccgaaggcaaaggatatgaaggtatgattttccgggaagttgtcgaacagatggagaaagacgaatgttgcgacctgccctatacaaaggttgtatttgtcggactgaatgccctctcggtggctgaagaacgtttcctttccgggttgcaaaaacggggaatagctgatttttactgggattacgcctctccgaaagtgacggacccagataataaagcctcttacttcgtggagcgcaatttgcggcaattcccgtcgcaattaattgaaaatggacaattgactattgacaatgaagatgacgacaaaaagaagatcgaggtgatcggcatcccttccggaatcggacaggcaaagcaagtgtgcagcattctgaacgagctttgcaaggaagacgaaatgagtgcggaagaagcgttgcggacggctgtgattctgccggatgaacatttgttgattccggttctgaatgccattcccgaacagatcaaacggatcaatgtgacgatgggatatccgttggccggtacaccggtcgcatctttgatggaatatattctggctttgcaaaagaatattcgttatgtggaccggaggccggtgttctatttccgggatgtcttgccaatcctgaaccatcggtatatctcgactacttctccggaggtggtttctaatctggtaaaagatatttcagaaaacaacaagatttacatatcgtatgacgatctgaataagacgccattgttgtccatcctttttactccggtgactgcggtggaaactttctccgattatttgattaacgtgttgcaggaactgaataaagctgttgaaggtggaaagttgaaagttgaaagtgtaaatagtgacactgagccactttcaactttcaactctcaactctcaactattaacgatatcgaacaggagtttatcttccattatttcgctacggttaaccggatgaaggaagtcatgcgggaggcgaatgtagaaatgaaaatcgacacctatttccgtttgctgaaacgtgtgacggacacaattacgattcctttccatggtgaacctctttccggtttgcagatcatgggggttttggagactcgtgcgcttgactttgaccggttgattatcctttcgatgaatgaaggaattttcccgttgaggaaagcggctaattcatttattccttataatcttcgtcgtggattcggtttgccgacatacgaacatcaggacagtgtttgggcgtatcatttctatcgtttgatttatcgtgccagccatgtcagtctgctttatgatacaagaagcaacggattgcagacaggcgaggttagccgtttcgtgcatcagttgcattatcattatgaggagccgatacagaataagctggttgtttacaatgtctcttcttccaagactcctgccttgcaggtagctaagacggaggaagtcatgaaccgtctggctgatttccggagtggtgggacgcgggcgatatcggcgagtgcagtcaatacctatctggattgtccgcttaaattctatttctccgttgtcgagggaatacgtgaagaagaggaggtaagcgagacgatcgaaagtaatgtttttggaagtatcctgcataaggtgatggaagaattgtatcagccattctgcggaaagatggtgacggctgatctgctgaaagcgatccgaaaagatacgcctatgttgacgggagcagttgcccgtgcctttgccgaaattttctttaaaacggacattgttcgtccactcaccggacaaaacttcctgatcggcgagatgattcgcaaatatgtggagaaagtgctggaacgtgacgcaaaacagactcctttccgttatatcgaatcggaaaagaagataaaatgcctttttccattgacggataaaagcaatatccagttgaaaggatttatcgaccgtatagacgaggtacgcgatgtcgtccgcattattgactataagagtgggggcgggacgacgcagtttacctctgtagaagctcttttcgacaaagcagatacggatcgttccaaagcggttatgcaggtctttatgtatgcatggatgtataacaggtcagttcagctttcaacagctattcagccgggtatctattatatgaggaccctcttttcttcctctttcgatcctggaatttaccatcgtacagaccggttcaaaacagaacaggttttggacttcgccaactatcgcacggattttgaagacagcctgcgaaattgcttggatgaaatcttcgacacagaaaccccattcgtgcaaaccccgaacggcaaagcctgcatgtattgtccgtttaaggatatttgcgggaaatagtatttttacagatttcccatatattcatccacaatttcattcaggaagcggttgaatggaagaagctttcgaaaacaatcgatggtttcttccatccagtccggctggctgaaaaaactgtcgggcttaatacctataacgctgaagtctttgtgccttaatatatgaccgtaaggagaatcggaggggaaaccggccgggatacgttttagcatgtccccttcgagtgacgggtacagagctttgaaggaaggctcttcgatgatggaaacaaattcatctatgttattgtatatttcacgtcgaaggactttcaatatttccggtttgggataccagataccaccggacagtacgcagtattccggttcaagatgaaagtagtaagctccccggatactatgacgtcctccttgagcaatacaggctaacatataagtcttgtaaggcgacttgtcgaggctgaagcggatgtcgcgattaatacggaacagacatttccgggcatccaatccccgtatatcaggatcaaatacgctgattcgttcgattaactcttgtacttcgttgataaaagcacagcgaagtttgtcatatcgttctctattttcatggaaccaaacggtattattgtttcgtcgtaaatcgtctaagaatcggataatttctgcattcatattaggatattcttttttttattgtatttcgtatctccattgtttcggagtcatctgtttcatctttttgaaatagcgattgaagtagggaatgtcggtgaagccgcattgccaggctatttcgttaatgtccttatccggaaagttgcggagtaaagtgccaacggcctctatccggtattcgttgatgaagtttgtaaacgttttgcctgtttcacgtttgaaaaacgagcagaacgccgttgtgctcatgctgattacgtttgcggcgtccgaaagagttattttctccttgtaatgctcgatgacgtatttgaagatcagttgcatacgttgcatgtttttggtaatgccgttgaataccgtttcctgcaaaccgatagggattaaatcggttgtggttccgatttgttgcaggatgcggatcaacatcagcatcctttcgcttgcattcaggaggttcatttcttctaagcaggatttgatctttccggctgtttcgcctgtcagcaggatgccttgctggattgccgataaccggtgagcggcatattcccattcggtaaaaaaagacaggccggtttgtagcaagtcgggattgaattgcacaactatgcatctccgttttccatcaggctcgcagctttcggggttatacatccaacaatgtggttggttggtcgggaccagtacgacttctccctcctcgaacggctccagaaagtcgcctatcatccggtagcctgaacctttcacaacataacatatttctatttcgggatgaaaatgaagaggcatttcgtctttcgggtacaagctggaataatcgtagcgtaatgaggcacaactatcttttttgatttgttcgaattttagtttctcgtgcatgtcggatgaactttctgataaaacacagtaaaattagacaataattgcataatctgcgacaattacacttaataattttgttgtttctttgcggccggaaaaacagaaagattgaattaggttatgaagaaaggtttgtatgcattgtcttttggcacatttgggctggggattgcagagtttattatgatgagtatcttgccggatgtggcggcaggatttgatatttccttatccgaagccgggcatcttatttcggcttatgcgttgggtgtatgtgtgggagcgccgttggtagtggtggtggccaggagttggccgctacgtacgatcttgctcgctttggttgggctttttgttgccgggaatctgcttatggctctgtcggccgattattggatggggttgtgtgcccggtttgtatcggggttgccgcatggggcttatttcggagtcggttcgattgttgccagccgtttggcggagaaagggaaaagcacttctgctgtagctattatgattatggggatgacgattgccaatttgttcggtgtcccggccgggaatttcctggggtactttctgtcctggcgtttggtttttgtgattgcagcgttgtggggtggcgtaacgatttggtttatccggaggtgggttcctgttttgcccgccctgccggcgacgaatctgaaagggcagtttcgttttttgagaaggccggaaccgtggatgctgattgctgctaccatgttaggaaacgggggagctttttgctggtatagctatgtcaatccgttaatgacggaggtgtccggtttcagtgtcgggacaatgcctgtattgatgttgctggcgggtgcgagcatgtgtgtcggtaactatttgggagggcatttgtctgatcgttttacacctggtatcgtagcgatgtccatgcagtttctgatgtttgcatcacttctgctgatttatttttttgcttcgtacggctttttgtccgctttgctgatgtgcgtttgtactggttgcctgtttgcagtttcttctccacagcaattgttgttgcttcaatattctcctggtggagagatgatgggcggggcgatggtccagcttgcttttaatttggggaatgccgtgggggcttattttggaggattgtcgatcgaacatggggcagggctggaaagtacggcattgatcggttcgttttttgccctgttaggaactacggtatttctggtattcaactatatggtgtttaaacctcagaggaaattacttttaaaggggggaatataatttccgaggatcaagacggtgtttttggagataaaaaacagccgtccgaaatcgggacggtgtttttggagataaaaaacagccgtccgaaatcgggacggtgtttttggnnnnnnnnnnnnnnnnnnnnnnnnnnnnnnnnnnnnnnnnnnnnnnnnnnnnnnnnnnnnnnnnnnnnnnnnnnnnnnnnnnnnnnnnnnnnnnnnnnnnagataaaaaacagccgtccgaaatcgggacggctgtttggatttataatgtctcttgtttcagttgttcgacgaaacgatcgattcgctgtagttctttcggaatatcgattccctgcggacagtgtggattacattggttgcaactagtacaatgatctgcttggcggagtttcggtacactgcggtcgtacccgatcagataagcccggcgagcttcgcggtagttttcatcctgtccgctctgagggacattcccctcgttcacacatttattataatgaagcaaaattcccggaatatcgataccgtaaggacaaggcatacagtatttgcagtcgttacatgggatggtcggatactgcatcatcaagtcggcggtgtcgaacaagaaacggttttcctcttccgtcaacggttgcaacggacagtaagagcggaggttgtcttgcaggtgctccatgtaagtcatgccgctcagcacggtgagtacgccaggaaacgagccagcaaaccggaaagcccaggaggcgacgctccgtcccggttcgcgttgcttcaggcgggcgacgatatggtcgtgcacgttcgaaagccgtcctccgaggagtggttccatgatgatggcgggaatcccccgtttctgtaattccccgtacagatattccgcatcggtgtttcgcgggttgatctctttggcatgtttccagtccaggtaattcaactggatctggacgaaatcccattgatattcgtcgtgtttcgaaagcaaataatcgaacacctctatatctccgtgataggagaaacctaagtttcggatacgtcctgccttgcgttcttcgagcaggaagtcgagtatgccgttcttgacataccggttttcataggcttctataccacccatgccgatcccgtggagcagcatataatcgagataatcgacttgcagctccttgagcgaattgttatacatcgcgatagaggcttcgcggctccatgtgtcgggagagaagttcgaaagcttggtggcgatataatatttgtcgcgcggatagcggctgagggcgatccccatagcatgttccgaacgtcctttgcagtaggcgggcgaggtgtcgaagtagttcacaccgtgctcgatggcatagtcagtcagccggttgaccatctcctggtcgatttcgtcatcgctatctcttgcgctgcttttggcaatagtcggcagacgcatgcatccataaccgaggatggaaactttgtcttttgtggacggcgtcgtgcggtatgtcatccggtccgtgggaataggggtggagcttcccgaacctgaggccatctcgctgtccgaactgcacccggagagcaacggggcggtagttgccgtgctgattcctacaatcttcaggaaatcgcgacggtttatcgcttgatgattgtctttttccatatgtgatgattcttttatttcttgatcaaatattccggtgttgttcgtgcccttccacataaatggcgctgaacggacgcgacgggcacaggttttcacaggctccgcagccgatgcatttttcctcgtttacgaccggaagttgaggcgaatccgggtcgttcgggtcttttgccaccatcaagatcgcctgggtagggcaatggcgggcacagttgccgcaagtgacaccatcccggttgacgatgcaattttcctgaatcagtacggcatgtccgatctggatggccgttttgtccgctttcgtgatcggacggatcgctccggtcgggcaaacttccgaacatttgacgcattcgggacgacagtatcctcgctcgtacgatacttctggctgcataaatgtttgaaggttccccgaaggacgcagcacatggttcgtacaaaccgatacacaaagctggcacgcggtgcaatgctgggagaaattggcagcgctcagcgaacccggaggggtgatcggggttgtccggtccggtttctttttatcttcgatgatggccagtccgccgtcgactttcttgtccgggagttgtactttttcttgggctttcaatgcggcagaagtggcaagtaatgccgatacggtaaagaacttgcgacgatcgggcttgtctacgaccggttggttggtctgtgtttcagccttgtttgtttttctgcgtgtatatcggatggccccttgtcggcatttgtctatgcagtccatgcaatcgacacagcggctatagtcgatctcgtgtactttcgcattgatacaggctgctttgcaattacgggcacacaagccgcaaccattgcatttggacgtatcgataaccggtttgaaaacggaaaaacgggagatcaatcccaaaaacgttcctaccgggcagatcgtgttgcaataggttcgcccattccgccaggcaagtatgatcagtataatgaaggtaactgtggcaatgataaaggttgggaggctccgtagccagacttccgtttcgtagaaagcataattgtctgcccgttctgccaagtaggccagaaagttgtttccccattgccagaggggtgcgaataagttagaggcgatacgcccgtaagcgctgtaaggtgcgatcaatgccgcccatgctcctaacccgctgatcatggcaaggataaatatcaccatggctccgtatcttaaccaggacaaggcgggggaataacggaaacggtttttcttccgtttccccgcaagccatgaaacaacatcctggaatatgccgagagggcagattacagagcagtaaacccgaccgaaaatccaggtcaatacaatgagaaacagtaccacgccgaggttgagtgccaataccgccggcaggaactgtactttcgccaaccacccgaaccatgcatgcaacgtccccgtgaaatcgagaaacagcagggttacaagcgtaaaacagataagtgcagttgtaagtctgatcgttcgcaacataataaactctttttagatagtctgttattttatgttgcaaacataataaaaggaaatggtttgcaacttacacgaattacggattgatgtaccaatattacggttttgtcaacttctgcaaaaagtctggctgacaaaccttagaacttcaggcaaggccgtccgccaataggtccagctatggccgccgtctcgtactcggaattcatgcctgatccctttctgcttcatgacctggtgcacctgcatgtttccgtccagcaggccgtcgtcatcaccgcaatcaatgtaataacgaattttgggcaagttgttttgattccagtcggaaaggatcttcaagacattgttttgcttccagtgttcgtctcccggcccgaacaggcggttgaataaatccttgtgcgatttgttttttcttgcctccatgactgtgtcgtcgaaaacggcggcactcaacggagcacatgcgcagaacatgttcggatgatgcaagctgtacaggaatgatccgtagccacccatcgacaatccggcaattgcccggctttctttgtcactgcgaatccggtatgttttttccatataggggataagttcttcaaaaaacatgtcttcgtaaggtacttttccgtcatactggttgatataccaagtgtcccatgcgtccggcatgacgattatcatcggcacggcttcctcgtttgcgatggcacggtcggcaatcgttttcatttgtcccatctgtatccagttggtttcattgtccgtgtaaccatgcaagaggtagaggaccgggtaattccttttcgaggtgttgtagtcggaaggcaggtagatggagtaggaaactttcctacctaatttgttactttcaaaagagagcgattcgaaaactgtgctctgcgaatatcctgccatattgagtagaaagcacaggataagatggaggtaaattttgtttttcatatattattaataattagatttgcttgtctggacaaagtagaaataagagaagagagtttgtctgaaaacttattaggtttcgacatactctctttttcttatttggaattaatctgccatcggatagggaaattcggtcaaccctttgtacatgaattgataggtcggaacttcgattcccaattcttgggcagttcgtacgacatagcctgtcaatgtttccacttcggtgcgattgcttttttgaaaatcactgtgcatggaggttgtggagttgttaggcatgatcttctgggcgtcgatggcggagaatacttgaccgtccggcagacggatccctttggcttctgccacgcttttgagttcataacctaatgtgatgaacagatcgatatggttatttaccacttcgccaatcgtttcattgaaataggaggtgatagtggcggcggtcgagatcatgaagaatttcttccagatttccaagtcaatgtcatccggtattgtggtaaggatacgggcgttggccaatatatcctgtaagtctttctgtcgtttcttgtttccttgtttacttccgaagaacatccggtcctttatggtgaacttttccactcttcccggtctgaccaagcgggaaccgatgtaaacgcatcctttccaaacttcattgttcggtaatagcttttgtatgcgttccgctatatccgctccgttcagcaggggaatgataaccgtattagggccgatgatcggagtcagctgaactatattctcctccaagtcgtagcttttggtacagcaaaacaggtaatcgactggtcctatttcagcaggattgtcggttgcgagggttggttttgctttgatcgtcaggaatgtatttttgacttcgatgccgttcttacgtatctcttccagattttcaccccgggaaatgaaatagatgtcaatatcttcagagtctttgtaacgggcagctaatagtcctccgtagtagccgcctacagctcctataccggaaatcgctattttagttttattcat

SEQ ID NO: 406 - DNA, 9079 bp, unidentified
  source 1..9079: mol_type = unassigned DNA
tcaaaatgtaatattgagtccaaatgtataaatcgcaggtaccggataacttccattatccacaccaaaagcaatggcagaaccaccaaactcaggggtgtagccggtattatgtttccaagttttcaggttctgaatattgaaataggctttcaaagccttcaaaccgattttggatatcagggccttatcaaaagtatagcccaattgcaggttacgtatacggaagaaactgccgtcttctacataatactccgaattttcaaagttaatggcatgaccggtatttaggacaggttgtgtattggatgtaccttcgccgtgccaacggtccagacgctgctccatatagttgaactgcgcccaattgtaattgtcccaagtacggtaaatctgattaccgccctgtcccatcatgtcaatacccagttcccaacctttataggaaacacctaatgagattccataggtaacatccggagtaggatcaccaatcaaagtacggtctgccggtgtaatctcaccatccccattcacatcggcgaacttcaaatcaccgggagtcactgtagccaatgtattcttgggcgaagcatcaatatcggcctgtgactgataaacaccatctaccttatatccatagaagaaaccgatgggataacccgccatagtatagctctggctcttgtctccggcaataatggaatagccgtcttgtaccagactcttcaccttattcttgatagtagtcaggttgactcccacattatacccccaatcgccaatctgatcccgccaagtggcagacaattccacccctttattctctatctgtcccagattcccaattcctggaacggttccggaaagtccgggaacctttgccagcaggtctttcgtattctttttataataaactccttccacatgcaggcggttgcgaaacatattcgattcaaagcctgcttcccaagcttccactttttcccatctaaggttcgcattaggcaaataggccaactgatagcccggatagatggtggacggattgccaaacacagctccaaaagcattttcaagcaacggctcagccggataagcagtatccagattctgattgcccaacgtaccccaggaacctttcaacttcaacatatccaaccaagaaatgtctttcataaactcttcttcggtcatcagccatccggcacctgccgagtaaaagttctgccattggttgcccgtatacgaaaaagccgaagaaccgtcccgacgaaaagacccgttgaacaaatattttcctttgtaattataaatcacacgccccagaaaagaaacagtagtacgttcccactgtgtacttccattggtagctgtggccaaatcaccaatactgacgaaccatttatcgggattatcaggaataaccaatccaataccttgcccacgggcggcatccagacggctgagagaattgtaataagtagtgaaaccggcggttgccgtcagattatggtcgccaaaactatttgtataagtcagcacataatcactttgcaccttcgtttcattttccttgaactggctcacttcagtcttacccgttcccagtgtagccacatttcctttcactgtgttatcatataccttgataatcggctgataggtacgcccgttattcgagccgtaatccatagagaacacagccctgaaattaaaatgttccagaaaatccacctctccataaatgttacccgatgcacgataattctctgcgcgagtggtgttggcttttaaatccacatccaccatcggattcatcatctgtgctttctgaaactccggcaacgccgcatacaactgatattcttcattgaatacaggagctataggagtggtacggacagcattcaggactgatttactatcagcaggcagcatacgtgctccgttaaactgaaacccgacctttatcttgtcggttatcttatactcattactggcattcaaggtgattttgctgaacttctcgtgctttatatttccttgttcgtatgagtatcccatccccagataaaaactatgtttctcagaagctcctgtcacactgatattattattggtaatgaaaccattctgaagcacttcatcctgccagtcggtatcagcgttccagccggaaaaatcaaaagcgggattcttttcattaacaagctgctcactatacaattctttgaactgagaagcattcaccatcttgattctgtccaccacatgtttccagccgaatgaggtgttgatattcaccaaagtctgcccctccttagccttctttgtagtgataatgataaccccattagctccacgcacaccgaaaatagccaatgaagacgggtctttcaacacttccatagactcaatatcctcgggattcagaaagttaatgttatcattgaacaagccgtcgacaatgtaaagaggtttgtagccgttaatggagttcgttccacgtacacggatttcggggtccgagcctgcttgtcccgagttgataatctgcacaccggctacctttccctgcaaggaagacaagggatttgtagaaggtttattagcgatttcggctcccttgatattcgtgatagagccggtcaagtcacgcttcttcgcactaccgtaacctatcactactgtttcagccagcatttgtgagtcctctttcagctgtatatttatcacatgctggctgcctactgtcacatcttgcttcaccattcccacgtacgagaattccagtacattgtcgggtgaggcggtaatactgtacttcccatctatgtcggtaatcgtaccattggaagtaccttgaatcactacggatgctccaatcagaggttcattggtcgaatcggttaccgttccggtcactgtcttctcctgagcaaacagcgacgtagtcatcaacagcagacagactaaagcactaaaagtcctcaatccctgccgcccatgttgtaaaggtttaggtttattgtccattgcattttctattaacaaataaataactagtttaatttcttatattgcaatgaaacaaaaggaaccggaaaaagatgtttaagacgagagaattaacactttaacatcccatgaaaaaaagttacccgaagagcatgtgctcctcggataacttttattattcttatatcaccattctatggtacatggaccaccaagggattacgtaccttctgagcgtattcttccaaatatttgttccaatcggtatcggcttcgaaaccatatttgctccagcctgatccccaataataaatatactcggaacccggttcataatcactgaccgacaacacatgccccaaagcacctccacgttctttctgctctttttcggagaacatttggggcagcgctccttttatattagccggaaatacagcacctatataaatcactccattgttattggctgcattctctgtagagtccgcataggctatataacctgcatttgcatcaaaactataccccgtaggattctgtttgtgcaatacaatgccggtcaccaccggagttgtttcctgcaaattatcaaaagaaaccacagtcttgttcaactgcgatcccttgtccaaagaaatgatacgcgtttctatcacatttgaatctctttttacaaccaacggattataaactaacttggtggtgaatcgaagcggaccgttatccaagacttcacaatccttgtaacaatagggataaacaatggtactatcggggaataaagctgctgttccgccacccagagtcggacccaccgcataacaatccattccgtttccatgatctatgtgataagagattccttgattcaaatcaccgtcataacgatcttccaccaccggttcgggtacattcttggtccagatgtcataaccaaaggcacgctcgcccttctcctgcaaagcaggaccgtatgcacgataagcggcgcgatcgttttcccatgccacatcatccagacgctcgggatattgacgcccacaagcaaccacatccaccggctgtggagttccttctgcaatcgtataagtaaccgaagcttcccctttcaccgaagcaggaaagataagcatatcatcgtatgttatctgataaggcacttcaaggccgttctcgtccaatacgataacttgtgccgtatcgggtaattgtagtttgcctgttatttcagccatagagatttccaccatttctccattcctatcaatagaaagcggattggttactgtaacaatcaccggctccttctgcgaacaggagaacatagtcaacaccgttgcaactgctaaaaagatctttttcatactatttatttcttgtcaaaccgaaaggcaaaaatacaaagaatctgcaagcatcaacaaagacacaagcagattcttcctattttatatcaacaaattatttaggctgtttaccaatgtaagccaaaataccaccatctacatagagaatatggccattcactgcattagaagcttcggatgcaaggaatacagcaggaccagtcaattcctgcggatccaaccagcggccggccggagtcttggcacagatgaatgtatcaaacggatgacggcttccatcgggctggatttcacgtaacggagcagtctgcggagtagcgatatagcccggaccgataccattacactgaatattgtattctccgtattcagaacagatgttacgagtcaacatcttcaaaccacctttagcggcagcgtatgcagaaacggtttcacgacccaactcagacatcatagagcagatattgatgattttaccatgtcctttttccatcatcgcaggcaaaacagctttagaaacaatgaacggagcattcaagtcaatatcaataacacggcggaaatcggcagcttccatttcgtgcatcggaacgcgacggataataccggcattgtttacaagaatatcaattgtacctacttcctttgcgatagtggcaaccatagcctgtacggcaggctcgtcagtaacatcacatacatatccgtgtgctttaattcctttttcagcgtaagaagccaaacctttatccaccaattcctgattgatgtcgttgaaacagatggttgcaccttgttctgcaaaagcagatgcaatagcaaaaccgataccataagaagcgcctgttacaagggcgactttaccttccaaagaaaaattcaaatactgattcatgatacttatattattaaattaatgaagttatattatttatttcaagtctgtaatcaatgagaagtcttgatcaccataatccaaattctctccacccataccccaaataaaggtgtaattgtgtgttgccgccgcactatgaatagaccattcgggagacaagactgcctgatcgcctttcatccatatatgacgtgtttcatccacttctcccataaaatgacaaacagcgtgttcatcaggcacttcaaaataaaaataagcttccatacgacggctgtgcacgtgtgccggcatggtattccacacacttcccggtttcagttcggtcatccccatctgcaactggcaggtaggcaatacctgacttaccagcatcttgttgatgcaacgatgattggaaccttccagtgaacccatttcagcaacgatggcatctgccttggtcacttttttatcgggatagttacgatgagcggtaacagagttaaaatagaatttggcaggatttccggcatctttactttcaaaagtcacttcccggtctcccgaacccagataaagcgcttctttataatccagttcgaacacggcatttccagctttgaccacaccgggaccgcccacattaaaaatacccatttcacgtcgggaaagaaagtaagatgctttcagcggatcaatggcctccagttttaatatctctcccaccggtttggctcctcctacaaccatacggtcatacatggagtaaaccatgttcacctcattgtccgaaaatactttttctattaagaaatcccgtcgtatcctttgagtgccatagcttttggcatcttcgggatgcgcggcataacggatttcataatttgtcttcataagcagctattttatgtttttatagtattccgaattatttcgacttgggcaaagttacgaaacaatcttgtttcgatgctgcaaaaatcgttcagaataggtataaattttgtcctattatatgcaaaatctgctacttaatacgtttcagaacactcaaaaactcaaaatcaacgagataaaatatcacaaaacttatcttgaaacgcacgcgcccggcttaatttcagtacgttttggttaatgataacaaaggccaattgatgtccattagcagcttttacataccctgccagtgaactgaccccggttacagaaccggtttttgcatgcacatttccccgagccttggtctgtttcatccgattttgtaaagtaccgtccactcctgctatgggcagagactcatagaaaggaagaaaaacttcccgatgataataggcatacttcaaatactccaatagtaaacgtggagagatataattataaacggaaacaccgctaccgtccgctatcttatagttctccggattaaaccctaaagctgttttcataaaggcgtgaatggcatcggttccatcttctcctgtcacccgtctatgcagggaacgcttggcagccaaatgataaaacattgattcggcacacaggttatcacttttcttcaaagctctttccaacacttccttgagtggtcttcggacggtataaagcgtaactatactgtcggccgttacaggacaatcggcatacgtgcaggttcgcgcttcaattcctttgctgcgcaaacggctgacaaaggtatgaaaaaagaaatctttggaagtatatacattcaatttctcagtatagggataagaaacattcccggaaacggtaatgatattgccattgctgagccagttacgagtgattttcagctttccggcttgcggattacggctcaccccgtgattatgaacctgataataatcggaaaccggcgtacaaactactttgggcaacgagtctttctgagcaggagaaaccgatacatccacgcagcccctattcagcatgagaggggaaagatagggctggaaggaataaggagtatcgtcccaacaccaaccggaaccccaataaaccgagtctgtcatggaaacatccgccgcaagagtatctgtcacataacggatgcctttacttgccaatgcatctaccagacggtccagatcctcgtccataaattccggatcaaaaccgcctatcagatacaagctgcctttcaacgtgtcattttctatttttccacgataacgaagaccggtatccatggtataatctgctcccagttgtaccaaggcggtaaccgaagtgattattttctcaacagaagcaggccggtacagtttatcgtcctggtaacggtaaacggattctccggcggtcaaatcaaatacggcaatacccacttcggatgttttcagaacttcttcatgcagtaaagcgtccagccgctgagatagcggctgggcgtttatgaagtgaatagataaaatcagtaaaaagaaaaataaaactcgtttcattatagttccctgaatatctcacccacagtaggatgaggaaatacatatcgtttccaatcctctatggtcttaccatcctcaatagccatacctgccaatacaatcagctcggaagcaggattacccaacatgtgcgctcccaatacagtaccgtcttcggctgtcaaaactttgcagacgccgttcactccttcattctcggctacaaaacgcccggagtaagccatcggcaacttaacggctcgataaggaatacctgcggcctgcaaagcttcctcgctcatacctaccccggcaatctcgggatttatatagaccacacccggtatggcacgataactcatcgcatcttccttacctgtaatatgatggacagccacttccgcttcacgcacggcggtatgtgccaacaaagagactccgttcaaatcaccgcatacatagacaccggggacagaagattgcaaatgttcatctactttgatgcatctgcgctccgtccattccaaattcagattttccaatccgaaaccttttgtcaccggacgacggcccacactcatcaataacttatcagctgtaacagttcctgttccatctgcattttcatatgacacagtaataccggtttcctctttggacacccctactactttcgtactgagcaggaacttgattccttttttggcatattcagcccggagcatagccgacagctctttatccatgccacccaggatctcatccaacatttcgacaactgtcacctgtactcccaaactggtaaagaaagaagcaaattccataccgatcactccaccgccgacaatagtcaatgaagcaggtacttctttattatccagtgcatcacggtgtgtccagtaatccacattttccactcccggaataggaggaataaatgtttcactgccggtacacagcagcaaattctcacattcataggtttccccaccacattggatggtattcttatctacaattacagcttctcccgttactatatttacctgatgcgcagtcagttttgccttgatacccagtaccagtttacgaaccacttttgatttacgcgccacaatttttcctaaatcaaaagaagcttcaggcacattcacggcatactttgaagcatgttttgcataatcatatactttagccgaataaagcaaggttttggtaggaatacatccctcattcaggcatacaccgcccaaacttcttttttcgaacaatacaacactcagtcctgcctttccggcagcttcggcagcagtataccctgcgggacctccaccgatgattgcaatttgatatttcat

SEQ ID NO: 407 - DNA, 8000 bp, unidentified
  source 1..8000: mol_type = unassigned DNA
ttaatcttcaaacagcggcttcatcaggggcaggaaatccagcgttgcaaagtaatcgcgcggagtctcggcacggcggatcagacggtgggtgccatcctcgcacagcagcacttcggcgctgcgcagcttgccgttgtagttgtagcccatggcagagccgtgtgcaccggtgtcgtggatataaacgatatcgccaatgtcgatcttgggcagcatccggtcaatggcaaacttgtcgttgttctcgcacagaccgcccaccacatcgtacatatggtcgcaaggctcattttccttgcccagcacggtgatgtggtggtaagcgccgtacatggccgggcgcatcaggttggctgcgcaggcatccagaccgatgtattccttatagatgtgcttttcgtggatggcagttgccaccagtgcgccgtaggggccggtggtaaagcggcccatctcagtaaagatggccacatcgcccatgcctgcgggcaccagaatttcctcaaacttcttgcgcacaccctcgccgatggccatgatatcgttctcggtctgctccgggcggtacgggatgcccacaccgccggacaggttgatataaccgatgtgcacaccggtggccttctgcacccggacagccagctggaacaggatacctgccagctccgggtaatactcatcggaaatggtattggaagcaaggaaagcgtgaatgccgaagttcttggcacccttggcggccagcttcttgtagctttcgatcatctgctcctcggtcataccgtacttggcatcgccgggcttgtccatgacctgaaagccctcttcgctctcgcccagactgaaggtgccgcccgggttatagcggcagaagatgttctccggcacaccggcgacacgctccagaaattccaccatggtggcatcgtccagattgatataggcacccagctcgtaggccttcttcatatcctctacgggagtctggttggaggagaacatgatttcactgccggagaaaccgcacacctcgctgagcatcagctcagtcagggacgagcagtccacgccgcagccctcctccttgaggatctgcaggatgacagggttcggcagagccttgacggcaaaatactccttgaagcctttgttccagctgaatgccttgttgatgcggcgggcattttcacggatgcccttctcatcgtagacatggaacggcgtgggcacatcctgaatgatctcctgtgccatcgcctcggtcagaaacggtttcttttccatagtaacatccctctcattttatatgcacgcggccgatcgccgcagtgacatcagtagaaactcctttcgtcatcgctgatgcgatgccacccattcccctttttgtcgctggcgcgacatctgtttttctctttgttacctgtggtgacatttttccccggcgcagggagaatctgtccctgccgggggaagtctttctcaaagagggaggctttgccgcacggacaagttccctctttgagggggctgtctgcgcagcagactgggggagtttacagcttcagattctggcgggtgggggtgaaggtcgggatcatctttgccagctgctgcaccacaccctcgtcgttgtgctctgccgcagcggcaagctcctgcagctgcccgtagaactcggccagatcgatgctgcgcggcgaagccacaaaaattttattgtgctgggtgcggcgcatcttatcctgctcctcgtccatcatcagctcttcgtagagcttctcgcccggacgcagacccacgatcttgatctccatattcacgcccggctcatagccgtaaaagcggatgagctgcttggcaagatccatgatcttgaccggctcgcccatgtccagcacatagatattgccgctttcggccagcgcaccggcctgcagcaccagctgggccgcttccggaatggtcataaagtagcgctcaatgttgggatccgtcagggtgacaggcccgccttttttgatctgggcctcaaacagcggaatgacgctgccatggctgcccagcacattgccaaaacgcacagccacacacttcatatccgtgttgcccgcaaaggtctggatgagcatttcgcagatgcgcttggtacagcccatcacactggtggggttcacagccttatcggtggaaagctgcacgaaccgctccacatcgtgttcgctggcgctcaccagcagatttttggtgcccagaacattgttcttgaccgcttctgcagggctgacctccatcagcggcacatgcttgtgtgctgccgcatggaacaccacagtgggatgatatgtttcaaaaacctcatccagacgctttttatcgcggatggagccaatgagcaccgttaccgggatatcccggccgtacttctgctgcagctccatcaaaagctcataggcgcagttctcgtagatatcaaaaataagcagcttgccgggcttgaagcgcatcacctgacggcacagttcgctgccgatggagccgccgccgcccgtgaccagaacggtcttgccggtgaggtagccggagatctgatcggtatccagcgtcacctcatcgcgggaaaggaagtccgccgggttcaactcgcggaaggctccctgctgcggtgtaccgctgcccaccagctgcgggtcactgagcagctgcaccgcacaatgggtgctgacgcacagatcgatgacatggttcagcttgctgcccttcagggtaggaatggcgatgatgatgctgtggatgccgtagcgcttgcacaggtccgggatatcctccagcgtgcccttcaccggcaccccgtggatggtctggttgagttttgtgggatcatcgtccaccgccaccaccgcgtgaccatattccttattggatttgcacacgttgatggcccatgcaccggcttcgcctgcacctacgatcatcaccgggcggttggggtccttgctggcagcgccgcgcagcttttcgcccagcggatggttcaaaaacagcctccatgccagacggctgccgcccaccagcaggaagatgagcaccgccgccatacagttggcggagttgaacagcacgccgtggatgcacagacggttgacacagtagacgacaacggtaggcacagccaccgttcccgccagacgcatcaggtcgcgttcaccggcatacttccacagtacggagtacagcccgctgaacagaaagctggcaatgtacaccgccacgatccatggcagattttcgtacagaagctcacggttatgcggccaccaggcagcttccactgctccgtctgcccgcagcagaagcgcaaaataaaagctgaatgcaacaatggctgcatccagcagcacaagcagcgcccggcgcgcaagcacctgcggcgtgttctttttatctttcacaaaaaagtcctctttttgcacacggcgtaaaacgccgctgtttttgccggaaggagcttccggcgttccgtcctgcccggcgcaccagacagccctatctttatattatactcagaacactgcagaatgtccagaaaatttgaatccgctgccaaactccctctattttttcggtctgccgggccggtgcgcagcccagagcgcggctgcttcctctccaaggcccagcggccatgccgccagtaggaacactcctgtggtagcgcagccgcctacgcccaacgcggccagctgcaaaggcagccgagccgcaaacccatccgcaagcagcttccgcagcgccataccagccgccgcagccagcacagctgccagtgccggtgcacccagccagcggcggaatgcatgctgcgtgccgctggaaaacagcagatgcccggtgttggccgcacaggtgtacaagctggaaagcaggatcactgccaaaaagcccttcatgccaaagcgcggcagcagcgccaccaccccgccaatgcgcaggatggaatcccacacgctgtagcggaaggccgccttctgctcccctacccctttcatggcaccgtccaccatgctttccagatacatcagcggcatggcaggagccagcgtttccagataaaacccggcatccgcactttggtacaagagctgtgccagcggccgtccccacacccagaacagcacccctgccagcgcggaaaaatagccggtgagccgcagcatccggtccaaaagtgcgttgagccgttcggtctggcccagaatgtgagcctgcgtgatctccggcattagcagcaccgaaagactgcccagcaggccaaatgggaacgtaagcagcggcagagccatgcctttcagttctccgtactgctccagcgcagcggtgcgcccgcccgcgttgatcagatagaccgcaaggcaggcgggcaccagcatattctccgccgtgtgcagggcgcttgccagcacccgcccgccctccaccggccacaggatctcccacagacggcgggccgggtctgccgggcggacggctttttgccccgcaaaggcactgcgggcatcccgccggtaaaaggccagcatacacagcgccgacaccgcttcgctgacggcggtagctcccagcaccagcatacagcgcacgcccaccgcaaggccctcggtgcgggtaagcgccagtgccaccagcgcgatgcgcaccgtctgctccgtaagctggctgaacacattgggagctacatgccgtcgggcgatgaaaaaaccgcgcagcaccgccgagaccgccatccacggcattcccagcgctgaaacgcgcaaagcaccgacggcgcggacatcgccaagccacaaccgggccgcaagatccgctgtcgtcagctgcagcgcggcggcaaacagccccagcacaagtcctgccgccagcagacggcgcagcatgccgcgggctgcaccacgggcggaagccgggccgctgagttcctcggccatgagccgggtagctgccaccgagacgcccgccgttgccagcgtgatgaacagcgaatacaccgccagcaccagctggtaaaggcccatcccctcgccgcccagctcgtttgccagccagatgcgcaggcccatgccggccagccgcagcaccacgtctgaaccggtgagcagcgccgcatttttcaaatagctctgccgcatggcgcacctcctgccggaatgttccggttccagcatatgaagcggcggaacaggatatgcaaaagcagagcggcgcggcgggttgtttcctgagcgcttttatggtatagtaaaggggcggcttttatatggccgtattctgtttaaggaggaagcacacggccaatgcctctgagccagccgtgcgcaaaaagagaatgagcgaagaatgtacccatgactgctccagctgtggagcagcatgttcttcccgcgatgcagcgcccaagcacgatgcccccaaccccaacagcagcgtcaaaaaagtcattggcgttgtgtccggcaagggcggcgttggcaagagcatgaccagcgccctgctggcctgcgccatggcacgccgcggctaccactgcggcattctggatgccgacatcaccggcccgtccattcccaagctgttcggcatccatggccgtgccatggccgacgacaagggctgctggcccatccagagccgcatgggcatcgatgtcatgagcatcaacctgctggtggaaaatgaggaagaccccgttgtgtggcgcggcccggtcattgccggtgctgtcaagcagttctggaccgacgtggtctggaaggacgtggactttctgttcgtggacatgcctccgggaaccggtgatgtgcccctgaccgtgttccagagcctgccggtggacggcatcgtggtggtggcaagcccgcaggagctggtgagcatgatcgtggccaaggccgtgaacatggctgagatgatgaaggtgcccatgctgggcattgtggagaacatgagctacatcgtctgccccgactgcggcaagcacatcaatgtgttcggcgagagccatgtggatgaggtggctgcaaagcacggcctgcccgtgctggccaagtgtcccatcgatccccagctggctgcgctttccgatgccggtatgatcgagacctacggcggcgaatatctggaaggtgccgcagatgcctgcgaaaagctgctgaagaagtaaaaatcgtttctctgccctgtgccgtttgcgtggtgcagggctttttgtttgcagaaaatatggctttctgcgcctgcgaaatgcagcaaaatggagaaaagacgttcttttccgtatttcttttgttctgccagcgctttaaaaaacaaggttctgtgccgtttttttcttttatttttcgttttgtgaagcggtctcaacttttcatctgtttttttgaagcattttctgctttctctctattgtcaaacccacagaaatgctttataataataaagcggtctgcagccataagctggccggtgtgtaagaacggaaatccgggatcgtcccaaagcgttttagcagcgcgtccgctgtgcggtgtgccgggcggtttcgtctttttcaaattttatagagtaattgggaaaaggagtattctactatgctgacaaatgaatacctgaagcgcgtttacgaaggtctggaaaagcgcaatgccaacgagcctgagttcctgcaggctgtgcgcgaggttctggagagcatccagcccgttgtggagaagcaccctgagtacgagaaggccgctctgatcgagcgtctggtcgagccggagcgcatcatcaccttccgtgtgccttgggttgacgatcagggcaaggttcaggtgaaccgcggctaccgtgtgcagttcaacagcgccatcggcccctacaagggcggcctgcgcttccatccctctgtcaatcagggcatcctgaagttcctcggctttgagcagaccttcaaaaacagcctgaccaccctgcccatgggcggcggcaagggcggctctgacttcgacccccacggcaagagcgacatggaagtgatgcgcttctgccagagcttcatgaccgagctgtaccgccacatcggccagttcgtggactgccccgccggtgatatcggtgtcggcggccgcgaggtgggctacatgttcggccagtacaagcgcctgaccaacagcttccagggcggtatgctcaccggcaagggcctgaccttcggcggttctctggcccgcaccgaggctaccggctacggcctgtgctacttcaccgctgaagctctgaagtgcatgcgcaacgacagcctccagggcaagaccgtggtcatctccggttccggcaacgtggcgatctacgcctgcgagaaggctacccagctgggtgccaaggtcgtgaccatgtccgactccaacggctacgtctacgaccccaacggcatcgatctggcctacgtcaaggatctgaaggaagtccgccgcggccgtatcaaggagtacgccgagacccacgagggtgtaacctatgttgcagattgcaccaaggtctggactgtcccctgcgacatcgccctgccctgcgcaacccagaacgagatcaacaaggagtccgctgaggctctggtgaagggcggttgcaccgtggtctgcgagggcgccaacatgcccagcaccccggaggccatcgaggtctacctgtccaacggcatcctgtacggacctgcaaaggcttccaacgcaggcggcgtggctacctccggtctggagatgagccagaactccgagcgcctgagctggacctttgaagaggtcgatgccaagctgaagggcatcatggagggcatcttccatgcttcctacgatgcatccgtggctgccggttccgagggcaacctgatggtcggtgcaaactgcgccggcttcctgaaggtcgccaccgccatgatggcacagggcatcacctactaa

SEQ ID NO: 408 - DNA, 5837 bp, unidentified
  source 1..5837: mol_type = unassigned DNA
atggctgagagaataaagttatcagattttgaagagaaggtattaaatagttcagttccagttcttgttgatttttattcagacagttgcgttccttgcaaaaggcttgcaccagttgttggaacagtggaagatgagagggcagaaagcctttcggtatacaaggttaatattaactttgatgcagatgcagcttctgaatatgaagtaacagcagcacctacacttgttctttttaaagatggaaaggaaactgcaagacatacaggcgtattcagaaaagatgaacttacaagctggatagatgctaatatttaattgattttaataaaaaataattatgcctaagaggcaggaaagaggtttaatatgcagttaacagtatcaggagtaaagaaagaatatgaagagggaattacacttccaaagctttttgaaattgaaaatgttgaaacaccagaatatgttacagtttcaatcaacgaagaattcattccaggagaccagaaagaaacataccagttaaaagatggtgataatgttgaattcttatactttatgggtggcggacagagataattataatagtgtaattaactataatgtcacaagatagtattaaaatatcagattcaagtaagaattactttaaaaggagtaagatctactttaaaaggaggtatatatggctttaacagatgagcagatagaacgttattcacgtcatatcattttaaaagaagttggtgctaagggacagaagaagcttcttaatgccaaagtgcttataataggtgcaggtggacttggagcaccagcagctatgtatttagcagcagcaggtgttggaacaataggaattgcagatgcggatgaggtagatcttagtaatcttcagagacagataatacatcagacagcagatgtaggcaaagcaaaggttcagtcagctaaagagacaattaatgctatgaatccagatgtaacagttaacacatatagagaattcattacaagtgataacataatggatattatcaaggactatgatttcgtaatcgatggaacagataatttcccagctaagttccttattaatgatgcctgtgtaatggctaagaagccattctctcacgcaggaataatcagatttaagggtcagcttatgacttatgttccgggagaaggaccttgctacagatgtgtatttaaaaatccaccaccaaaggatgcagtacctacatgcaagcaggctggtgttatcggagctatgggtggtgttatcggaagccttcaggctatggaagcaatcaagtatatacttggtgtaggggatttacttacaggtcatctccttacatatgatgctataacacaggaattccataagattaagttgccatctgatactgatggctgtgctgtatgtggaaagcatccaactatcacagaacttattgattatgagcaggtagtttgtgaagaccactgataattatatccaatcataaggacaataaggaggcgtcacaaagtgattacatttaataagagtgattttgatacaatacttgaatatgctaagaagaatcttccagaggaggcttgtggtcttattggaggaacaacagaaaatggggataagcacataaaaaagatatatcttcttactaatattgaccattccaatgagcatttttcaatggatcctaaggaacagttagcggcagttaaagatatgagagctaatggtttagttcctcttggcaactggcattcacatccagagtcaccatcaagaccatctgatgaggataagagacttgcatatgacagcaaagcaagttatatgatactttcacttatgaatatagatgaaccagtgcttaattcattccatattgaaggcaatgtatcaaataaagaagatctgagaataatatgataaagcattgagccgtgccgtaataaactattaaccattgctgtgcttgcacaaagcgatggttaatagtttattacgatagggcgaaagcccggcagttccataaagctttgctttatggaacgtgcacggcgaaaaaggcgttgtgcacggcgaaaagccggcgtgcacggcgaaaaaggcgttgtgcacggcgaaaagccggcgtgcatggcgaagaaggcattgtgcacggcgaagaagcgaataaatagtagttcagtgcgataggaatggagatttattatgagtaatctaacggatatttcagatgttattattataggaagtggtccggcaggactatctgctgctatatatgttgtcagggctggattatcagttactgttatagagaaagaatttatgggaacaggacagatagctgacagcagtaaagtagacaattatcttggtattccagcaataagcggttatgacctgggcgaaagtttcagggaacacgcactttcgcttggagtaacaatagaagataataatgttaccagacttacccctgttgatgacatatgggaattagagttatcagacggaagcactaagaaagcccaatgcgtaatatatgcggctggctgtagccataaaaagttacaggtagagaatgaagaacagtatacaggcaaaggaatatcatattgtgccgtatgtgacggagcattttataaggataaagatgtcgcagtagtaggtggcggtgacacagcactttctgatgcactttatctttcagatatatgtgccaacgtatatattatacacagaagggaagaattccgtggagcggcttcacttcttgcaaagttaaaggaacgtacgaatgtgcacatatgcactaacagaacagtaaagaaagtggaaggcagtaataatcttgagaggataatacttgataatgatacaggcattgacgttaatggattatttgttgccgttggaatgagcccacagacagagcttcttaagggtattgcagaacttgataattcaggatatgtaatagcaggtgaagattgtgttacatcagccagaggtttattcgtggcaggtgatgtcagaacgaaaatattaagacaagtaataacagccgcagcagatggtgctatggcagcaacacaggcagtacagtaccttagataaaaggtatgtactgcctgctggtatttatatatgtatagcctggctgtgtatatttatataatatgtatttattgtatacttattatgtgtttactataaatattactaaatatatttaacacaatatacatttattatatatctaatatattgctatagatattactgcgtatatttatacaatatgtatttattatatatatttattgtatctattatatctagttatttagtgcgttatagcttcatatatataatcaagaacctttatgttatctttttcgtgtaaaatatcgtggcgcatattattaaatatcattatatcttttatattaaatccctgtttggtcattaaatttacggtagttttaatattttttccatactcacttacagcatcatcactgccgctaagaatatatacaggtgccaagcttgctgtcttagcctttttagatacacagttaatcattcctgataatagttcatacataaggcttgctgtaatctgtgctggaatatgagggtcgttaagatatttatcacgttcttcttcattatagagaagccagtctgcacgcgatgtagcatttttaatcttattattgtacattccaaatgcaatgaactgtataagcggactgcaattctgtccgttagcctgcatacaggcgtggtcgatataacttcttattgctttgagaataaaacgtggctgagaaccagttccgataaggaaacatccgtcaatcttagtccttaagtgaggagataaaagcatatcccttacgatgaatgagcccatagagaaaccaacaatataataaggaagtttagggtagcgtttcttcatttcggtgtagcaggtatgaacgtctttaaccacatattcccagcttcctttcttgccaagatatgctttcctgctgccattctgtagtgagtggccgtgtcctataatgtcaataccgcatacaacgtatcctttgcttgtaaaatactgggcaactttgtcatatcttcccatatattctgttattccgtgtacaagctgtattacgccgattggtttgctttcagctttccatacagctgcctgtatagttgtcttattatccgatgatttaaaattaaacatatataacctcaattcttagccagtaggcctttggtactaaaaagcattatacgacaaaatatttaataaaactacataaaaattgctaattaaaacatataattatttattgaaaaagaataataaatgtgttatagtcagtatccgtctgaatggcttgatttgcttaataaaataaagaatatcgaggtatatatgggtaacgataatacaaaagcactaagcggtatggatatgactacaggttcgataccggttaaaatactaaagttcagtattccacttatgctggcacagattttggaagttctgtttaatatgtcagatgtggcagttgttggtaaattttcaagttacgaggcacttggagcagttggctctacatcattgcttgtaacattatttacaggatttcttataggtatgggatgtggtgtcaatgtaagagttgcacagcagcttggtgcaggtcagaaagaaaatgtacgaaagactattcatacatcatttcttctctgtcttattgtaggacttacagcactggttctttgtatattgggtgctgaattcttcctgtcacttatgaatactaaaacagagcttatagatggggcggtgctttattttagaatatacgcacttggtatgccggctatggctatatataactttggtaatgcggttatgagtgcgagcggagatactaagaagcctcttatatatcttacgtttgcaggcgttgtgaatgtatgccttaaccttatacttgttatagggataggtatggctgaggatggtgtcgcatttgctagtataacagcccagtacatatcagcaatacttgtagtggttaatctgttaagaagaagtgacacagacagatgccggttaagagtaagagaattaaagctttatccgggtgtgccaaaggtaatacttatgcttggaattccagcaggtatccagaatgctatatttgctatggctaatctatttatccagacaggtgttaattcattcagtgcggttatggtgtcaggaaatgccgccgccgctaatgcagatatgcttatatataatgttatgatggctttttatactgcgtgctcaagctttatgggacagaatatgggagcttgtaacaagaaacgaatgttaaaaagctaccttataagtatggcttatgctttcttagcggcggcgatacttggaggacttcttataatatttggaagacagttcctgtcattatttacaagtgagccagaagttatagatgcaggtatgcagaggattatgattatgggcttatcgtatgctgtatcctcatttatggattgtacgatagcggcatcaagaggacttggcaagactatagttccaacaatagtggttattataggttcgtgtgtgttcagagtagcatgggtgtatacaatatttgcacatttccacactataccatcattgttcctgttatatccctgctcctggataattacagctgccgcagagataacctatttcgtgcatatatttaagaaagtgacattttaa

SEQ ID NO: 409 - DNA, 7374 bp, unidentified
  source 1..7374: mol_type = unassigned DNA
caggcagggagtctgcaccttgaccatcatgtagccgtcttccagcatacgcttgaccgtgaggctgttgccatccttctggatgtcagcaacataggtcacctgaggcaggtgcagcttctcagcgatctgaggaccgacctgtgcggtatcaccgtcgattgcctgacggccgcagaacacgacgtcctcagggccgacaccgatcttattgacagcagcagcgaggatctggctggttgcgaaggtatcagaaccaccgaactcacggccagagaccagaacagccttatcagcgccgcgggccagcagctcacggagcataccctcggccggcgggggacccatggtgacgacaacgacttcgcagccggtctcgtccttcagcttcagagcggcctccagagcattcaggtcatcggggttggtgatggttgccatagaggcacggtccagagtaccatccgccttgacagccaccttaccggaggtatcaggaacctgctttacacaaacgattgctttcattgtaaatcttgcctcccttacttcagcagcgcgccggaaatgaccatcatctgcacttcgctggtgccctcgtagatctcagtgatcttggcatcacgcatcatgcgctcgatggggtagtcacgggtgtagccgtagccaccgaacagctgcaggcagcggcgagtcacgtcgcttgcggtgcgggctgcgatgagcttagcctgagcagcctcgacgctgtagcggacctttgcgccattcatagcttcctgcttcttcagagcggcagcgtagaccagatactttgcagcctcgatacgggccttcatctcggccagctcgaactgggtgttctggaaagcggagatgctgcggccgaactgcttacgctccttgacgtaagcgacggtctcctgcagagcgccctcggcgatgcccagagcctgggaagcgataccgatacggccgccgtccagagtagccatagccagctggaagcccttgccgcgcacgcccagcatacggtccttcgggatgcggcagtcctcaaagatcagctcgcaggtagaagaaccacggatgcccatcttatcctcagccttaccgacggagaagcccgggtcggtacgctccacgatgaaggcagagcacagcttggtgggacggcccttcttgtcgaggaccttatcggtaacagcgatgacgatgaacacgtcagcgtaacctgcgttggtgatgaagatcttggagccgttcagcacccagtaatcgccatcttccacagcagtggtctgctggccctgagcgtcagtaccagcgcccggctcggtcagaccgaaagcacccagccactcgccgctgcacagcttgggcaggtacttttccttctgctcgggagtgccgttctcataaataggtgctgcgcacaggctggtgtgtgcggaaacgataacaccagtggtgccgcagaccttgctcagctcctcaacagccatgacgtaggacaggacgtcgccgcctgcaccgccaacggaggtggggaagtaaatgcccatcatgcccagcttgcccatcttctcgacggtctccttggggaaatactcttcggcatcgactttctttgccagaggcttgacttcgttttcagcaaactcgcggtacatcttctgcaccatctgctgctgcttggacagagtaaaatccatcgctatatcctcctaacggatgtttttctttcagcacagggcagctacactcatgtcctgtgcaaacaaattcctcccggccgttttcttcgggacgaccgagagaaatttcaaactaatttacagctcgtcgacaggggtcttggtgcggtctgcgttgtaaacgtagaagcccttgccagacttgcagcccaggttgccgccgcggaccatcttacggatgagcgggcatgcacgatacttgctgtcgccggtctccttgtacaggacgtccataatggcgaggcagatgtccaggccgatgaagtcgcccagctccaggggtcccatcgggtggttggcacccagcttcatagcggtgtcgatgccggcgatgttggaaacgccctccatcttgatgaaagcagcctcgttgatcatcgggatcaggatgcggttgacgacgaagccggcagcctcgttgacctggaccggctgcttgccgatggcaacggagatctccttgatcttctcgacagtctcagcgggagtgttgcagccagcgatgacctcaatgagcttcatgcggtctgcggggttgaagaagtgcataccgaccagaggacggctgacacccttgccgatctcggtgatggacagagaagaggtgttggaagcgaagatgcactcgggcttgcagatcttatccagctcgccgaaagtggtctgcttgaccttcatatcctcgaaagcagcctcaacgacgaggtcgcagtcagcgcacaggtcttccttcaggcccggggtgatagcagcgacgatagcgtcagccttctcctgagtcatcttgcccttagcgaccagcttctcatagcccttcttgatctttgccagaccattctcggcccactcctgcttgatgtcacacagagcaaccgtgttgccctcgacctgagcaaatgcctttgcgatgccctggcccatagtgccagcaccgataacaccgatcttcatgggaaatctctcctttattatatcttctgaatgtagtgcctctccgcgcctcccctttccggggaggcgctgcagaggccttatggtttagttgttggtaaagacagccttgggcttcggcttttcacggctcaggaagcaggccatgccttccttctggtcatgagtctcgaagcagtcgccgaacagcttctcttcgacttcgacagccttctcgatggggaggctgatgccgtcgttgatcgccttcttgcagttgcgcacggcgatgggagcgttcttggcgatcttattggccagcttcaggacattctccatcagctcagcctgcggatacactacgttgaccaggccgatgcggtaggcctcgtcagccttgatgttcagtgcagagtataccagctgctttgccatgcccatgccaaccagacgtgccagacgctgggtgccgccgaagcccggggtgatgcccagaccgacttccggctgaccaaacacagcgttgtcggagcagatgcggatgtcgcagctcatagccagctcattgccgccgcccagtgcaaagccgttgacagctgcgatgacggggatggggaagctctcgatcatcaggaacacatcattgcccagtttgccgaaagcctcgccctcggccttggtcatggtgctcatggagccgatgtcagcacctgccacgaagctcttgtcgccttcgccggtcaggacgatgcagcggatggcggactggtcaactgcctcaaaagcagccttcaggtctgccaggacttcggggttcagggcgttcagtgccttcgggcggtcgatggtgatgatctcgactgcgccctgcacctcggtttttacaaatgccattgtgaaaacctccattcaggttatatcttattcaaaacagtccccggacaaggggcaagtctccggtctcgcccactgtccgggctgtatcaatatccggagtgacccttcaaagggaaattagtccatctcgacgatggttgcgcagcccatgccgccgccgatgcacagggtagccagacccttgtgagcaccacgatgcttcatagcgtacagcagggtgacgaggatacgagcaccggaagcgccgaccgggtggcccagagcgattgcgccgccgttgacgttcagcttgtccttatcgaagcccagagcctcgccgactgcgatggactgtgctgcgaatgcctcgttggcctcgaccaggtccatatcagcaacggtcatgccggtcttagccatgaccttcttggtagcagcgatggggccaaggcccatgacctcaggctcgacgcctgccagagcacctgcgacccaggtagccagaggcttcacgcccagctccttggccttctcttcgctcatgatgaccagagcagctgcgccatcgttgatagcggaggagtttgcagcggtgacgatgccgtccttggtgaaggcgggcttcagctttgccagcacttcgggagcgctcagacgggggccttcatcggtatcgaacacagtatcgcccttcttgcccttgatgacaacaggaacgatctcatccttgaaagcgccgtccttgatggccttatcagccttcagctggctgttgtaagcgaaatcatccagcatctcgcgggtgatggggctgtagccgtacttcttctgataggtctcgttggtgcagacgttctcagcggtcatgcccatgtgcttgttgaagccgcaggcatcccacagagcatcgttgaccatggtatccacgatctcgctcttgcccatgggagcgcccatgcggtagccgtagcggcccttcatcattgcgaagggagccatgtccatgttctccatgccgcctgcgaccacgatgtcagcatcgccggcctcgatcatctgagcagccatgttcacgcagttcagaccggagccgcagaccacgttgacggtgacagcaggagtctcgacgggcaggccagccttcagggaagcctgacgagcgacgttctggcccagaccagcctggatgacgcagcccatgtaaacatgatcgacctgctcgggtttcacgttagcacggttcagggcctccttgataacgatggagcccagctctgcagcagggacgtttgccagggtgccgccaaacttaccaatagcggtacggcaagcagatgcgataacaattttcttcatgttaatagcctcctgaatttatatgtttcggggtttcgtaaaactatttatcaaaaagcccgagggcctttctgcattataaaaggtatcagattgtctttccttccgcccggagctgctccactttggcgtggatggcattctctacgttgggcgtcacgaacttggagatgttgctgccgtagcgggcagcctccttgacgatggtggaagaaaggtagctccacttgatgctggtggcaaggaacatcgtctcgatgccgggcatcagtgcgtggttcgtctgggcgagctgtatctcgttttcgaaatccgtcaccgcccgcaggccccgcaccatcaccgaagcgtggcgcttcttggcgaactccacggtcaggccgtcgaagctctccaccgtcacattcgggatgtccttgcagcattcccgcagcagcgccacccgttcttctacggtgaacagagggttctttgcgctgttgatgagcactgccacaatgagctggtcgtttatctttgcagctcgcttgatgatgtcgagatgtcctctcgtgaccgggtcgaaggacccggggtaaactgctgttgccatcggtatggtctcctttatttgcgcgctttggaaaagcgcatttggtgttgccatgatagcacttttcagtttctgcttcaagtaccagaccgcatcgccattgcaatatcgttaatttttagtcaatcaacgccgcactggggcgcatcatcttggtacacccttagtaaaccatatcgtcaaaattttatcaagtactttttcgaaaaaaattgtttttgctataccaaacaatcgccacaaatacctaagaaatttagtcaaattgtcctgcgaggcattttttcgcggaagagggcttgattataatgtttgttaatgttataactaagctgtgcaggtgtgccgctgccggaaactcctgccctgccgaccccaaggataccgccggggtgtgataagacagtgtccggactggaaagaaacggtaaatttccggctaagattttgtcccgtagaattgtgaataataaatttacaattcttttatgttcttaaaggagaggatggtttataatggatttcatggaaatgtatgcccagaaaaagatgactgccgagcaggctgcttctctggtcaagagcggcgactgggtggattacggctggtgcgtcaacacccccgtggccgtggacgccgcccttgccaagcgcctgcccgaactggagaacgtcaatttccgcggcggcatcctgatgtgggtgcctgagatcttccagatcgacgaccccgctgcccacatgacctggaacagctggcacatgggcggcatcgagcgcaaagccatcgcacagggcttctcgttctactcccccatccgctattcggagctgccccgctactaccgcgagagtcccgacccgctggacatcgccgtcttccaggtgactccgatggacgagcacggctacttcaacttcggccccagcgcttcccatctgggtgccgtctgtgagaaggccaagaagatcatcgtggaggtcaacaccaatatgccccgctgcctcggcggtatggagaactgtgtccatatctcccaggtcaccggcatcgtggagggcgacaatccgcccatcggccagatggccgctgccggccccgcttccgaggtcgatctgaaggtcgcaaacctcgtggtgccgcagatccccaacggtgcctgcctgcagctgggcatcggcggtatgcccaacgccatcggcagcctcatcgcccagagcgatttgaaggacctgggcgtccacaccgagatgtatgttgacgcttttgtggacatcgccaaggccggcaagatcaccggcgcacacaagcagctggacaagggccgtcaggtctacgccttcggtgccggcacccagaagatgtacgactacctcaacaacaaccccgagtgtatgtctgctcccgtcgattacaccaacgacatccgcagcatctccgcactggacaacttcatctccatcaacaatgcggtggacatcgacctgttcggccaggtgaatgcggagagcgccggcgtcaagcacatttccggtgcaggcggccagctggacttcgtgctgggcgcatacctttccaagggtggcaagagtttcctctgcctgtcctctaccttctttaataagaagaccggtcagctcgagagccgcatccgtcccacgctggaaaacggcagcatcatcaccgatacccgcgccaatctgcattacctctgcaccgaatacggctgcgtcaacctcaagggtctgaccacctgggagaaggccgaagccctcatcaatgtggcacaccccgacttccgcgaggagcttatcaaagaggccgagaagatgcacatctggcgccgcagcaacaaaatctaa

SEQ ID NO: 410 - DNA, 16124 bp, unidentified
  source 1..16124: mol_type = unassigned DNA
  misc_difference 12933: note = a, c, g, or t
  misc_difference 12934: note = a, c, g, or t
  misc_difference 12935: note = a, c, g, or t
  misc_difference 12936: note = a, c, g, or t
  misc_difference 12937: note = a, c, g, or t
  misc_difference 12938: note = a, c, g, or t
  misc_difference 12939: note = a, c, g, or t
  misc_difference 12940: note = a, c, g, or t
  misc_difference 12941: note = a, c, g, or t
  misc_difference 12942: note = a, c, g, or t
  misc_difference 12943: note = a, c, g, or t
  misc_difference 12944: note = a, c, g, or t
  misc_difference 12945: note = a, c, g, or t
  misc_difference 12946: note = a, c, g, or t
  misc_difference 12947: note = a, c, g, or t
  misc_difference 12948: note = a, c, g, or t
  misc_difference 12949: note = a, c, g, or t
  misc_difference 12950: note = a, c, g, or t
  misc_difference 12951: note = a, c, g, or t
  misc_difference 12952: note = a, c, g, or t
  misc_difference 12953: note = a, c, g, or t
  misc_difference 12954: note = a, c, g, or t
  misc_difference 12955: note = a, c, g, or t
  misc_difference 12956: note = a, c, g, or t
  misc_difference 12957: note = a, c, g, or t
  misc_difference 12958: note = a, c, g, or t
  misc_difference 12959: note = a, c, g, or t
  misc_difference 12960: note = a, c, g, or t
  misc_difference 12961: note = a, c, g, or t
  misc_difference 12962: note = a, c, g, or t
  misc_difference 12963: note = a, c, g, or t
  misc_difference 12964: note = a, c, g, or t
  misc_difference 12965: note = a, c, g, or t
  misc_difference 12966: note = a, c, g, or t
  misc_difference 12967: note = a, c, g, or t
  misc_difference 12968: note = a, c, g, or t
  misc_difference 12969: note = a, c, g, or t
  misc_difference 12970: note = a, c, g, or t
  misc_difference 12971: note = a, c, g, or t
  misc_difference 12972: note = a, c, g, or t
  misc_difference 12973: note = a, c, g, or t
  misc_difference 12974: note = a, c, g, or t
  misc_difference 12975: note = a, c, g, or t
  misc_difference 12976: note = a, c, g, or t
  misc_difference 12977: note = a, c, g, or t
  misc_difference 12978: note = a, c, g, or t
  misc_difference 12979: note = a, c, g, or t
  misc_difference 12980: note = a, c, g, or t
  misc_difference 12981: note = a, c, g, or t
  misc_difference 12982: note = a, c, g, or t
  misc_difference 12983: note = a, c, g, or t
  misc_difference 12984: note = a, c, g, or t
  misc_difference 12985: note = a, c, g, or t
  misc_difference 12986: note = a, c, g, or t
  misc_difference 12987: note = a, c, g, or t
  misc_difference 12988: note = a, c, g, or t
  misc_difference 12989: note = a, c, g, or t
  misc_difference 12990: note = a, c, g, or t
  misc_difference 12991: note = a, c, g, or t
  misc_difference 12992: note = a, c, g, or t
  misc_difference 12993: note = a, c, g, or t
  misc_difference 12994: note = a, c, g, or t
  misc_difference 12995: note = a, c, g, or t
  misc_difference 12996: note = a, c, g, or t
  misc_difference 12997: note = a, c, g, or t
  misc_difference 12998: note = a, c, g, or t
  misc_difference 12999: note = a, c, g, or t
  misc_difference 13000: note = a, c, g, or t
  misc_difference 13001: note = a, c, g, or t
  misc_difference 13002: note = a, c, g, or t
  misc_difference 13003: note = a, c, g, or t
  misc_difference 13004: note = a, c, g, or t
  misc_difference 13005: note = a, c, g, or t
  misc_difference 13006: note = a, c, g, or t
  misc_difference 13007: note = a, c, g, or t
  misc_difference 13008: note = a, c, g, or t
  misc_difference 13009: note = a, c, g, or t
  misc_difference 13010: note = a, c, g, or t
  misc_difference 13011: note = a, c, g, or t
  misc_difference 13012: note = a, c, g, or t
  misc_difference 13013: note = a, c, g, or t
  misc_difference 13014: note = a, c, g, or t
  misc_difference 13015: note = a, c, g, or t
  misc_difference 13016: note = a, c, g, or t
  misc_difference 13017: note = a, c, g, or t
  misc_difference 13018: note = a, c, g, or t
  misc_difference 13019: note = a, c, g, or t
  misc_difference 13020: note = a, c, g, or t
  misc_difference 13021: note = a, c, g, or t
  misc_difference 13022: note = a, c, g, or t
  misc_difference 13023: note = a, c, g, or t
  misc_difference 13024: note = a, c, g, or t
  misc_difference 13025: note = a, c, g, or t
  misc_difference 13026: note = a, c, g, or t
  misc_difference 13027: note = a, c, g, or t
  misc_difference 13028: note = a, c, g, or t
  misc_difference 13029: note = a, c, g, or t
  misc_difference 13030: note = a, c, g, or t
  misc_difference 13031: note = a, c, g, or t
  misc_difference 13032: note = a, c, g, or t
ttgaaacattttaatgcagtaactaaatacatagcgttggcactcattgtctgcctgactttcatatccgttacatcacctgtatattcacttgctgataccaagacagaatatgatgataataacaaagaacttgaacgcttaagaaatgagcagtcgcagctctcaagtgaacttaacgaccttaattcagagcttgataatgctggtgaaaagctgaactctattaatgacagaattgctgatacacaggaacagattgacagccttaatgaagacataagcaatatggagattgagaaacaacaccagttcgatactatgaagcttcgtatacaatatatgtacgagaacagcgactatagttttcttgatgtattgctttcttcttcaagtatggctgatttattgcaaagaaacgaatatgtttctcgcatttcccaatatgaccgcaaaatgcttgaagaattaagttctcttattgctgtgcttaaccagaaccagctaagtctacagactaatatgacagaacttgtgtctttaaaagagcagtcaatagctgagtctaataatattaaaaggcttatagcttcaaagcagtcaaaaatagatactaactctgaaaatattgccaaagctgaagcccttgcattagaatacgaggaacgtatccgtcaggaagaaatccaaagacagcttgaagaaatcaaaaaaatgaccccatcagttgatgaagtcattaataatacacctatagcatatgatacaagcgaccttgcaatggtatccgctatgatagaatgtgaagctgccaaccagccttatgagggcaagcttgccgttggaagcgttatcgtaaatcgtgtaaacagtcctaaatttggcaacacaatccaatccgtactctacgccccttcccagttcagccctgtcgcaagtggacgtttcgcaattgtccttgccagaggtgctaacgctgaatgtaccagagccgctaatgaagttctcaatggtcatataacaatcgctgccctgtactttcacgtctacgacagcactgtcgataaaggcggcacaataataggcgaccatgtcttctattagctaaccatctcctgccaaaaaggcaccactgtaagggtcaggctgcattaaatcaacataagcttgtctttgctgcttatgttgatttaatctaattgtctgtcctatctagcctatccactcaccaaacttattaagcccttccgaactacctgaaagatacaatatatccccatttctaaacacatactctggatttacaacctgcataacttccccattattctcaattgcaattatattaacattaaatttcttacgcatattaatatccacaactgttttcccctcaagcctgtcaggaagcataaccttagatatattaattttctcactaagctgaatgacatctataacctgcgaagctataagacggttagcaagtctttctgccatatccttctcaggatatacaacttctgccccaagcttagccaatatttctccgtgttcaagacctcttgctttcgctataaccttttttattcccatactgacaagattaagcgttgtaagaattgacgtatcaatatgttcacctatacacacaactgcaacatcacaattctgtattcctgttgcgctaaggcttttcttgtcaagtgtctgcacgacataggcattttccgtataatcgcgcatttctcttaccttttcctcatctttgtctataaccataaattcagcaccgctgttagcaagcgataatgcaagcgactcgccaaatcttcctaaacctataattccataagtagtatttttatttgatattctagttttaaacataattacctccgaattcacatattattgttgggtgtgtattgatgattgggtgttggctaacggacgttgtgagtgcggactatattaccgctgggcacgctttcgctacttgaaaccgcagcggacaccaagccagcacatcaatactctctccacatacattcacacaccatattttatatatatatcataatacacaaacaataacatatatcatatcttttatataataagttataagccctaacatatatattatatcttctatataattaaattaaaaaccataacatatatatcgtatcttatataccataacttaatgccataacaaaaacgacaccatcaccaaaaaatccacactcaaaaccacacccgaattcttcacactccgttctggcgctgataattgttaaacatatggcaatcgcaacccagctgggcggctggtagaagcataagaagacgatggggagccgccggcacttaagcgctgtcctttagcgctttagtaccgctgcgagcgacactcagtgcaaacgtgtcttcgttgcttctaccagccgcccagcgtccgttgccccatatatttcacaatcatcaccctatagttatattaccctccggataattaatcctctctcccttagagaaatgccacaatgtagcaatcgtaagcggtccaagtcttcctatgtacataataacaatagataacagctttcctgcaattcctatctgttgtgtaattcctgttgaaagccctgccgttccaaatgcacttgcgacctcaaataatatatcaataaaatcaatatccggctcaaatattcccataagataagctcccacggtcacaacacacatagcaagtatcataataaccgaagcctttctgaacgcttccttaggtactgcataatgaaatgctttctccgacttattagttgctgccgacttaacaccctgtatgaggacaaaaaatgtgcttgtctttattccacctcctgtagatcccggcgaagctcctataatcataagtattataatcacaagtagtcccgattttgaaaatgtcccaagtgaatatgttgcaaatccagccgttctggctgatacactcataaagaatgctcccatccacgagatattttctgtaatcttaagaagcagagcaccagcgataataagcacaatactcactgatattacaatccttgtgtgcattgagaatttcttccacttaaatctcttttcccacaattcacatattacaaaaaagccaatacctccaaaaaatacaagcgtacaggttataatattaagtgctatattaccactgtaattaataaggttctggttatttccaagaatatcaaaaccagaattattaaacgccgctaccgaatgaaacacgcttattcccaatgccctaaaaaatggataatctcttataaacaccagaaaacctgctattgcaccagccccctcaaatataagcgtaacaataaatatcttatgtataagccttacaagcccctttgccgtatccatattcagtgcttcctttaaaagagtacgtccttttatatctacctttttacccataacaagtattattccggcacccatagttgtcacaccaagaccacctatctgaataagtgcccctagtataaattgccccacaggtgtaaatgtgtcatatgagtcaaccaccacaagccccgttacacatactgcactcgttgatgtatacaaagcatccgtgtattttaaatcaacaccatccctaacactaaacggcaaagacaaaagcactgaccctgctataatcacaaatataaacccaaacgctattattcttgcaggcgactgctttcttattaaattaaccatcatagtacttccttaaatcgcaatatttatactcaaatctcataaaatttatcatttaagatactatataccaccctgctctccaatgcaagcaaaatcctcataaatattctaatgtcagcttccaaaccttcccacaaaaaagtgtgcactccgccactacagcaaaatacacactcttcataactatttaattaaacatctccaacaactaaaataactcctgccatacatcctatgtcccagccatatgtggagccgccggcacttaagtgctgtactttagcactttagtaccgctgatagcgacactcagcgaaagcatatctttgttacttatgttaatttaatccaatctcccgttgtctatacatctatatctgatataatcaaccgtcacaaatccatccccctgattctcattcttaatctcattattatgattaacaaacattccattcttaacgccaacccagcgtcctgcctttgctgtaaagctcacctgcttctcataagcctttccatcaaagcttatctccaaagtcacctcttctacaggaacatttttaacagccagtgccatttccttggtatccttagttcctgttctcttaactgtataccttaaatatacagtcttttccttatcagcaaatgtatccttagctataggatagtccttaaaatcttccttagaatatgccgcctcacaatcaaagctctgggtgcctctgactgtccttattgcatattccccgaaattcttgacaattccaactgctccatattccacgcctaatgacacaattccggcatagtctccattttcaagaccattcacgcacattttagtaacacactcaaattcaggtgcaggccacttctgtaagagaagatttctgtaatcgctcactggtctaagaggtgttgatgcaagtgcattaagtcttatatatgagccgtctggtgttttctttccataggcatctgtcttagtcacataccagctgtcatcataattagaattccactgccactgtaacatcatcttgtcggtatcaaattcatctgttgtgtctggctcacatactggatatttatctgtgtccttaaactcctctgctgtctttccaatattgggctttacatattgcataactggttcaccgtaatcattgccctctttattaacaccaattattggccagtcattttcccaatgcattggctgtaaatgtgttattctgcctgcggcatacacatcttgaaaatgtaagaaccagtcctcaccagtaattgtatctacccacgcaccctgatgaggtccgttgactggagagtcaccctgtcttaatacaaccttatattcatatggtccaaatggatttttggaacggagtattgtctgccagccggtcttaacaccgcctgctggtgcaaatatataataatatccgttacgtttatacattttaggtccttctattgttatctgatcattctcattaccatcaaatatctttacttcatctccaaatatccccataccgtctggtctcattcttactatatgaagaacactcttatatccaattctgctctttgcaacacctgccacaagataagcattaccgtcatcatcccagaatggacaagggtcaatccagcctgcacctggtcttatattaacaggctcgctccattcaccaaacggatctttggttgttgtcatatatattccctcatctggcattggaaaacatacataatatgtaccctcgtggtatcttatagatggtgcccacacaccacatccgtgcagcggattgttatatctgaattccggaatgtgtttcaagcaataattaacaaccttccaattcactaaatcttttgaatgtaatattggaagtgctggcgaattagaaaagcttgatgctaccataaaataatcttctcccactcttatagcatcagggtcagaataatctgcataaagtatcggattcctataatttccattgcccaaatcagctaaccacataaacattacctccataatcatacataatatttcttaagttaatctaagtttacatcattacaagtaatttgccaacactttcataaagtaattttataaaagtgtttttacataagtattttttattataggtgcctatatttgcactgcagtacgaacctgtatataggactttttatgtataatgaattaaattaattagatttccctattacataaaaagcctgccagtatcacatcttacaatatatcacataattgtgatacaatcataaaacccgatacaagcaggcttacatattattctatttattgaaatctttttctattttcttaagtgtttcaagtggaatataataacttattccaagtggattaaatattgctcctgaagctccaagctcgtctatagcctcaacaagttccttatatgtatagagcatattctcatactgtcccttatagcatttgtccatctcaaaaccatctgtaaatgccggtattgctataacctgctcatcttccttatgctcaagcctgtctgtaacatcaataaaatgatgtgctatagatacttcttcctctgtctcctccttaacacatggaaccatatattcagaattaaccatagcatttaacatagcattttctctcttatcaagaagctcttttattgtatctttgtctgtattctttctgaactcctgaaaataagaaatcattgtattctgtaaacctgggttagtcacataatcatccctaaagaactcatcatatgttccaaatgcttctcttggtattacatattcaagcttgtcgccatctgtaagtcttatattcttatatccattacgatacatatggcataactccatagcaaacgcatcattattctcaacaccaactgatacctcgtaaccactgagcttaagctttttctcaataagtgaagaattcttaggattaaaaagaacaaataaatcactgtctaccatatatgggtacgatgttgtacttgaatatacaacccataaatgttcctcttttcttaatttatcagctataacctttgcatatatctcttcaattcttccaaaatatgctaaatcgttagtattgcccatctccttggctcttttctttaaagatggcagtacaacagccataacctctactgcatcagctaaagaaagcttctccatcatatctacgccgtagtcttcatctttgctgatatgtcttattacgtcctgtatttttgtctgattcataatatatataccctttccgaattgcatcatatgtataatagtaacatatttgtgtacaattatcaattcaactttatttaatgattcaactcacaaaatctttactctgttttatttaattcagctgccctgatataactgcacgaattatgtaatataccgcatctgcaaattgcactgccacattacagcttcacaactgccattaattaaagaactcctgccagtcagttatattcttatctgtaagacataacattgccattattcttgcctgccagcttgtcattgtctgtgctgtgatgacatttaaaccatcagccgcatagtcatattcactgccagaattattaacaacaattaccttaatataacctgatacatcttttacaagctgtgtcattgctggcgacagacttccgtcagcagtatcgctgactactactacagactcatatgaagccattattttctgtgctgtatacacatcattgcctatataatcattaaccataccgacatagcccatatccttaatccctgtcacgtcaaaatgatgttttgcactatcattaaccttattcgctttattatcaacaatatcagctatttctgtcttataattgttattatcttcctcaacaacatatatactcttatctgtatctattgtataagtaagaaaatatctaatctggtctgcaaatcttttcctcgccgatacgataactatatccgcatcaccactacatatttcctggactttagaagccaatgatattaaatcctttgtttcatcaaaatctttattttcctgaattaattcaatatctattttattctcataatctgctgtattaacaagctcactcacacttccatatgtcccaacaatacaagcctttctcttaccactggtctggttattaccattactattgtcgctgccattaacaatacttccggcatcagagctgttatctttcataccgcccgcattatttccactattatctgttatcttatcagtgttatcgctaaccgtaccattctcattatctgcctggctcatatattcaaccgggttagacacaaagccacagcctgcaagtgaagttacaccaagcataacagctgccgctattgacactgcattttttaacttcaatttattctttagattaataagcgtatcacttatattcaataatctcatatattctcctttttgccctgattatcaaatatattattcaggacatattaagcattttaacataatccccctgattataaaagtcccccaaaagcttttaaggcacattcgccttacttagcttctggaggactataatattaattataaaatgtattatataaacattatatcactctgcataattatgccgtctatattaatgcaattaacctctgttatcaattgtagcaatatctactattgaaagttcctgattattaaatgcatgctcaagacttgagataagtgcgtgagctgtatcaagacttgtaaggcagtgaacgcctgtctcgatagcatatcttcttataaggaaaccatcctttgctctctcaataccattttctggtgtatcaataacaagatcaatcttatgctctaatataaggtcaaggagtgttggagcttcctgtccaatcttattaacctgaatagcgtgtacgccattttctttaagaaccttagctgtacctcttgaagcatatatcttgtatccaagtgcttcaaatctctgtgctatatcaataccgtcctgcttatccttatctgcaagagtcataataatctgcttatgctttggaagtcttattccagctccctcaaatgccttgtaaagtgcttcatcaaagctcttagatataccaaggcactcacctgtagacttcatttctggtccaaggcttatatcagcacctctgatcttctcgaacgagaatactggcatcttgattgcatagtaatcagcagccttctgaagacctggctcataacctaaatctcttatcttagctcctgtaataaccttagttgcaagcttaacaataggaataccagtaaccttgctgatatatggtactgtacggcttgaacgtggatttacttcaattacatatacctgatcgttgtatacaataaactggatattaatcataccctttacatgaagtgctctcgcaagtcttcctgtgtaatcagcaatcatttcagttatctttggagagattgacttagctggatatactgaaatactatctccagaatgaataccagctctttcaatgtgttccataataccaggaataagaatatcttcgccatcgcatacggcatccacttcaatttccttacccataaggtacttatctacaaggattgggtgatcctgcttaattctgttgataattcccataaattccactacatcttcatcagatacagcaatctgcataccttgtccaccaagtacatatgaaggacgtacaagaacaggataaccaagttcattagcagctttaagggcttcctcaacagtgaatactgtctgtccttttgctctaggaatctgtgtcttttcaagaatctcatcaaataactctctatcctcagcagcatctacatcttctgccttagttccaagaattggcacacccatcttcataagagcttctgtaagcttgatagctgtctgtccaccaaactgaactacagctccatccggcttctcgaattctacaatactttcaacatcttcttctgtaagtggctcaaagtaaagcttatcagcaatatcaaagtctgttgatactgtttctgggttattattgataataattgtctcataaccctctttcttaaatgcccatgtacaatgtactgaacagaaatcgaattcaataccctgtccaattcttattggacctgaaccaagtacaagaactttcttcttatccttagtctctgcagcttcattctcactgccatatactgaatagtaatacggagttgtggctgcgaactcagcggcacaagtatcaaccatcttaaatgctgcgtgaatatcatacttatcacgaagttcttttatttctctttctgtatgtcctgtaagttctccaataacattatcagggaactcaattctcttagcctctcttaataattcttctgtaagaggacctttctttaaagaattctccatctcaacgataatctgaagcttatctataaaccatctgtcaatctttgttatgtcatgcataactgctggctctatgcctcttcttaagccttctgctatcttccagattcttctgtcatcaactacagcaagatcttctaaaagttcctcatctgtaagtcctgtaaaatcgtatgacataaggctgtcaacatgctgttcaagtgaacgtatagccttcataagaccaccctcgaagttatcagatatactcataacctcaccagtagccttcatctgtgttgtaagtgttctctttgcagagataaacttatcaaatggaagtctaggtatcttaactacacagtagtcaagtgctggctcaaagcttgcatatgtctttcctgtaactgcattcttaatctcatcaagtgtataaccaagtgcaatcttagctgcaaccttggcaatcggataacctgtagccttagaagcaagtgctgaagaacggcttacacgagggttaacctcgataacgcaatactcaaagctgtctggatgaagtgcatactgtacattacatccacctgtgataccaagctcatctataatgttaagggcagatgttctaagcatctgatattccttatctgaaagtgtctgtgaaggagcaactacgatactatcacccgtatgtacaccaacaggatcgatattctccatattacatatagttatgcatgttccgttgctgtcacgcattacctcatattcgatttccttccagccagatatacatctttcaacaagaacttcaccaactcttgaaagtcttaaaccattctcaagaatctctcttaattcttctacgttatgggcgataccaccgccgcttccaccaagtgtgtaagcaggacgaagaacaaccggataaccaatcttagctgcaaatgcttcaccagatggaacatcattaacaactaatgaaggtgcacaaggttcacctatcttttccatagtttccttgaacataagtctgtcttctgccttcttaattgtaagtgcagttgtacctataagctgtacattattctcttcaaggaaacctgtctctgctatctccatagcaaggttaagaccagcctgtccaccaagtgtaggtaagatgctgtctggcttttcctttaatataatctgctttaatgcttctacagtaagaggttcaatatatacttcatcagcaatatccttatctgtcatgatagtcgctgggttagagttaacgaggcatacttctattccctcttccttaagagaacggcaagcctgtgtacctgcatagtcaaattctgctgcctgtccgattacgattggacctgaaccgattactaaaaccttctttatattaggattctttggcattgtcttagtcctccttcttcatcatatccataaatctgtcaaaaagatacgctgtatcctgtggtcctgcacaagcttccggatggaactgtacagtaaatatattcttacccttataagatagaccttcattagtcttatcattaacattttcaaatgctggttctgcaacctctggattaagtgttgcttcatctacaacataaccatgattctgtgttgatatatatacctttccagtagcaagatccttaactgggtggttagcacctctgtgtccatactttaatctgtgtgtatcagcacctgtcgcaagagacataagctgatgtccaagacatatggcaaatataggcacattgcttgcataaagcttctttatctcttctattatctctacacattccttaggatctccaggaccatttgataacataataccatctggattagaagctaagatttcctctgccttagtatacgctggatatactgtaacctcacagcctctgtcattaagagacttagcaatattcttcttagcaccaaagtccataagtgcaactcttggtccatctccgttaagtacatacttttccttgcatgtaacctttcttacaactcccgcaaccttgtattccttaatcttaggaagtacttcatcaagattatagttttcgttagttgtaatcattccgttcatagtacccttttctcttaatatcttagtaagggctcttgtatctattccacagatacctggtatatcattatctaaaaggaacttctgtataggagcttcatttctgaagttacttggcatccttgataattctctcacaataaatccatctggccatgctttttcagactccatatctttatagcatatgccatagttgccaatcagaggatatgtcattgtaactgcctgtcctgcatatgaaggatcagttaacacctccagatatcctgtcatcgaagtattaaaaactatttcgctaatgacttcgcgagtggaaccaatacttgttcccttaaatactgttccatcttcaagtattaaaaatgctttcatgaatgccacctattccctttcgtatattaaattgattatagtgcgcaaaccacaactgttaatagtctttatatagtttcaattgacttttgcgcaaaaaaaaagacacaaaannnnnnnnnnnnnnnnnnnnnnnnnnnnnnnnnnnnnnnnnnnnnnnnnnnnnnnnnnnnnnnnnnnnnnnnnnnnnnnnnnnnnnnnnnnnnnnnnnnnttaatagtctttatatagtttcaattgacttttgcgcaaaaaaaaagacacaaaaatgtctttttttcttaaactctataaatattatcatataatgaataataattcaagcaaaaagtcaattatgcttattattattctgcgtaatctcaagctgccttacgaacacccatgtatcacctttatcagatgactgatacttagccgccgtctttccatcattataagttccatcagaaccctgtgtaagatatacagttataatacctttatcatcaactgtaggaactaacgcttccttgtatacatcattccattttaactcatcatctgctaccgtgcttgaagccgttgatgacttagctgtactgtcaagctcctgttctggaagtgtcactttagaaaatgtcttgccgccatctttagtcatataaagattgccgtccattccttctgcataattgtagcagaaaaatccaacattttcgtccacatacataacaccttttaatatataattagcaggaccgcttccaactgttgtccacgtctcgccaccattagctgtctggtatatcctgtaagactccttttcattatcagtcctggcataaccacatacaataacacccttattctcatcaaagaaatcaacatagtaatcttctgcgttatatatattatcaagttcacagctggtccagttaacacctttatcatcagaatatataagagttaccggtactttcttagaacttcccatcctgccgccaaataaaaatgcagtctttgatgtagttataagataacttccatccttcaacgtgcttgtacttccgctttcatacataagattttcaacatctactggaacagttgcataatgctcaccatcatcataagttacactcaatatatcatctcttataacatatcttgcaagcaggtctgtagaagcattggtcttgttctcgctatctgctgccagggctgccttctcattgtactgtgctattccgtattcttccggacttaatgctgatgtaacatacaccgtagcagtgttgtcagtatgtgcatcaatatagtaagatacaacccactcacatttcaatctgtcatcatcagtaactccgtcccacgaaagaaaataatcagaagcagcatttttaagaattaccgaaaaacttattaacgctgtatgttcatcttcattcaatacattaatatcatctattgtcatcctcttaactgacttattatacggaagatactcattcatatactgattaacatactcattaagccacgtcctggccactgtttctgtcttaacctgtgatacatcaggcatcgtatttatgacattagaatcatcatatgtagctgcccttgtctgatactgctcatcaataacatccccgtaagcatctatatccaccgtgaaagtataccttgacttaatatcaagattactttccttgcttctgtaataatacgaacgtatgaatacagctataacaaaagcacaaagaatccctatacatacccttaatgtaatcaatcttaacttttctctgttctttttcttcatattcgttctccatcatcctaatcagctctcgtgttttaaatgcatagcctctctgacaatctttctgtaatacttataccaccataagaaatacattgcaccagctcctgcaaggaaaaataccagcaccacaaaaggatgtactgcatagagccagttatgggaaagtcgtctcacaaaaaatggcacaccatacgcaagtaaaacacataccgccataacagttccattaaacacacttctattctcatatacccatataaaatgatcaaaagacataatcgcaaacatctcgcctataggtcttacgcatattgtaagcatacagagcataagcgaatgaaaccacgaaacgccgaatatattaagaataataaaataaaatatgaattcagcagccatcttataaagaagctttcctaaaaaattcatatatggacttattgacataactcttatcataaggtaatccctgtcacctatagtaaataatatgttgttagaaagacttccgcatataaccgaaagcataacaaacatatatataattgtaagctcctgattggccttaatcaatggacactcaagacctataagcacatatggtatatatataagaataaatacatatgcaaacttctttataaattcccataaaaccataaataactgtgccataattccaacaaataatctcgccttggaattctctgcaaatgtattctctttaacacatctgcctataagtggtgcattacttatatatcttatacctgcattagtaccctcataaaaccttaaaatcttctcagcaaacagcttcctaaataatctcattgtctgtctcccctaatatatctaaaactgccttccttatctctggaatttccatagtctttttatctatgtgattaaattctccgttatttaagactagcgtatcctcacttatcctcttggaaatctctagaagtcctgttgagataagtattatcctgccttcttttattgtattaataacttcgttaaacttattaatgtattcttcactgcaataatcaagtggctcatcaaaaagcacaacataaggtcttattacaagaatacaggcaagctgtaaaagcttcttctcctcaaatgtataatccgctataagctcatctctcttggcaacactgaacccaattctatcaaatatatcctctggctcagggtcgtctctctccatatcacaaagcatacttataaactcataacctgttatgtatacaggaagaacactctgctttgccgcataaaaatatttacacttatcaattgtaactatgcttccgtcatcaacagatatatctccacatatacactcaaataatgttgttcttccagctcccggtccaccaagtataggatatatctgtccctcctcaaatgtaaaggatatatctgtaagaacttcattcttcttatagctcttttttatatggcttaatttaagcat

SEQ ID NO: 411 - DNA, 11357 bp, unidentified
  source 1..11357: mol_type = unassigned DNA
tcatttcaaaacaaccgtaaagcagctgccgctgccggggcggctgtccacagtgacagcgccgccgtgcagggcggctattttttgtgccatggcaaggcctaagccgttgccctgcgtccggtggctggtgtccccctgatagaactgctcaaagatatggcggcaggtctcggcatccataccgcagccctggtcagtgacagccacaaccgggctgccctgctcgctgtgcagtgttacgcttatgattccgctctccgggctgaatttggcggcgttgtccagcagattcagccagatctcctttaccagcgcttcgctgccgtggtaggtgcagggggccagctcggcctcaaactgcagcggcttatcgcgccacttttgccgggtcacaaggatgcactggcgcagctgctcatccagcgaaaaatctgtgcagtcggtcagaatggtctgtgcctcgatacgattcaagagcagcacactgccggaaagctgtgccagccgcttgctctcatcgcggatgatttgcagatactcgtgctgctcctcaggtgtgacatcctcgtccagcagcaggtcggcaaagccgctgatgctgacgatgggagtcttgaactcatgggaaaagttatttacaaaatccttgcgcagcagctcagtgccggaaagctcctccgccgctttgttgaaggctgctttgaactcccggatctcggtggactcatacccgtgggcagcaggctgcaggcgcacggtgaagtcccctgccgccagccggttcatcgcctgtatgatgtttttgatgggctttattaacacaaggcgaatcgaaaccacaaggctgacggccatcaaaatacagctggcatacaaaataaccagcgcaccgccgatgctgacgctgccgtcttggataaaaaagccgtggtcagccttcaataccaccagcaccgtcgcaacggtcagattcagtgtaacgatgaaaaacaggttcagcaccagcagcatcgtcaaatttacggtgcgcatgcagtcgcgcagcttatttacaaattgcgccatatcacaccttctttatagcacggtaaccgatgccgcgaatggtctgtatctcaaactccggccagtcgtaaaagcgggtgcgcagccgattgatgtgaacatttaccgttttatcgtcactttcgctgtccataccccagatctcatccagcagctccagccgggtaaaggtcctttccgggtaagccagcagcttgtacaggaggttgaactccttgggcggcagcacctgcgcatcgtggccgcgccgcacggtgtgggtgtcgtagtccagctcgacatcccctatcgtgatcctgtgttcatccacgatgcgggcgcggcgcagcagcgccttgatgcgcagcacaagctcctgccggtccggcggttttgtcatataatcatcggtaccaacgataaagcccgtgtgcttgtcctgcggcatatccttggccgtcagcattaaaatgggcagcatgctgccgctttcccggatggttctggtcagggtaaagccatccatccggggcatcatcacatcgcagagcagcaggtctatatggttgtggtcgagcatttccagtgcctgcacaccatcggcagcgatcagcggctcatagcccgctcgctttacgatggcgcaaagcagacgcgccgtgctggggtcatcctcggcaatcaaaatacgaaacatccgtgtatcctccttggttctattatagtacagcataaagataaacggaagataaaccttcccgtttaccaaaggtttattttggcggtgtatccttgggagcgttgaaacaaaaaacaccctacgggaaaacggaggatacagctatgaaaaccatctatcttgtcaccggtgctgccggatttatgggcacaaatgtctgcgcacagcttttggagcgcggcaatgccgtgcgcgcctttgtgctgaagggcgaccccgctgtaaaatttatgccgaaggccgtcgaaatttttgagggtgacctctgcagtgccgaggactgcgagaaattctttgccgtggagccggacacccagactgtctgcatccactgcgcgagtatggtgacgatcaacccgaattatagtgaaaagctgatcgccgtcaatgtgggcggcaccgaaaatatgctggatgccgccaaaaatcaccctgagtgcaaaaaattcgtctatgtttccagcaccggcgccatccctgagctgcctaagggcgagagcatccacgaggtatacagctttgttccctacgatgacgatcgcgtagtcggctggtacagccgcagcaaggcgatggcaacccagaaggttctggacgccgccgctgacgggctgaatgcctgcgtggtgcatcccagcggtattcttggccctaacgaccccgccatcgggcagacgacccgcacgctgatccagatcctgaacggtgagatgcccattggtatgcagggaacattcaatcttgtcgatgtgcgcgacctggctgccggcacgatcgccgccgctgaccgcggacgcaagggagagtgctacatcctctccaatgatgaggtttcgctgaaggagctgtgtgagatgctcaaagctgaaaccggctgccgtggctgcctgttttacctgccgttgtcgcttgcccattttgccgccaaacagatggaagcccgcgcggccaagaccggcaagcccgctgtgctgacggagtttgccgtttacaatctggagcgcaacaaccactttgactgctccaaggcaaaaaatgagcttggctttgccccgcgtccctacaaggaaacactgcatgatctcgcagtatggctcaagcaggagggaaaaatcgcatgaagaagctgtatgattctatctgcaagcttatgcaaatgaatgaccagcagtgggagtgctatctccacgcactggattccctgcactgacacagagaaaaggggttgcctattatgaaaaaggtttgcgttatcacaggcggcggcagcggtatggggctttccacagcaaagcttgtctgcgaagaagggtattacacgattttggtggggcgcacggcgtcaaagctggaaaaggcagtcaacgatctgcgccgtgcgggtggggaggctgaggcgttcagttgtgatgtttccaaccgtgaaagctgttttgcgctggccaaacacgccgccgaatgcggcgaggtaaaagcggttttgcatattgcgggccttagcccccacatgggcgatgctgaaaagattttgcgcggcaatgcgctgggcacggtgaatatcaacgatgccttttatgaggtcatggcaccgggcggctgtgtgatcgacacctccagcatgagcgcctaccttgccccgcagtttgtcatgcccaagggtgcgtacaggctggcgcgcaccgaccgtgaaaaattcatcaaaaagctggtggcgcgggcaagcattgccccgaaggacgcccgccccggtcttgcctacgccatcagcaagcattttgtgatttggtttgccaagaccgatgccgcacgctttggcgagaaaaatgtgcgttgcctgagcgtgacgcccggcaattttgacacgccgatgggtgcgctggaaagcgggcaggcggatgtattcaaaaaatactctgcccttaaacgcaacggcaagccggaggaaatcgccgccttgtttgctcttcttctggatgagcggcttggctttctgaccggagcagacattcttatggacggcggcgttgtggcaagcggcgccagcggattgagcaaataaaaaaggcagcaaagtaaaccccgattttagcttttggggtctgctttgctgccttttgcattttgaaatttcgtttggcggtactttagtgcagctcgctttcgcagcggtccagcacggcggcaataacctgatccatgtcgtaatacttgtactcacccagacggccgccgaagatgaccttcggctcggcgtcggccagcttcttgtactcggcatacagtgcgccgtttttggcatcgttgacggggtaatacggctcgtcaccgggcttccactcggaggaatactcgcggctgatgatcgttttgggcaggtcgttgccgttctcgtccttgccaaactcgaaccatttatgctcaatgatgcgcgtccacggcgtctcgcggtcggtgtagttgacggcggcgttgccctggaagctgggcttgtcgagcagctcattctcaaaccggacggagcgatactccagcgtgccgagcttgtagtcaaagtaggcatcaatggggccggtgtagacgaccttgtcagccaatgtgtccagcgcggctttattttcgaggtaatcggtgttcagtcgcacctcgatgccgtccagaaggttggcgatcatcttcgtatagccgccgatgggaatgccctgatacaaggcgttaaagtagttgttgtcaaacgtcaggcgcacgggcaggcgcttgatgataaaagcaggcaggtccttgcagtcgcgtccccactgcttctcggtgtagcccttgatgagcttttcataaatgtcacggcccacaagggagatggcctgctcctcaaggttctgcggctcgtgggtgatctcacggcgctgctcctcgatcttggcggctgcctcctccggtgtgacgacgccccacattttattaaaggtatacatgttgaagggcagcgaatacagctcacccttatagttggcaacgggagagttcgtaaagcggttaaactcggcaaagcgggtgatgtagctccagacctttttgttgttggtgtggaagatgtgcgcaccatacttatggacattgataccctcgatgttctcggtataaatgttgcccgcaatgttggggcgcttatccacgaccagcacggatttgccgtgggttttggcttcatgggcgaagatggcaccgtacagaccggagccgactaccagataatcatatttcatacaacaggtgttcccctttttaaaagttacatggatattgtgcggtaatggcattgagagccttactccactgtcaaaaagcggctgaaaggcggttcagtctctgccgaacagatcccttgtgtagaccttgtcctgcacatcgtcaaggcatgcatcgtagcggttggccagaatcgcctgactctgccgcttgaatttgtcgagatcgttgaccaccaccgagccgaagaaggtcttgccattctccagcgtaggctcatagataatgacctgtgcgcccttggccttgatgcgcttcatgacgccctgaattgagctttggcggaagttgtcgctgttgctcttcatcgtcaggcggtagacgccgatcgtgacgggcttttcacggctttcgtcaaactcgttttcctgatcgtagccgtagtacccggccagcttcagcacgcggtcggcgatgaagtccttgcgcgtgcggttggactctacaatggcctcgatgagattctccggtacatcagcgtaatttgccagcagctgcttggtgtccttgggcaggcagtagccgccgtagccgaagctggggttgttgtaatggctgccgatgcgcgggtcaaggcatacgccgtcaatgatctgcttcgtgttcagacccttgctctccgcgtaggtatccagctcgttaaagtaggcaacacgcagcgccagataggtgttggcgaacagcttgacagcctcggcctcggtaaaacccatgtagagggtatcaatgttctccttgatagccccctcctgcagcagcgccgcaaactcgtgagcggctgcaacaaggtgcgcatcttcggggtcggtgccgacgatgatgcgggatgggtagaggttgtcatacagggccttggactcccgcagaaattccgggctgaacaggatgttcctgctgccgaacttttcccgcaccgacaccgtgtagccgaccggaatcgtggatttaatgaccatgacggcgtttgggttgacctccatgacaaggcggatgaccgtctccaccgcagaggtgtcaaagtgctgggtctggctgtcgtagttggtaggtgcagcgatgacaacaaagtctgcatcggcgtaggccgcctttgcgtccagcgtggcggtcagatccagctccttctcggccagatacttttcaatgtaatcatcctgaatcggtgatttgtgcgcgttgatcaatgcgaccttttccggcaggatatccaccgccgtcacatgatggtgctgggaaagcagcgtggcgatcgaaagccccacatagccggtcccggccaccgcgatcttatattttttcatagcagttatactccgcagttgcgaattttccgtaaggcagcggccaaaattgcgccgtgccgccttaccgtatgtgggttcattataccatgtcatcagccacaattcaagatagcaccgggagtgacggtactatgtgcagaatctgtcagcgtaggcagaccaggaatactgcaggcagtaggctgtgtagctgccgtcgggcagtttgatccggcaggcggcgggggcgccagccagaaggtcctgccccacctgcagccgggcggggtcaggctgggtcagaatgatggtatgcagtgccgggcagtcggcaaaaaggccgtccggcagggcggtgacggcggactgtatcgtgacctcctccagcgcagtgcagccgcggaaggtcccggcgcagagccttgtgactgccctgccgtttatctcggcggggacggtcaggctgcggcgggcgcggcctgccgtattcacggtcacagaaccatcctccgccattgtgaagtatgcggcgtccgcgctgctgccgctgcctgcggcggtgtttgcggccggctccggcatggcgggcagggctatttctgttgcggtggtgtcccccagcattgccttgatgtcacggataagctgccttgtgaacaccgtgcgccccgctgcgttgagatgaaaattcgtatcatagaaccaaccggactccatcacgcaggcgcgggggtccccggccagcggtgcggtaataacctgctgaagatgcgcggcataggcatcgagctgatcttcatttgccacggcaagcgcgttcatgggcggaaaatggtaatagaccgtagccccggcatcggccgcccgggcggtatagtcattgagtgcggcgcagaacgcggcctcgggcagtgcggtgtcaaaccgtattggcatcgtggggtcatagccctcgggcatgatgttggccttgcagagcgggctggccagatcaccggcggcgttgaagctgtcgcgccggtagacgccgtccgtatccggtgcgccggtcaaaaaatagcggagcttggcggcggcaaaccgtggaaacgacccgagcatcggcccaaagtcgcgggcatgcaggcagcccagcgccgaaaaatcaccgtcaacagcctgccagagggcggtaactcccaccgtgtccgacagagcctgttgctgctgctccggcatgacgatgacaatatcccccgcccgcaattcatttatggacaaatcgagcatcacccgggtgccgagcgcagcgtacaggccaaaatttacagggtggtagtccggcagctctttggcaagcagggcgctgtccaccccgaaggctgcagcgctgccgcccacaaggatcagccggggcttattgctctcggctgccagcagggcgcgcttggcgggcagctcccccaaaaaggtgctgctgtactgtgcaggcagggcaaagccccacaccgccagaagcagcggtacggcgataaaagtacccagcatagatgcgatgattttcttcataagcgttacggaatatcgttcagaattggaaatagataaaggcgttggctgtccccgcgtgcagcgcggcaaaccatgcggcagcaacagccagcgtaagcaggcaaaacgccagaacaccgcgcggtgtggggacatcgaatggcttttcaggcataaggcgcagacagagcgcccccagcaccagctgggcggctggctgcagaccgagtgtgagcaccgccgtgcgcacagaggccgcatcccacccgcagggcagacgggagaacagggtcagcgcatcggataccgaggcggcccggaagaacacccagacgaagcagaccgctacaagggtcagcaggcggcgggcaggtgcggcgcgaccctgactatcagcggggaaaagccgcttctcggcgagcagcagcagaccgtggacaccgccccagaccacaaaatgcagcgaagcaccgtgccacagaccgctcaaaagaaagaccgtcagcgtgttcagcgcacagcgcacagcgccgcaccgcgaaccgcccagcggaatgtagagataatcggtaaaccagcgggtcaggctgatatgccaccggtgccagaaatcgcgcagcgatacagcctgataaggatggtcaaaattttggctcagccgcacacccagcagggcggcagcccccaccgcaatatccgaatagccggaaaaatcccagtagatctgcccggcaaacaatacggtggccaatatggcagcggggccggacgctgcgccgggggctgcgtagacggtgtctataaagaccgctgccgtgtcggccagcagcagctttttgcaaaagccgcgcaggatatacagccatcccccgctgtccgtctggcgggcagggtcgcggagctgcggcaaaagatcggtgctgcgctcaatgggcccggccacaagctggggaaaaaagctgacaaacagcgcgtagtaaccaagatgccgctccggtgccagtcggccgcggtatacatctatgacatagccgagcgtctgaaaggtgtagaaggagatgcccgcaggcagcaaaagcgaggcccccgtgccgaaaagaccggcgtatttgaaaacgccgaggcagcccagacagagtattgccgcacagcagagccaaagctttctgccgacccggtttttacagcggccgatggccagcgctgcggcgtaggtgcccagcgtaatgcacgccagcagcggcagggccttcggactgccgagcgcgtaaaacccaaggctggccgcaagcagcagtacccagcgtgcgcagggcggcaaaaggcggtgcagcagtaccgccagcggcagacccagcacaaaggcgggtgcagtaaaattcatcgactgccccctttcggccaaagcgccgccgtgcagggaatgagcaggcagagcagcagcgtttgggtcggaatactgcataccagtgcggtcagcaccagcaccccaccggcggccattcctgctgtgcaagcccagccaaagcggcgggccagcaaggccagcgctgtacacagcaccgttataagcagcaaagccgtcatggcgtcagtccctccttctgcagtgcgtcctttaaggcagtgatgacctgcgccgtgcgcagcgcaacaccgttggtggaaagatgattgtcagtcccatagaaataccgccccggcagcagagagtcctgcagaggtgtcaggatcgctgcgttgaggttctctctgaaataggcgtccagtgcggcgatggcctccggggtggaggcttcggagactgcctgactgttgcgggggctgtaggtcaggtagacccgcacaccgtttgctgtgaagcgcgcaatttcagcgttggcggggtcaatataatacgcctgcggaaaggcatccaccgtgtaatcgaccggcagaccatagatcggcgtatcctcgttggcatccgggcggtagagaatatagtcaccgtaggcattgtagcttggtgtgtccacaggattgccgtcctcgtccagctcggcggacgatacggcgtaggagcgcgccgccataccggcgcgggtctgcagatacgatccgagcgccgaaaaaacgccgctgtactggcgtaaatcgagcggggcaagcagatcgtagttttcctcgaccatgcagaagaagtcatcgtcgaatgcgttcgtcgtgcagaattggcgcttggcggcgtcaaactcgggtgagagcagcaaaagatctccctcctgcagctgcgagcgtatcaattccagctggggcagtgcgttggtataggcaaaaacccccatgttgaccaccgcatagctgggcagggcttgatccagtgccgcgctgtcgtagccgaaccgcgccgaggagccggagaacagcacgagcttgcgcgttttggcaagcaacagaagccggtcgtacttgtcggaaaaggtggcgtagtagctgccgctgtagacgggggcggtcgcggcgttgatgtgcagggtgcgcagcgccgtgcagccttcaaaggcatagtcgctgacggtctgcagattgtcaaagagggtcagcgattccacagcgcagccggtaaaggcccccggctcgatgcggcgcagcgtgtcaggcaggatgatctccctgcaggcggcgtttgtaaaagcgccggcggcgatctcaaccaccggcgcgccacccagcgtatcgggaaggacaaggcgctccccgctcccctgccagcccgtgacggtggcggtgccgttgtttacggtaaaggtgaattcggcggcatcgttctgggcagcccactgggcatagagccggctgccgggcgcggtccggctgcccagcccaacggcctgcccgctgccgtccggggcggtattccatccggtcagggtgtggccggggttgttgaacagctcaccttggatcgcggtattcacacgcagatggcttgcggtaacaggagcctcgatccagtcaccgcccggattgtcccggtagtagagtacggtatcgcttttttctgccgtgacggcaacagcggtcgagtagcggacctccggcaggctgagggtatagccggtgccggtgcgcatcagacgggcgccgggatagtctgcgcccgtcagcgtatagccgtcggccggggtcagggtgaaggtcacactctgccccggggtaacggctgcggtctgggtctttgccgtaaacgcgggcgaagattccaaaacgatgcggcactgcaccgcaggggctgccggggcggcggcacagcctgccagcagaaccagcatggcaaggataagcatcaggcggcgcaagtgagcacatcctttcagaaaaaatctgttttctacggcaataccgcataattctaagtgccgatacggcgagcgaggtgcggcagctgctaagccaaaagcgcagataatact

SEQ ID NO: 412 - DNA, 7375 bp, unidentified
  source 1..7375: mol_type = unassigned DNA
ttatttctcgtcgttcttccggatttccacacggcgtatcttaccgctgatggtcttgggaagttcgtcaacgaactctatgacacgggggtatttgtaaggagcggtcactttctttacgtggttctgcaactccttgaccagttcctcgccggcgcggttcttatagtctttggacagtacgatggtggctttcaccacttgtccccgtatttcatcgggaactccggtgatggcacattctataactgcgggatgcgtcatcagggcgctttccacttcgaacgggccgatgcggtaaccgctgctcttgataacgtcgtcggcgcggcctacaaaccagaggtagccgtcctcgtccttccaggcaacgtcgccggtgtaatagatgttgtcgtgccatgcttcgcgggtgcggttggcgtcgcggtaatattccttgaacagaccgagcggcttgcctttgtcggtacggattacaatctgtccttgttcaccggcctctaccgaacggccgtcatggtctatcaggtctacgtcgtattggggattgggcaatcccatgctgcccggcttgggttgcatccacggcatggtggctacggtaagggtggtttcggtctgtccgaaaccttccatgaggctgatgcctgtcagtttcttgaatgtatcgaatacggcggggttcaacgcttctccggcaatggtgcaatactgcaatgaagagaggtcgtacttcgtcaggtcttcgtgaatcaggaaccggaagatggtaggcggtgcacaaagcgaggtgacgtgatagtcctgtatctttgtcagaatatcggcaggagtgaatttctcgtggtcgtatacaaagatgttggctccggctatccattgtccgtacagtttgccccatacggctttaccccagcccgtatcggcaatggtgaggtgcaggctgttttcgtgcaggttgtgccagaaacttccggtaacgatgtgccccaacggatacgtgaagtcgtgcgccaccattttgggttcgccggtagtgccgctggtgaagtacatcaaagaaatatcgtcgttgctgttgggatgctccggtcgtgcgaaaggggcggcatcggcaatgcctttgtggaagtcctcaaaaccttcggctatctccgggcctacgctgaccagcttcttcacactcggagagtcgggcatggcagccgtgatgtggtcggtaatgacgctttcgccggcacagacaatcatcttgatgtctgcggcattgcagcggtatacaatatctttcttggtaagcaggtgtgtggcggggataacgacggctcccagcttatgcagtgcgatgatgctgaaccagaactcatagcggcgtttcagaatgagcattaccatatcgccgtggccgatgccgaggctctggaaataggaagccgtcatgtccgtatagcgtttcatgtcggcaaatgagaactggatgtgctcgcccttgtcattggtccagagcagtgcgggcttgtcgggatgttcggccgcccaggcatccactacgtcataaccgaaattgaaattctccggtacgttaatctttaaattcttgatgaagtcctcttgagatgtaaaggacgtttgcgataaaaatctttctaccataacttttggaatttcttcattcaccgttcttcatttatgtgttgttacatgattacagcaaggaaacgtactttctttccgtccagcgctttcatgccgtgaggcagtttggagttgaaatacaaactgtctccttcgtttaaaatcaagtctttgccgtcgatgctcagcatcatgcggccttccagtacaaggttgaattcctgtccggagtgactgttgtagtgtatcggctcgttatccggcttgggttcgacggtgacgatgaacgggtcggcgttgcggttcatgaagccggcagccagtgactggtatttataggcttttgtacgctcgatgctggttcccttgccggcacgggtaaggaagtagctgctcatcttcggctcttcaccgaacatcagggcatccagtgcgatgccgtaacggcgggctatcttttgcagcatgcttacggagatgtcgaattctcccgtttcggcaagacggtactcttctgccgggatgtcgcaatcgcgggcgatgtcttcggcattcaattccaatacgtcgcgcagtccgcgcaggcgttcggctatttgtttaatctgttcgtccatgtggtttttattaagtggattagtacggttatttacttgctttgatggcattgataatggcggaagagaatccttgatgttccagttcgttgatacccttgattgtaattccgccgggagtgcataccttgtcaatctctatggcgggatgcgtgtcgttgttcagaatcagttcggcggcgccttttaccgactgggctatcatgcgcatgccgtccttggggtaaacgcccagttctattccggcctgcatggctgcctggatatacttcagtacataagcgatgccgcaggaagtcatggcggtggttgccgctatcttatcttcgggaatcagcatggcaagtcccatttggttgaagatgtcgagcaaaagctgttcctgttccttgctggcgttacggcttgcaatgagcgtcatgctttccatctcgctgatggcggtgttggggatgaggcggaacatggtcatctccttgtctgccacgtagtgtgccagttcttcgaaagggatgccggcagctacggagataagtatctgcttgcttttcagcttgagttcgcttaccaccggttttatcagccacggtttgacggcgagtatgatgagctcggcgccggtaacggcttcctgattgtcgcgtgtggtttgcaaagtggggagctcagcctttaacgcatccagtttgccttgcgtgggattagaaacaatgatgtcgctggcggggatgatggttccttttgccagaccgcgggcgatggagccgcccatatttcctgcaccgataattgctgttttcatatcatcttgtcatttaaaaagttgtcttcgggcaaaggtaaagattttaatgaaaaaacgaccgaaacaggaaggtattcttctttcggtcgtatcttttgccggctgattatccgtaaattgtcaaagtgctttcttaaaacgttccaggaagaggttcgcttcgtccatgccgagacacaggggcggcaacaggcggagtacgttcgtgccgctgacaccggtaaacacatgctgttctttcagtaacctcaaacgcagttctttgacaggctcttcaaattcgaggccaatcatcagtccgcgtccgcgcacttccttgatttgcgggaatttcttcagctcttccatcaggtatgcgcctacttgggcggcattctctacaagagcttcctgctctatgacatccagtacggcaagcgcagcgctgcaagccagatgatttccgccgaaagtggttccgagctggccgtaaacaggagtaaacatcggactgataagtacgcccgccatcgggaatccgttgcctatgcctttggccacggtgatgatgtcggccttgataccgttgtactgatgggcgaagaacttgccgctacgtccgtaaccgctttggatttcgtccagaatcagtaccgtattgtgctctgtacaggccttgcgcaaggcttgcataaactcgtcggtgggcaactgtatgccgcctactccctgaatgccttcgatgattacagcgcatacatcgcctttcgccagttcggctttcattgcctctgtatcattcagcgggagataggtaacgtgtccgcagttgttgatgggagcaatgattttgggattgtcggttgcctctaccgccaatgaagtacgtccgtggaaagctttcgagaaggataccacgcgagttcgtccgttatggaacgaagcgagcttcaacgcgttttcgttggcttcggctccgctgttgataaggaaaagggaataatcattgtatccgcagacctttcccaaccgttctgccagttgctgttgcagttcgttgataacggagttagaatagaatccaagcgtggctacttgcttgccgagcatctctacatagtgcggatgtgcatgtccgatagagattactgcatgaccgccatagaggtcgaggtactccgtacctttatcgtcccatacatggcagccttttcctttgacaatattgatgtcaaaaaggggatatacatcgaatagtttcattctttcagtaactgattacaaattaaagatactttagaaagcactgggtttcagtctcaaaccgacagtctcttccagattgaacatcaggttcatgttgtgtacggcctgtccgctggctcctttcagcaggttgtctatgcaggagatgataaggagcttgtcgccatgcttttccaaatggataaggcatttgttggtgttgacaacctgcttcaaatcgatgttcttgccgacgatatgcgtgaaggagtctttggcataatactcttcatacatgcggacaatctcttccaacgccactttggtctttatcacgatagtggtaaaaatgccgcggggaaaatcaccacgataggggatgaaatcgatgtccgaatcgaaactgttctggagctgtttgagcgattgcttgatttcgggcacgtgctggtgctcgaaagccttgtacacactcaggttgttgttgcgccagctgaagtggctcgtagctcccggcttgacgcccgcaccggtgctgccggtgatggcattcaccataatatcaccgttcagcatcagatgcttggcaagcggaagcaggcccaactggatgcaggtggcgaagcagccggggttggcaacatgctttgccgtgcaggtggcacggcggttcagctcgggaaggccgtagatgaagtcatggtcgtcgctcttgatgcgatagtccatggagaggtcgattatcttcaggtcttccggtacgttgtggctttccatgaattttctggtgtcgccatgcgccgtgcagaagaaaagcacatcgatttcgtccaacggaagttcgtcggtaaacgttaaatccgtctctccgtacaacccttcgtgtacgtcggttattttgttgccggcattgctcgagctgtttacgaatacgatttccgcttcgggatggttcagtaacaggcgtatcagttcgcctgccgtgtatccggctccgccgatgattcctactttaatcatgttgataatatctattgggttcttctggtattataactaatagtatgatatatataagcgtacctgcaaacgcagtgaagatcgtagcaaaaacgtagatgatgcgtaccagtgacacgtcgagtccgaaaaagtttgccagtcctgcacatacgccggaaagcattcttccgtttcgggggcgcgttaatttttgcttccggttcatcatttagatttcttcgtctttgtggtttgagtaataggcacgcagtgcggtagaagtcaccttgatgaagcctttggcgtcttccgcagtccagcctttctgcatttcaccgtattcgccgaatttattctttacaaggtcgtcgtcgctttccacgcctacggtagagaaacagagcggatgaagttcgagaatcgcagtaccgtttacattgcgttgcgaagactccagcatggcttcgatgtcgcgcattaccggttccagatactggctttcgtgcaggaacataccgtaccagttggctacctggtctttccagtattgctgccatttgcttaatgtgtatttctcaaggaacttgtgtgcgccgataatcagcatgggagcggctgcttcgaaacctacgcggcccttgataccgataatcgtgtcgcctacgtgcatatcgcggccgatgccgtaagccgcaccgatttcctctaccttctggatagccttgatggggtcgtcgaatttttcatcgttgaccgctttaagctcacccttctcgaaggtcaggcgcaactgttcgctgccttctttggtgcaatgtttcagataggcgctttcgggaagtccctgtgcggagtccagaatctcaccgccgcaaatggaagtaccccacagacctacgttataggaatatttcagtttggcgaagtcggctgcaaagccgtgtttgttcagataatctatctcttcctggcggctcaaagccatgtcgcgtgtcagcgtgatgatttccacgcccggagccatgacaaggaaagtcatgtcgaaacgaatctggtcgttacccgcaccggtcgaaccatgtgcaatggcatctgcgccgatttcgttggcgtagcgtgcaatggccagcgcctggaatatacgttcggagcttacggaaataggataagtaccgttacgcaatacgttgccgaataccatgtatttcaagctcttttcgtaatattcctgcgttacgtccaaagtaatatattttacagcacccagtttgtaggcgttctcttcgtttgtcttcagctgttcggggctgaaaccgccggtattggcacaagccgcatatacctcgtatcctttctctttggccagatacataactgtgaatgaggtgtccagaccaccgctgaatgcaactactacttttttcttcttttccataatacttatgaattttgaatgttgaattataaattgggaatcaggcttgtaaacgagtctgtgtgttcccattcataattcaaaatctataattaattatattttatcttcctcgtgtaacttcgggtcgtaaagcattgccgtgcaaatgcagaacttccggtttttggctaccagtatgtcatggttgatacagccctcgcagcctttccagaaagcctcgtcgtctgtcagttcattgaaagtaaccggtacgtagcccagttcggtattcattttcataacggccgctccgctggtcagactgaatatcttggctttgggccaccgcaggcgtgccaggcggaaagaagccgtcttgatacgttttgccagtcccaagccgcggtaatcgggatgtacgatgaggcccgatgttgccacgtactgcttgtttccccagctttctatgtaggtgaaacctgcaaattcgtctccacataaagctatgatagcttttccttctttcattttagtcgccacatattcgtgtgtgcgttctgcgatgcccgttccgcgcaccttggcagcttctcggatggtatccaaaatcttatccacgtaaacttcatgtgaggcgtcggccaccatcacatcaatctgtttcgaatccat

SEQ ID NO: 413 - DNA, 5860 bp, unidentified
  source 1..5860: mol_type = unassigned DNA
ctagataaggtttaataattcctcattattccatctttcagcatattcactgcttaagtctgccgtgatacattcgtgcttattttcccctttttgtaaaccgataactctgatgtcaggaacagttttagcatactttcttattgtgagttccaataaaattcctaagcttatcgatttcatatcaggcggataaaacggttccgcactttgagcgtcatttaaacaggaaaaaataacatctattgcctgttcccacgtaataaaaaaccgggtagcttcaggatctgtcaatataagttccttcctattttctaatgcatacttccattttaccaaaacagaccctgtagaatgcaatacatttccataacgaactatcctataagcgcaattcgatccgtttatttgctcaaaatccccaaaaagattctccataagcaatttagtagccccatacgttcctgaaacttgaacagctttatcagtgcttgttgccagaataaattttatgttctgctcctcaacagttattttaagaagattcaacgtaccaagaatattagtctgaacagctttcagaggatgttcttttgccaaaatgacatctttaaacgcagccaaatgaaatatcccatcacaaccattcaatgcctttttcaataaaagataatcttcaatggggcatggaaagatttgaacgcttttaaatttctctctcagagcaatcagttttccttcattcctggctatcgcatgaatagtatgtccttgggtaatcaaccgttctatcaatttctcagccaaataaccggtagcccccgttactgcaatggttcccatactcaagctattttttatcattcatcaacacatccctcgcaacataaggctgtggagaaaactcaatagtcaacacattcgactctcctaaagctgttaatgtatggacgcaccccggtaaagtccgtaccaaatcccccttttcccaaatttcttctattacagcctcactatcatcatatttctgaaaagtggcatgcatacgcccctgtaaaataagcatatattccacctttctaaaatgataatgattgcctctaagaacctttggaacgaattgcaagaatcctatatatttagcggcttccaccgctggaattgaagcactcaaagtagtatcctcgccaattacaaaaccagttcccgcctccagcaagctataatttttcatatcccctacggattccacttttatcaaatccctgacagttatttcatcaaacattttttttgattgctcacgcacgtcaattttacataatccggcacgatattttaataaaaacaacttatgatgaggagcaaggttctccaatctcaaacactcatccatatccagcaagacaaaagattcaccttccaaaatacggatatccgctgcatcgtccatcaaataagtatgatgaatatattcccatctatcatagtctgctctatactcagaccccaaataggttatagaactaaaatgcaccttttgggatttcttgtgttcaaattcttccttcagttctctgataatgccatctagaggggtttcctcctcctcaaggtagccagaaacaagagaataatatccggagtactctatatccgggttctcatctcttttttgcaacaatactctattatctgttgtagtaataatcacagtagtcgaatccatcatctttttcattttcattattttttaaattttcattctgttgtattttcaccacacccacgtgatgaataatattttccttattcagcatatcagtataaatagcatggtttaacaccataataagcaaccaaataagagacaatatggcaaaaaaaggttgggtgtatgatttcagccataactcccaagactttttctctcttttcaaattagaaggaatctttgtgaaaagtttcacatactcatccggaaaagccttttccgcttcacataacatattcttccagtgctcatgataactccataatctctgcattacgtaaatagaccatattgaaaatgacaatccgccaaatgcaataataaatgtcagatattcagaagtttgacatatagagttaaacaagacggtttccaatccgaataaagaaacatttattccgaacataatattaaaacggctccagataccagctccttcatactgtaattgaccaagaaggtgagtataatgttccattaatttagtgttctgcaaggcatccctatcatttaccgcttttttattatctacatccgcataaaagtttataccgcatcgaactaatttcgtcattatatcaagaatatatttttataataaaaaaggagaggatattcttctgtaatcagattcatatcccctcctcgcttgaagttatcaagaagaaagcatatcaaatttaaactatactttctatcttagcccgaatgtttactgtacttttcttgttacagttaccttgaatgtcttggttacaacaccccagtcgtgagtataagtgatgatgaattgaacatcatgctcataaacagtacctgtaggttcgccattccaagtaaggataccgttagcatagctgtattcagccttgtctgcttcagagatatcaactttaacacctgtagattcagagtccttctgatacaatgtagctgcaataggttctgctttagcaagatcattggctccatcatatacaaccaacttattaccaacagcatctttcaaagtcaaatctatccatttcttcttgtcagcagcaactttcaagccattaatcaaatcaaagagattaatttgttcaccagttgctaatgcaggattgttatacttcaagtcaacaacatcagagaatgccaagatcggtgtttgcacagtccattcttctgtatcgaagagtacacgtttagaatcagtatcacctgctgtaatatcgtaaatatcaactttcagtttgccaaccttagccaaatctacacgtggagtaaatacaatctggttagtagtagcccacttgatatcaccactcttcatcatttcctgaacataagcgttctggttctttgaagccatatcaaatttcactatagcatcttcaggaacaacatcatacatttcgtcaaatacctgagattgcataatgaagtctgtgtaatttgctccactcttaacccattcacccatgataatgcggttcttatactgatccttaatcggacaatcgaatgtataagttacagagaagtcgttgattgtaaccttgaacagtttattctcatacttgttgtaaacaccgtaaggagtgttgataccatcggtcatcaccatatcatagtcactgttccaatcatagttattatatgaatagattgaccccatcaacaaattagccttcttgatttgtttctgaccagcacctggtgtcaaaattaagaataaagaatctttatctgcattatttccaccattcttatagtagagaacagcttcatttacaatggcattatcttcaaaatatttagcaacttcagttacatcttgatttcgtacattccagaaggaattgaaacattgactagacttgttagtataacctaccaacttgttggctgtgtcatattcaggtatatacaattgaacaaaagtagaatacaccgtattgttatatgaaacaacatcacgtccttcgatagcattttcaaagtcacgaacatccaaagtgataacttgagattttgcactattgtaagtaaatgtgaagttgtctgtagcgttcaacggtttcaaagcaacagttgagaagttaggattaacagcaggacgaactgctttgataaatactacattctttatctcataatctttaattccttcttcttgagccttaacagtagtagttacttcaatagctgcatattcatcaatagcagaagcttggttagttgatttcacagacaagacattatctttcagttcaaagataccttgatgagtcttaatagtttgacccttaaaagtgtattcttcattctgatccaacagtctgaaagccttttcataaacaatacctgtttcttttacccaaaccttagcactttgaatataaacatcaatagaatcatttacattgtaagtaccttgatagttgaatttaccaaaatcatatctatcataagcattccatccttcagtaataatcttcggataattgttacctgttacggtagtggaagtgaatgcgttcttgatattatcagtagtaacatttgttcttcctactgtaaagtaatcagaagcagaagtgtattgaccatacatagttacatctaaagaagttgcaactactgttccttcacttattccttcattaggtatcatggcaagtttcaatactccgtttgctaaagtagccgaaccatccatatataccaaagccggttctacactacgactcaatttgtatgtatcaacgaacgagaatttagcattgtccaatgagaaatcacccggataaaccttgaaagaagcataagcagggacagctgcaaacaattcattatctgtattatacacattataagcataacaaacatcataggcatcattaacagcctgttttctgtaaactacagtctgcaaccctttgaatgcagaaccttcctgcagcaaagtatagttctgtccgtcgatagtcacgattacagtcttgctttcagcatctacagcaatgttaggaaattcattgttctgcttcaaatcagtaactttgtcaccgatcttgatgtattccacaccatccactgtcacccaagacacgtttgaaccggcagcttcaccatcctgacctctggccggaactttgttaccttcggtatctttcacatccacccaagtagcacctttatctgtgctgacctgccagtaattgccttccacacggaattcagggataacagtagtaccggctgccccatctgttccattcgtaccattcttgatagtaattttggaaccgtcagtgaaaaccagttcatatccaccggtaacctcattacatgactgaacgaatttacctgccttaattgccgagtcaagacttgcaatggtttccttgacttcgctcaattccttgtcgatgcggtcaatgtcatcatcatagtccttacaagacacaaatgttcctgtcgaggtcaccattaaggctccgaacaggattgcacttaaaaactttttgttcataatagaaaaactttaaatttataaatttaaaaaactaaaattggttatacatatttggttcattataaatagcttagctaatttactgcctgcgaatgatgcctccttctttcttgagtctgatatgacaaaggtgataccccgacaatacggctgaaagcagagtagaaagcacttttcgaagcaaagccacaactgcaaggcagctcagtcagcgcacaacgtcgggaacagagaagttctttggcatattccacacgatacgtgttcacaagttccttcaaattacaaccgaagtatttgttcaccacattgctcagataggtctggtttgtttcaagcagtgcactcagtttcttcagagaaagcgaggtgtcaagaaatacctgacgtatctcaagctggtacaatatacctttatatatattacaatccaccttgcgaatgtctgtttcctttccggcaaactcctctttccattgccgctcggcagccttgaaaagcaaagtcttctgtcgctcggaagtagcggtcgtgcgtttacgtctcagaaatagatattccat

SEQ ID NO: 414 - DNA, 9257 bp, unidentified
  source 1..9257: mol_type = unassigned DNA
ttatttattaaacaatctactcagaatagctttttctatataattaatgcgtagtaagtctaacattgagcacacaataaatatagcaatacatgatactaccatatggacaacaagaaaatcggaatgatagaaattactaccgcagataattttattccaaagccaatcattaatcaaagagttatcatgaattagatagatagcaaaggttgttgctgctatagtattaatatatttgttataagaaatagacatccttttaaagtaaacaaataatcctaatgctgcaaacagtacaaaaatattagcaccgctagatgggaaagaaataatatttgcttttacggtatagtaagtgtcatttaaaccaagatagtcaaaaataataacagaactccagataattgataatcctaaaattcctatatatagtaaatttttttctattctatcattggtatatagtcttaaataggcaccgataaaatataaacagctaaacatgaataacgagttaccataaccgcctaatgcaacatttttaattgtcggtactacgaagaatacgattaatagagatgaaattatcaacaaaagctttttcttttctaatctataaatcagcttatttaatagtggaaaaataaggtataaatgtagatatgctctagcaaaccagctaataggtgttattggtattaaagatttttgaattaaatcaggtcttaatgattcgattccaaataaacttatagaaaaaattaagacactcaagctccaaaaataagttgttgataaaaacttgcttagttttagccaactaaacttttgtgtaactaaaaaataaccactgatgatgacaaatatatctacagcaatttttccaccgcaggaaagtaactgcataacaattttattagcacttaaaaaactgtcttctgggaaatttccatgacaataataatgcgatagaattaccattaacatactaataatacgtagcaattcaatattactaaaacgtaattttaaattttctttctttctttctttctctgtgtacaaataatttcatctcccgtttagatatttagtgacatataataaattattatatcacatgattattgaaatattatatcacgggaaataatatagtaacaactgagttattaatttattagttattgaccttaattaaagttggttatgccaaaattagatacgtaaatagtattgtgtgtttataacctcctattaatattgttgatagacttttttgagagtttgtcttattgaaaaatgagaatacgtttctttggcatttttattatgtagcaatattatttataaaaatgttagcaaaaacatagattgttttaaataaatattataaaatatgatgtgaataagaatatagatgaagacaataatacagtaataaagtatttaggtaaaaagtataataccaaacatagttatttcactacatattatcttttagtgtactttttcttttggggattatgctgtttgaaatttaagaaaactatttaaaaaccgaggaaggatgttgatgcataagtgagtaacagttttttttactaggtaagatacgaacttttttaaagtagtggggataattttaaatcaggtattttatatacgccgatttatttattctgtgtagctgctttgcaattaagtaatactaaaaatgattcaatcaaatcattttacagtttcttagctaaacattctgccaacatatggtttttacattgtatattttttgctggagcaactaaagcggtctttcagccaattgcgtttcttccgcaaaatacatttttatcaattgcgtggattattctactgtgctctgtagtttctgtagtcatatcgccaatacaaatatacatgaagaataaaataaatagatatttataaaaattcaaacatatttcaagtaaagaatataaacaaaaatacccttcccaatataatattataaaaaataacgcagataagtattttactaatgatttagtatttgaaagtatgctaggtttaatgcaggttgagagcaaatatataaataaaaaatttgctattacttcatctcaatatgatatgaacttagacgatttatatacgattcatgggaaaatatcgttaaaagaagtactgtaatgtaaatttttcgcaaaattttatattgcacccctattatcattatgttacaatatatacacaattctctgactagctagtcagcaaaaggacggatataatgtttcgtaaagataaatggtttaaaatagggtggggttactttgtaatcatgtttttcttagaagcaatcctgcctgaatggatgggcgaggaaaatggagttctggaaagtcttcagctggtatggcttttaggcggtatttactacgcttggaagctgcgcaaacaaacattacaagcttggggcggacaaaagcttgctttatgttatgcaggtatgatttatttctttttacttgttatgcgtgaaatcagttggggtagagcactatttttaaatcctgatggcagtatctatgaatacagccaaatgggaatttatggaaaaatggtgcatcctttagtaaccatcctcataattttattgctgtatatgtgctataaagctaatatcaagcaattattacaaaaagtaaaattaccgttaaaatctacaattttattattgctcttcatttttatgtcctgggttggcgaaaaaaccaatttcgtcggatttcatgggcaagttgccgaagaactggcagaatttggtgcatatatgatgatgtattgcctagtacggaatatcggtaagaacttaaaaaaacaacggtaatttcctggataccattaatgagcgcttacaagagtactttagataaagtgctcttgtatttttatttgtaaattgcttgctgaatttatttaaaaatgttacaatgaaaatacatgaatgcaagtcgttttcatgcaaatattagtccactatgataaatagttaagcccatacggacaggcgggactgctgccggagtggtgagtaccacattattgattgagttgaaagctcaaattttataaggtgattgctagcaatccaaattaagtatcacttgtgaaacggtcaataagagtagtaaaagtaatatttgctatataaactctggacgtctgctgcgtcgcataatcgtcacagcttgctgtagattataggacaggtgatagaaatcatctgtccttttatttttttattttaggagaaataaatggaaaaactatcacaattatcggctccggtgtatgaagcactggaggcgtttcgcaaaaaacgtgtagtacctttcgatgttcccggacataaacgtggtcgcggcaatccggaactgcgcgagcttttaggtgaaaagtgcgtcaatctggatgtcaactctatgaaaccattggacaatctttgtcatcctgtttctgtaatccgtgatgctgaacaattggcagctgatgcttttggtgcggctcatgctttctttatggtaggaggtactacttcttctgtacaaagtatggtattgtcttctactaaagcaggggataaaattatcctgccgcgtaacgtacataaaagtgtaatcaacgctttagttttaaatggtgctattccagtctatattaatccggaagtagatagaagattgggtatttctttaggcatggaaattagcgaagtagaaaaagcgattaaagaaaaccctgatgctaaagcaattttagtcaataaccctacttattacggtatttgttctgatttacgttccatcgtgaaaattgctcatgagcataatatgctctgcctagttgacgaagcccatggtacacatttctattttggaccgaatatgccggtcaatgctatggcagcaggtgctgatatggcttctgtatccatgcataaatcaggtggcagcttgacacaaagctccttgcttttaactggacctaatgtcaattgggaatacgttagccagattatcaatttaacacaaactaccagtgcttcctatcttctgctctctagcttagatatttccagacgtaatctgtatatgcgtggcgaaagctcgtttgccaaggttgccgaaatggcacaatatgcccgtgaagaaattaacagcattggcggtttttatgcttatggcagcgagctgaaaaatggtggtagtatctatgattttgatatcaccaagctgtccgtttatacccgtgatatcggtttagcaggtattgaggtttatgaccttttgcgtgacgaatatgatattcagattgaatttggtgatattgctaatattttagcttatatttctattggtgatagaatccaggatattgaacgacttgtgggtgctttggcagatattaaacgcctttattcccgtgacccgtctttgatgttaaaaacagaatacattgccccgaaggtagtagtatctccgcaggaagctttttatgctaaggatgaatctttgccgctacgtgaaactgccggtcgtatttgtagtgaatttgtaatgtgttatccgcctggtattcctatcttggcacctggtgaagtaattacgaaagaaattatcgaatacattatttatgctaaagaaaaaggttgctccatgcagggaccggaagatccggaagtaaataatattaatgtaattgtataagttctagaacatataaaaatttaagggcgtgatttgatggagttgtggttctctgatttccatactgatgatgtaaaattagatataaaaatagaaaaacagctttttggtgaagatacggactttcagcgtattgacgtttttgcttctaaagagtttggccgatttattagctgtgatggcagcattgttttttcagaaaaggacgaattcgtttatgatgaaatgattgtccacgtgccgatggcggtccatcctcatgtacgtaaggttttggttatcggtggcggtgatggcggtgttgctcgtgaactgagccgttatcctgaaatagaagaaattgatgtggtagaaacagatcaagtatttatcgacgtctgccgcgagtttttccctgataactcggtaggtttagatgacccacgtgtcactgttttcaatgctgatggattacgttttttacgttctaaagtagatgaatatgatttgattatcaatgatgccatcgaccccttaggccatgctgcaggcctctttactaaagagttttatggtaactgtttccgtgcgttaaaagatgatggcattatggtttaccaacatggtagtccgttctatgatgaagatgaagaaacttgtcgtgctatgcaccgcaaggctagtcatagttttcctattagccgtgtatatcaggcagctattccgacttgtccttctggctactggctctttggttttgcgtctaaaaaatatcatcctttaaaagattttgagccggttaagtggaaagcacgtggtattaaaacttggtattattccgcaaatctacataaaggtgcttttatgttgcctaaatatgtagaagatatgctagaagaagaagaaaaataagcatagcatgaagctacgcttgttatatatcccctgaaatgtatcaaagatgataaggagttgaatcgattatgagtaaattattagttatcggctgcggtggcgttgctggcgttgccattgccaaatgctgccaaaacagcgaagttttcaccgaattatgtatcgctagccgtactcaatctaaatgtgaggatgtaaaagcaaaattacagccgactacttctactgttattactactgcacaagttaatgctgataataaagaagaattagtggctctgattaaagcatatcaacctgatgctgttttaaacgtagctttgccgtaccaagatttaactattatggatgcttgtttagaatgcaaggttgattatatcgatactgctaactatgaaccggaaaatattgatgatcctgcttggcgtgcagtttatgacaaacgttgcaaagatgaaggcttctctgcatattttgactattcctggcaatgggcctaccaagataaatttaaagaagcaggtatcatggctctgctcggtactggctttgacccgggcgtaactagcgttttctctgcttatgcactgaaacattacttcgatgaaattgaaagcatcgatattttagactgcaatggtggtgaccacggttatccttttgctactaactttaatcctgaaatcaatctgcgtgaagtttctgcacctggttcctattgggaaaacggtaaatgggtagaaattccggcaatgtctattaaacgcgaatacgatttccctcaagttggcatgaaagatatgtatctgctgcatcatgaagaaatcgaatctttggctaaaaatattcctggcgtaaaacgcatccgcttctttatgacttttggtcaaagctatctgactcatatgaaatgtttagaaaatgttggtatgttgtctactaaaccgattaaatttgaaggcaaagacattgttcctatccaattcttaaaagctttgctgccggatcctgcatccttaggtcctagaactgttggtaaaactaatatcggctgtattttcaccggtactaaagatggtaaaaagaaaactatttatatctacaatgtttgcgaccatcaagaatgctataaagaagttggttctcaagctatcagctacaccaccggtgtacctgctatgattggtactgctttggtgctgactaaaaaatggcaaggccaaggcgtatttaacgtagaagaattcgatcctgatccgtacatggatatgctgaaccaatttggtctgccctgggttgttgacgaaaacccggcaatcgtagaataatgatgaaggctttagaaaacctgcgtacaccttgttatgtggtggatgaggcaaaacttattaaaaatttagaactgttaaagcatattcaagacgaaacaggctgccatattctgctggcacaaaaatgtttttctatgtttaaattatatcctctgatgggcaagtatttagctggtactactgctagcggtatttatgaagctcgtctgggctatgaagaaatgggcaaggaaaaccatgtttttgctcctgcttttaaagatgaggatatgcaggaattagtaaaaatctgcgaccatatcgtttttaatagctttgcacagtttaataagcataaagatatctgcaagcaagcgggtatcagcgttggtatgcgtattaatccggagtgttcaactcaagaaggtgaccatgcgatttatgatccctgcgcttatggttctcgtttaggcgttactttagcgaattttcctgacgaactgccagaggaaattgaaggcttgcatatccataccttgtgtgaacagaacgctgatgatcttttaattacttttaaagtttttgaagaaaaattcgggaagtttttccacaaactgaaatggattaatctgggtggcggtcatcacattacccgtgatgattatcaggttaatgatttaattgcgttagtaaaatatattaaagcaacctatgatgtagaggtttatctggagccaggtgaagcagtagccttgaatgctggttatttggtaacggaagttttggatattgtgcataatggtatcgataccttaattttagatgcatctgctgcctgccatatgccggacgtattggaaatgccgtatcgtccgcctctggctgaaagctttgcagctaatgagaaaccctatacctatcgtttatcttccatgacctgtctagcaggtgatgtaatcggcgattacagctttgaacacgaaattaaagtaggggataagcttgtttttgaagatatggcaatttatagcatggtaaaaaataatacctttaatggtatgcccttaccggatattgctgtactgcatcagaatggtcaggtagagatagtacgtagctttgattatagtgattttaaaggacgactttcatgattgaaaaacaatatactcctaaaggcgacggcttttatatgcccggcgaatatgaacagcatgacggctgtattattgtctggccacagcgctctggttcttggagctttggggcttctgctgcttgcgaggcttttaccgcagtaattaaagctatcgctgctagtgagcatgtttatgttatctgtggcaaggagcattggcaacgtgcggaagcgatgctggctgatgtagcaaatgtagagctaatagccttagaaactgatgatagttgggcccgtgatattgcacctacctttgtagtgaaaaatactgctgacgggtgcaaagttcgtggtatcaattggcgttttaatgcctggggtggcgaagttgacggtttatatcccgactatgcacaagatgacgcttttgccgcagcttttgccgaaaaaacaggctatagtttgtatgatgctgctccttttgtgctagaaggtggttctattcactgtgatggcgaaggaactgctatggtgacggaggcatgccttttaagtgcaggacgtaatcctgatttatctaaagagcagattgaagaacgcttaaaaacatatctgaatgtagaaaaagttctttggctgccacgtggtatttataatgatgaaactaatgaacacgtagataatgtttgtgcttttgttcgtccaggtgaggttgttttagcatggacggataatgaagaagacgaacaatatgctttatccaaggctagttatgattttctcaaggatgctgtagatgcaaaagggagaaaaatcattattcataaattgccgattcccgacgtgcctgtatgcattagcgaggaagaggtgcaaggttatgactttgtcgaaggtgaagatatgcgtgaagcaggtgaacgtttagctgcttcctatgtgaatttttattttagtaatgatagtgtagtaatgcctgcttttggtggtgaaaatactgctagtgatttgcgtgccgcagaaattttagctgctttgtgtcctgaacgtaaagtagtacagattccagcacgtgctattttaacaggtggtggcaatattcactgcattactcagcagattcctaaaggagattgctaa

SEQ ID NO: 415 - DNA, 15740 bp, unidentified
  source 1..15740: mol_type = unassigned DNA
  misc_difference 9096: note = a, c, g, or t
  misc_difference 9097: note = a, c, g, or t
  misc_difference 9098: note = a, c, g, or t
  misc_difference 9099: note = a, c, g, or t
  misc_difference 9100: note = a, c, g, or t
  misc_difference 9101: note = a, c, g, or t
  misc_difference 9102: note = a, c, g, or t
  misc_difference 9103: note = a, c, g, or t
  misc_difference 9104: note = a, c, g, or t
  misc_difference 9105: note = a, c, g, or t
  misc_difference 11384: note = a, c, g, or t
  misc_difference 11385: note = a, c, g, or t
  misc_difference 11386: note = a, c, g, or t
  misc_difference 11387: note = a, c, g, or t
  misc_difference 11388: note = a, c, g, or t
  misc_difference 11389: note = a, c, g, or t
  misc_difference 11390: note = a, c, g, or t
  misc_difference 11391: note = a, c, g, or t
  misc_difference 11392: note = a, c, g, or t
  misc_difference 11393: note = a, c, g, or t
ttacttcagcagcgcgccggaaatgaccatcatctgcacttcgctggtgccctcgtagatctcggtgatcttggcatcacgcatcatgcgctcgatggggtagtcacgggtgtagccgtaaccaccgaacagctgcaggcagcggcgggtcacatcgcttgcggtgcgggctgcgatcagcttagcctgtgcagcctcgacgctgtaacgaacctttgcgccatccatagcctgctgcttcttcagagcggcagcataaaccagatacttcgcagcctcaacacgagccttcatctcagccagctcgaactgggtgttctggaaagcagcgatggcacggccgaactgcttgcgctccttgacgtaagcaatggtttcctccagagcgccctcggcaatgcccagagcctgagaagcgatgccgatacggccgccatccagcgtagccattgccagctggaagcccttgccgcgcacgcccagcatacgatccttcgggatacggcaatcctcaaagatcagctcgcaggtagaagaaccgcggatgcccatcttgtcctctgccttaccaacagagaagcccgggtcggtgcgctccacgatgaaggcggagcagagcttggtgggacggccgcgcttatccagcacgttatcggtaacggcgatgacgatgaacacatcagcaaagccggcgttggtgatgaagatcttggagccgttcagcacccagtaatcgccatcttccttggcaatggtctgctgaccctgcgcatcggtaccagcgcccggctcggtcaggccgaaagcacccagccactcgccgctgcagagcttcggcaggtacttagccttctgctcgggggtgccgttctcgtaaatgggagcagcgcacaggctggtgtgagcagagacgatgacaccggtggtgccgcagaccttgctcagctcctccacggccatgacgtaggacagcacatcgccgcctgcaccgccgacctcagtcgggaaatagatgcccatcatgcccagcttgcccatcttttcgacggtctccttggggaagtattcctctgcgtcaaccttctttgccagaggcttgacttcgttctcagcaaactcgcggtacattttctgcaccatctgctgctgcttggacagagtaaaatccatcgctatatcctcctaacaggtctttttttcatttaccggaatagcccggtgcaaacaaattcctcccgaccgctttccccgcagccgggagaaatgtttatcagaacttacagctggtcaacaggggtcttggtacggtctgcgttgtaaacgtagaagcccttaccggtcttgcagcccagattgccgccacgcaccatcttgcggatcagcgggcaggcacggtacttgctgtcgccggtctcgttgtacagcacgtccataatggccaggcagatgtccagaccgatgaagtcgcccagttccaggggtcccatggggtggttagcgcccagcttcatggcggtgtcgatgccagcgatatcggaaacgccctccatcttaatgaaggcagcctcgttgatcatggggatcaggatgcggttgaccacaaagccggcagcctcgttgacctgaacggggctcttgccgatggcaacggcgatctccttgatcttctcaacggtctcagcgggggtgttgcagccggcgatgacctcgatcagcttcatgcggtctgcggggttgaagaagtgcataccgatcaggggacgggtcagacccttgccgatctcggtgatggacagagaagaagtgttggaagcaaagacgcactcgggcttgcagatcttatccagctcaccgaaggtggtctgcttgaccttcatatcctcgaaagcagcctcaacgaccagatcgcagtctgcgcacagatcttccttcaggcccggggtgatggcggcgacgatcgcgtcagccttctcctgggtcatctttcccttagcgaccagcttctcgtagcccttcttgatctttgccagaccattctcggcccactcctgcttgatgtcgcacagagcaacggtgttgccctcaacctgtgcaaatgcctttgcgatgccctgacccatagtgccagcgccgataacaccgatcttcataggaaatctctcctttaatatcaaaaattatgtaatggattagttgttggtgaacactgccttgggcttcggtttctcacgggacaggaagcaggccatgccctcctgctgatcgtgggtctcgaagcaatcgccgaacagcttctcctcgacctcaacagccttctcgatgggcaggctaatgccgtcgttcattgctttcttgcagttacgcacagcaatgggagcgttctttgcgatcttgccggccagcttcaggacattctccatcagctcagcctgcggatacacggcgttgaccagaccgatgcggtaagcctcgtcagccttgatgttcagagcagagtagaccagctgctttgccatgcccatgccaaccagacgagccagacgctgggtgccgccgaagcccggggtgatgcccagaccgacttccggctgaccgaacacagcgttgtcagagcagatgcggatatcgcagctcatagccagctcgttgccgccgcccagtgcaaagccgttgacggctgcgatgacggggatggggaaatgctcgatcatcaggaacacatcattgcccagcttgccgaaggcctcgccttctgccttagtcatggtgctcatagaaccgatatcagcaccagcaacgaagctcttgtcgccttcgccggtcagaacgatgcagcggacagtctcctgatcgactgcctcaaaagcagccttcaggtcagccagaacctcggggttcagggcgttcagtgccttgggacggtcgatggtaatgatctcaacagcgccctgcacctcggtttttacaaatgccattgtgaaaacctccatttcatacagttcagtttttttcaaaacagcccccgggacgcgggagggctctccggttctctccggcgctccgggtctgtggttcaatcaggattcagagaaagagtgcttagtccatctcaacgatggtagcgcagcccatgccgccgccgatgcacagagtagccaaacccttgtgagcaccacggtgcttcatagcgtacagcagggtgaccaggatacgagcgccggaagcgccgaccgggtgacccaaagcgattgcgccgccgttgacgttcagcttgtccttatcgaagcccagagcctcgccgacagcgatggactgtgctgcgaatgcctcgttggcctcgaccagatccatatcagcaacggtcatgccggtcttggccatgaccttcttggtagcagcgatggggcccagacccatgacctcgggctcaacgcctgccagagcaccggcgacccaggttgccagaggcttcacgcccagctccttagccttctcctcgctcatgacgaccagagcagcagcgccgtcgttgatggcggaagagttaccagcggtgacgatgccgtctttggtgaaggcgggcttcagctttgccagaacctcgggagcgctcagacgggggccctcatcggtatcgaacacggtgtcgcccttcttgcccttgatgacaacaggaacgatctcgtccttgaaggcgccgtccttgatggccttgtcagccttcagctggctgttgtatgagaactcgtccagcatctcgcgggtgatggggctgtagccgtacttcttctggtaggtctcgttggtgcagacgttctcagcggtcatgcccatgtgcttgttgaagccgcaggcatcccacagtgcatcgttgaccatggtatccacgatctcgctcttgcccatgggagcgcccatgcggtagccgtagcgagccttctgcagtgcgaagggagccatatccatgttctccatgccgcctgcaacaacgatatcagcatcgcctgcctcgatcatctgagcagccatgttcacgcagttcagaccagagccgcagaccacgttgacggtgacagcgggggtctcgatgggcaggccagccttcagggcagcctgacgagcgacgttctggcccagaccagcctgaatgacgcagcccatgtaaacatgatcgacctgctcgggcttgacgtttgcacggttcagagcttccttgataacgatggagcccagctcaacagcgggaacgttggccagagtgccaccgaacttgccgatagcggtgcggcatgcagatgcgataacgatctttttcatgtgaatagcctcctgaattgtgtatgtgtgttacttatcggttacccatttatcaaaacgccctgcggcatttttgcggtatcagatctctttcctctcccggagctgtgcgtatttttcgctgacggccttttccacattgggtgtgacgaacttgctgatgtcactgccgtagtacgctgcttcctttacgatggtggaggaaagataactccatttgatgctggtggcaaggaacatggtctcgatgccgggcatcagtgcgtggttggtttgcgcaagctggatctcgttttcaaagtccgttactgcccgcagtccccgcaccattacggatgcgtggcgcttttttgcgaactccacggtcaggccgtcgaagctttccacggtcacattggggatgttcttgcagcattcctgcagcatagccacccgctcctccactgtgaacagcggatgcttggcgctgttgatcagcaccgccacaatgaggtggtcgttgatctttgctgcgcgtttgatgatatcaaggtgtcccttggtgaccggatcgaacgacccgggataaactgctgttgccatcggtcagtgtcctccttatgcgctgcaattattaagcgcgatgtggttctgccatgatagcactttccagccttgggtgcaacctgaaactgctgcggtgcgttttatcgttaaattttaaacgaatcatctcgcactgctccgcagttgcttcccacgctattagtaaagcacatcgtcaaaattttatcaagtctttttctcaacttttttgttttttgcgtaccaaacaatccccacataaagccaagaaaactgtttattatgctatactggttgttttttagccaaaactattgattctacactttgttaatgttataactaagttgagctgttctgcgcagagcggagcacacactgctgccttgtttataaggttaccatacagatgtggcaaaacggtgtgcattccgcaaaacaggcgtaaaacagccgcataatttgtccgcacagaattgtttacaattcttttatgtattttaagagaggatggtttataatggattgcaaggaactgtacgcacagaagcttatgactgctgcgcaggctgccgctctggtcaaaagcggcgactgggtggattacggctgggccgtgaacacccctgtggccgtggacgccgagctagcaaaacgcctgccggagttggaaggagtcaacttccggggcggcattctgatgtgggtgccggagatcttccagatcgacgaccctgctgcccacatgacctggaacagctggcacatgggcggcattgagcgcaaggccattgcgcaaggtttctccttctactcccccatccgctactctgagctgccccgctactaccgcgagagcagcgaccccgtggatgtggcagtatttcaggtgacccccatggacgagcatggctacttcaacttcggtcccagcgcttcgcatctgggtgctgtgtgcgaaaaggccaagaagatcattgtggaggtcaacaccaatatgccgcgctgccttggcggcatggagaacagcgtacacgtttctcaggtaagtggcattgtggagggcacaaatccccccatcggccagatggcagctgccggtgccgctaccgaggttgacctgaaggtagccaacctcatcgtgccgcagattcctaacggtgcctgcctgcaactgggcatcggcggtatgcccaatgccatcggcgggctgatcgcgcagagcgatctgaaggatctgggcgtgcacaccgagatgtatgtggatgcctttgtggatattgccaaggccggcaagatcaacggcagccgcaagcagctggacaagggccgtcaggtctacgcctttggtgccggcacccagaagatgtacgattacctgaacgataacccggagtgtatgtctgccccggtggactacaccaacgacatccgcagcatttccgcactggacaactttatttccatcaacaatgccgtggatatcgacctgtttggtcaggtgaatgccgaaagcgccggtgtgaagcacatttccggcgcaggcggtcagctggacttcgtgctgggcgcatacctttccaagggcggcaagagctttatctgcctgtcctccaccttctttaataaaaagaccggccagctggaaagccgtatccgtcccacgctggagaatggcagcatcgttaccgacacccgcgccaacgtgcactatctgtgcaccgagtatggctgcgtgaacctgaagggcttgacctcttgggaaaaggccgaggctctgatcagcgtggcacacccggacttccgtgaagagttgatccgcgaggctgaaaaactgcacatctggcgcagaagcaacaaaatttaataagcgctgtgggtattcccgctgcccgcagcaggaatggagtttgtcatgatggacaaaaagccgcacatcaaaccgtatctctatgggatgctcgcagggtttggtgccattgcactgagcatcatcttctttttccttatttaccgctttgacggctttggctcggctatctctaccctgaccggcatcctgatgccctttatctacggtgccgtcattgcctacctgctcaagccggtgtgcaacagcatcgaaggctttctgcgccggttcatcccggaaaagatgaacggtctgatcaacgcgctgtccgtggcgcttaccatcctgttcgggcttttgctggtgtatgcactggtcatgatgatcgtgccgcagctgatcaccagcgtgactaccctgtactacaccgcgcaggccaacattacaaagttcatgaactgggcaaaccatctggagtttattgaaaagaacgaacagatcacggaactgctcaattcagcctacgctgccctgaataccaatctggacacatggaacacatggctcaagaacaccctgctgccctccatgcagaacatcgtaagcggcgcagctattggtgtgctgaacgtggtgacggtggccaagaacctgatcatcggcatcatcgtggcggtgtatatgctggccagccgcaagcggttcgtgcagcaaggcaagctggtgctgcacagcatcgtccgcccccgctgggcgcagctgatcactgaggaagtgaagtacgcagacaaaatgttcggcggcttcatcaacggcaagatcatggactctgccatcatcggcgtgctgtgctatatcggctgcctgattttcaagttccccagtgcgctgctggtatcggtgatcattggtgtgaccaacgtgattcccttcttcggccccttcatcggtgccattcccgccacgctgctcatcctcatccagagccccatcaaggcgctgtggttcgtgctgttcgtgctggttttgcagcagctggacggcaacatcatcggacctaaaattctgggcaacaccaccggcctttccagcttctgggtactgttcgccatcctgctgtttggcggcctgtggggttttgtgggcatgatcgtgggtgtgccgctgttcgccgttatctacgacgtcatcaaaaagctggtcattcacggcttgcagcgccatcaggagctgaccctgctgaacagctatcacgaccagttcggcgaccccgcagacgatgcagccgcacagcccgctgcatcgcaacctgctgaaaaccagtaacccttccctgccccgcatcagagcccttccgatgcggggcatttttaacgtattataggtcaaatttgacgaggtgatttacatgaaaaagagcacgtcaaggattatcggtttgctaatgttgattatagctgttatatttataatgtttgcattgaaccatccagaaatgagttttccttggaacaataccattacttggttactgtatggtttatatttccttgtaacagtcgtgctgcttattgcgcctaagatgaagaagtaaaaaattccagtttacacagcaaaacccccgccttatgttccaggcaggaacacagggcgggggtcgtttattgctttgattcagatttcagctcagtccagcggatgagagggcttccagtccttatagttttcgtaccggctctcgcggaccttgtggtgggaccacacttcgtcagcggtgggctgccagttggcggcgtagctcttgcacttctcacacaggtgctcgacgctttccggggactgcaggtcggtgttgtgggcaccggtctcgtgcaccatcttttccagcagctccgggttttccagcatcgggcagggacgcagatggttcttgttgaagggctggccgttgtggtaagccatgaacagcgggctgtgcagaatttccagaatagactggtcgtggatattggcgttggagtagtggatgaacacgcagggctcggcgtcaccggcagagttgatatggaagtagttgcggccgccagcgatgcagccgcccacgaactcgccgtcgttctggaagtccatggggtagaacgggatatcgcacgcagaagagcgcagatagcggatacggtcgatcatatacttgcgctgttccggggtgggcatcagctccggggcggcctcattgcccaccggcatatagtggaagtagaagccgaagtgtgcccccttctcgcacaggagccgcatgaacgcatcgttggtgacggcctcgatgttctggcggggaaagccgatggaggcgccgaagaggnnnnnnnnnnggcattcctgctgaaccgctcttccgatctgatggaggtgccgaagaggatgccgtacttcttgagcagatccatggcgtgcatcacagcggcatagtggccttcgccgcggcgggcatcgttggtctccggggtaccctcgatggacagcataaaggcgatattgcccagacgccgcacctcttcacagaagggctcgtcgatgagggtggagttggtgtagatggcaaattccacgtcattatgcttttctgccagctcgagcacgtccttcttgcgcaccagcggctcgccgccggtcagcatatacaggtacacgcccagctccttgccctgcgtgacgatcttgtccatatcctcaaagctgaggttgttcttgttgccgtactcgcctgcccagcagcccacgcagtgcatattgcaggcagaggtggggtcgaacaaaatcagccaagggatgttgcactggtatttgacgcggttctcgcggatcatcttagtgccgcggaagaaggcttcgtagcccagattcagcgcagtggtgcgcgccacgtgggggtcggtctgatccagcacgcagttgatgagtttcgtccacttgctgtcggggtcggtcagcacctttttggcgttctcgtaggtctcgtcgctgaagccgctgccgtagaactgctttgcagcatctaccagctggcacattgttttttcacggtcttgctcggcgcgggaaagcgccacgtccactattttaccaagcgcagcacgctgcatcttgtgagtcagattatcaagagatgtattcataactttttcctcccgaaatgattcctttggaaatccttattttgcctgaccacatcctaccactttgcgtgtttttgtgccataaacagaaaatacgccgtgatggaaaacccatcacggcgtatcctttgataaaattttattgaagccgcacagccacaaagcacatcattcctctattttcaagctgccgctgctcaggcggcacagcgcccggcggaaatccccgtggatcatggtgctcacgcgctccaccatcttcttggggtcgcctctcatatcccggcgggtccattccagcgtcatacccaccagtgcatacttgtaaaaatcgacaacaaactgcttatctgcgtcctgcacggtgatatcgtggcattcacggtccgcaaaatccttcaggatggggtccagcagcctataaaggtactgctccacctgttccctgcccaccgagcggtaaacgttgagcacaagggtcttgttatcctgcagttggcgcagaacgtccagataggcttcgctccatgtaccaaaaccccggcggccttccattgccttggcggcatcctccgccaagatccagtccaccagatcgtaaatatccttgaaatggtaataaaaggtcatgcggtttaccccgcagtcctcggtgatatcgttgatcgtaattttgttcaggggcttttccagcagcagcttcttgaaagatgcctccagtgcccgttttgtcgtttgtgacacaaaaacccatcctttcccggcagactcctctgccgtttccgtaaatgataccccatagtttattttaccgcaaaatacgaccttatttcaagtagagattcttacctttttatgaagtttgtgtgtgcgctgcccgccgcgaaggtgctgtttttcaatctgcccgccaaaaataagacaaaagtcttgattttctcccagcggttgcttagaatgaataagaagcagaattttatgcagtgcatacctgccgagggagggttattattatgatgaaaaccattgggtttttaggctgtggaaacatgggcggtgctattgcacgcgctgtgtgcaaggctaccgagcctgagaatgtatttctggcgaaccgcacggcggccaaggccgaggcgctggccgcagaactgggctgtcagacggctaccaacgccgaggtggccggtgactgcgacctgatctttctggcggtaaagccccagatgatggaagccatgctggagcccctgcggttcgtccttgccgagcgcaccaagcggttcgtgctgtgcaccatggccgccggtctgccagtggcacgcattcaagagatggcgggcggcgactaccctgtcatccgcatcatgcccaacaccccggcatcggtgggcgaaggcatgatccagtattgctccgtcaacgtaaccgccgaggaggaggctgcattctgccagctgatggctcccgccggnnnnnnnnnntgcaagctgcgtctccggctgcggcccggcatgggtgtaccagtttattgaagcgctggccgatggcggcgtggcctgcggtctgccccgggcaaaggcacaggaatacgccgcacagatggtactgggcagcgcaaagctggtgctggaaagcggcaagcaccccggcgcgctgaaggatgctgtgtgcagccccggcggcagcaccattcagggcgtgcgggtactggaagaacacgggctgcgcggtgcggtgatggatgccgtgctggctgcttacgacaaaacaaaggaaatgggaaagggttaatggaatcatgcgcatcgttgtgaaagtgggcacctccacattggcataccccaccgggcggttgaacatccgccatgcagaggaactggtcaaggtattgagcgatttaaagaatgagggacacgaggtcattctggtgtcctccggcgctattggcatgggcgtgggcaagctttcactgcctgcacgccccaaggataccaccaccaagcaggcctgcgctgccgtggggcagtgcgagctgatgtacacctacgaccggttgttcagtgcctacgatcacacggtagcgcagatcctgcttaccggcgtggacgtggagcacaccgagcgccgggtgaacatccagaacaccctgacccgtctgctggaactgggtgcactgcccatcatcaatgaaaatgatagcgttgccaccgatgagatcacttccattggcgacaacgacacgctggccgctattgtggcctgctgctgcaaggccgacttgctggtgctgctgagcgacatcgacggcctgtacactgccaacccccacacccacccggatgcggcgctcatcccactggtggaggagatcaccccggaggtgatggcgctggcagacggtgcaggctctgcactgggcaccggcggcatggcaaccaagctgcgggctgcccgcatggtgaccggcagcggtgcggatatggtcatcgccaacggcgcacacccggaactgctgtatgatatcgctgcgggcaagcccatcggcacccgctttgccgggcacaagcagcccgcgctgtccacacaggaggtttgagctatgaccacacaggaaattctggaagccgcccgcggggcaaaggctgcgctggcactggctgatagcgccagccgcgcacaggcactgtgcagtatggctgcgcagctgtgcagcccggcaaacatgacggctatccttgccgccaacgccgacgatatggccgctgcaaagggacatatcagcgaggtgatgctggatcgtcttgccctgaccgaagagcgcatccgtgctatggcaaagggcattgaagaggtcgctgccctgcccgacccggtgggccgggtgctgaagcgggtggagcgccccaacgggctggtgatcgaaaagaccgccgtgcccatgggtgtgattgctatcatctacgagagccgtcccaacgtgaccagcgatgccgccgcccttgccatcaagagcggcaacgcctgcatcctgcgctgcggcaaggaggcttggcgcagcgccaacgccattgtgcaggcactgcggcaggggctgcgggagaacagcctgccggaaaacgcggtctgcctgatcgaggacaccacccacgcctctgccaacgccctgatgaccgccgtgggctatgtggatctgctgatcccccggggcggcgcagggctgatccgcgcctgcgtggaaaacgccaaggtaccctgcatccagaccggtaccggcatctgccacatttttgtggacaacaccgccgatcaggccaaggcgctggacattattgaaaacgccaaggccagccgccccagcgtgtgcaacgccgaggaggtgtgtctagtgcactctgccattgcgcaggagtttctgcccaagcttgcacagcgtcttggccccgaccgcgtggctgcgggcaagctgccggtagaactgcggctggacgcacccgccgccgccatcattcccggcacgcctgccggccctgcggactttgacaccgagtttctggactacatccttgccgtcaaggtggtggacagtgtagatgaggccattgcccacattgcgcagcactccaccggccatagcgaggccatcctgacccagacgcaggcagacgccgaccggttcaccgctgcggtagacagcgccgccgtgtatgtgaactgctccacccgctttaccgacggcggcgagtttggtctgggctgtgagatgggcatctctacccagaagctgcacgcccggggtcccatgggcttggaggagctttgcagctacaagtacgttatccacggtgacgggcagattcgctgatctcccctgccccagcttcttcataatttttttacaattctgtccggcctgcgggcgcggcagagcaagtttttcacagttgaaaaaaatttcctgtacaggccgatgcaagctgcttcggcctgtatttttgttttatcgggatggactgtatttcgattcaagtgaaaaagtgaaaaatatttcacttttttcagaaaatggattctcttggatggtggtatgtatccaagaattcgccgtttctcacaatgcaaaagtagtacttttacgtttttataggttaaaaaagcaaaatcttctcttgacagagcgttttttgtgcggtaaaactatattgtaagatttgatatcgatttcactctcgtttcacagaacttcaaaattcgtacatcataactggtgcattgtaaaaataagtaaaggagagagcatcctatgacgatcgcaattcttgcccacgattcccgcaaagaactggctctgcagttctgtaccgcttacagtgccatcctttcccgcaataatgttatcgccaccggtaccaccggccggatgcttgcgcagactactggtctgccggtgcattgctacctctccggcaagctgggcggtgtacagcagatcacctcccgcgttgcctgcgatgaggtggatctggtgctgttcttccgcgacccgctgaaggccgatgccgccagcctgaccgaacagaatctactgcgcctgtgcgatatgcacagcgtacccattgccaccaacattgctaccgcagaggtgctgctgcgtggtctggatcagggagatctggactaccgtgaagggatgcacccggccatgatcgagccgatccccgccatgcaggcccgtgccgtgtaagcctttatttgtgtgttactttgtgtatagagggaaaaaaggagctatcgcagcgtgttgtgcgatagctcctttttgttataaggatatcttgcccgaaaggcaaggattatgcctgaaagtatgctttctggacagccagcagcacaccggcgcggctggcggcaaagttcaagccgccctgcaggtagcaggtatagggggcacgcagaggaccgtcacaggaaagttcgatggtgctgccctgcgtaaagctgccgctggccatgaccacctcgtcggtgtagcccggctccgggctgggttccggggcggcgtagctgtccacggggctggcagcctgaatgccctgacagaagccgatgagcgcctccgccgtaccggcatcaaagcaggtgacgatatcgttgtgattctcgcagtagcgtgggatgggctttttgcccagcagctccagcatacactgggcgtagatggcggtcttaatggcctcgcacaccacgccgggggcgtagtagaagcccagatacatatctcggggggtctccagtgtgcagcccagctccttgccaaggccgggggcgttcaggcggtaagcgcacagttccaccagatccttgcgacccacgatgtagccgccggtgggagcaatgccgccgccggggttcttgatcaggctgcccactgcgatatccgcgcccacctgacagggctcctgtgtctgggtgaactcgccgtagcagttatccacaaagatgatgatctccgggtttgcggcgcgggcggtatcagcaattttgcggatggtagccagatcaaaggcattgcgctgtaaatagccgcggctgcgctggatatggcacacctttgcaccgggggcttttttggcgatcaggtcataatccggggtgaagtctgctttaaggggtgcttcgtcatagttcacgccgtagtccatcagagtgccggtgcccttgcccttgccgtccagaccaatgacgccctccagcgtatcgtaggggcggccggtggcggccagcagggtgtcccctgcccgcagcagaccaaacagggccacggccagagt

SEQ ID NO: 416 - DNA, 31020 bp, unidentified
  source 1..31020: mol_type = unassigned DNA
  misc_difference 24162: note = a, c, g, or t
  misc_difference 24163: note = a, c, g, or t
  misc_difference 24164: note = a, c, g, or t
  misc_difference 24165: note = a, c, g, or t
  misc_difference 24166: note = a, c, g, or t
  misc_difference 24167: note = a, c, g, or t
  misc_difference 24168: note = a, c, g, or t
  misc_difference 24169: note = a, c, g, or t
  misc_difference 24170: note = a, c, g, or t
  misc_difference 24171: note = a, c, g, or t
  misc_difference 24172: note = a, c, g, or t
  misc_difference 24173: note = a, c, g, or t
  misc_difference 24174: note = a, c, g, or t
  misc_difference 24175: note = a, c, g, or t
  misc_difference 24176: note = a, c, g, or t
  misc_difference 24177: note = a, c, g, or t
  misc_difference 24178: note = a, c, g, or t
  misc_difference 24179: note = a, c, g, or t
  misc_difference 24180: note = a, c, g, or t
  misc_difference 24181: note = a, c, g, or t
  misc_difference 24182: note = a, c, g, or t
  misc_difference 24183: note = a, c, g, or t
  misc_difference 24184: note = a, c, g, or t
  misc_difference 24185: note = a, c, g, or t
  misc_difference 24186: note = a, c, g, or t
  misc_difference 24187: note = a, c, g, or t
  misc_difference 24188: note = a, c, g, or t
  misc_difference 24189: note = a, c, g, or t
  misc_difference 24190: note = a, c, g, or t
  misc_difference 24191: note = a, c, g, or t
  misc_difference 24192: note = a, c, g, or t
  misc_difference 24193: note = a, c, g, or t
  misc_difference 24194: note = a, c, g, or t
  misc_difference 24195: note = a, c, g, or t
  misc_difference 24196: note = a, c, g, or t
  misc_difference 24197: note = a, c, g, or t
  misc_difference 24198: note = a, c, g, or t
  misc_difference 24199: note = a, c, g, or t
  misc_difference 24200: note = a, c, g, or t
  misc_difference 24201: note = a, c, g, or t
  misc_difference 24202: note = a, c, g, or t
  misc_difference 24203: note = a, c, g, or t
  misc_difference 24204: note = a, c, g, or t
  misc_difference 24205: note = a, c, g, or t
  misc_difference 24206: note = a, c, g, or t
  misc_difference 24207: note = a, c, g, or t
  misc_difference 24208: note = a, c, g, or t
  misc_difference 24209: note = a, c, g, or t
  misc_difference 24210: note = a, c, g, or t
  misc_difference 24211: note = a, c, g, or t
  misc_difference 24212: note = a, c, g, or t
  misc_difference 24213: note = a, c, g, or t
  misc_difference 24214: note = a, c, g, or t
  misc_difference 24215: note = a, c, g, or t
  misc_difference 24216: note = a, c, g, or t
  misc_difference 24217: note = a, c, g, or t
  misc_difference 24218: note = a, c, g, or t
  misc_difference 24219: note = a, c, g, or t
  misc_difference 24220: note = a, c, g, or t
  misc_difference 24221: note = a, c, g, or t
  misc_difference 24222: note = a, c, g, or t
  misc_difference 24223: note = a, c, g, or t
  misc_difference 24224: note = a, c, g, or t
  misc_difference 24225: note = a, c, g, or t
  misc_difference 24226: note = a, c, g, or t
  misc_difference 24227: note = a, c, g, or t
  misc_difference 24228: note = a, c, g, or t
  misc_difference 24229: note = a, c, g, or t
  misc_difference 24230: note = a, c, g, or t
  misc_difference 24231: note = a, c, g, or t
  misc_difference 24232: note = a, c, g, or t
  misc_difference 24233: note = a, c, g, or t
  misc_difference 24234: note = a, c, g, or t
  misc_difference 24235: note = a, c, g, or t
  misc_difference 24236: note = a, c, g, or t
  misc_difference 24237: note = a, c, g, or t
  misc_difference 24238: note = a, c, g, or t
  misc_difference 24239: note = a, c, g, or t
  misc_difference 24240: note = a, c, g, or t
  misc_difference 24241: note = a, c, g, or t
  misc_difference 24242: note = a, c, g, or t
  misc_difference 24243: note = a, c, g, or t
  misc_difference 24244: note = a, c, g, or t
  misc_difference 24245: note = a, c, g, or t
  misc_difference 24246: note = a, c, g, or t
  misc_difference 24247: note = a, c, g, or t
  misc_difference 24248: note = a, c, g, or t
  misc_difference 24249: note = a, c, g, or t
  misc_difference 24250: note = a, c, g, or t
  misc_difference 24251: note = a, c, g, or t
  misc_difference 24252: note = a, c, g, or t
  misc_difference 24253: note = a, c, g, or t
  misc_difference 24254: note = a, c, g, or t
  misc_difference 24255: note = a, c, g, or t
  misc_difference 24256: note = a, c, g, or t
  misc_difference 24257: note = a, c, g, or t
  misc_difference 24258: note = a, c, g, or t
  misc_difference 24259: note = a, c, g, or t
  misc_difference 24260: note = a, c, g, or t
  misc_difference 24261: note = a, c, g, or t
atgagcaagaaattcttgtacctgttcaaagagggtcatgacgccttcggcggcgaccagaccaccatgaagaatactctgggtggtaagggcgccggtttggccgagatgacccacgccggcatgccggttccgcagggcttcaccatcaccactgaggcctgcacccagtactatgcagacaaccgcgagatcaacgatgagatcaaggcggacatcttcaaatacatgggcatcctcgaagagcagaccggtaagaccttcggctccatcgagaaccccctgctggtttctgtccgttccggtgctcgtcagtccatgcccggcatgatggataccatcctgaacctcggcctgaacgatcaggctgttgagggtctggccaagaagaccgacaacccccgctttgcctacgactgctaccgccgcttcatccagatgtactctgatgttgtcatggagctgggcaagagcttctttgaggagcgcatcgacgccatgaaggagcgcaagggtgttacgcaggacgttgacctgactgccgatgatctgaaggagctggtcaaggagttcaagcagatctacctcgagaagcagggcgagcagttcccgcaggacccgaaggagcagctgatcggtgccgtcaaggccgttttccgctcttgggacaacccccgcgccaatgtgtatcgtaagatgaacgagatcccctacgagtggggcaccgctgtcaacgtgcagcagatggccttcggtaactccggcatgcgctccggcaccggcgttgctttcacccgtaaccccgctaccggcgagaagaagctgatgggcgagtacctgatcaatgctcagggcgaggacgtcgttgccggtatccgtactccttctcccatcagcaagctgcatgaggagatgcccgaggtttacgatcagttcgttgagatcgctacccgcctcgagaactactacaaggatatgcaggacatggagttcaccatcgaggatggcaagctcttcatgctgcagacccgtaatggcaagcgtaccgcgcaggctgctctgcagatcgcctgcgacctcgttgatgagggcgttatcaccgagcagaccgctgtgctgcgcgttgagcccaagcagctcgacaccctgctgcatccccagttcgatgccgctgccctgaaggctgccgaggctatcggcaagggtctggctgcttctccgggatctgcctgcggccgcgttgtcttctctgctgaggatgcagaggagaaggtcaaggacgatgcttggaagaaggtcgttctggtccgtctggagaccagccccgaggatatcgtcggcatgcaggtctctcagggcatcctgaccgtccgcggcggtatgaccagccacgctgccgttgttgcccgtggtatgggcacctgctgcgtctccggctgcggcaacgacaacagtgttgccatcgactatgacgccaaggtcatcactatcaacggccacaccttccacgagggtgactggatgagcatcgacggctccaccggcaacatctacgagggccagattgctaccgttgcttccaccgagaacgccaacttcaagcgcttcatgggctgggctgacgccaaccgtcagatgaaggtcatgaccaacgctgataacccgaaggacgctcagaacgctgttgacatgggtgccgagggcatcggtctgtgccgtaccgagcatatgttcttcgctgaggaccgcatcaaggctgtccgcgagatgatctgcgcccgtactgttgaggagcgcaaggctgctctggccaaggttgagccgttccaggaggccgacttcactgccatgtaccgcatcatgggcgaccgtccgatgaccatccgttatctggacccgccgctgcatgagttcctgcccaccaaggcagaggacatcgctgctctggctgccgatatgggtatgaccaccgaggagctgaacaacgttgttgtcagcctgcatgagttcaaccccatgatgggccaccgtggctgccgtctggctgtcacctatcccgagattgccgagatgcagaccaatgctgtcatcaaggctgccatcaaggtttctgctgagaccggcaagatgatcacgcctcacatcatgattcctctggttggcgaggtcaaggagctgaagttcgtcaaggacgttgttgtcaagacggctgatgccctgatcgctgctgccggcgttgacatgaagtatgaggtcggcaccatgatcgagatccctcgtgcagccctgactgccggcgagatcgccaaggaagctgacttcttcagcttcggcaccaatgacctgacccagatgaccttcggcttcagccgtgacgacgctgctaagttcctgtctgcctactacgacaacaagatctacgagagcgatccgttccagcatctggatcagatcggcgttggcaagctggtcaagatggctgctgctgacggccgcgccaccaacccgaatctgggtctgggcatctgcggcgagcacggcggcgacccctccagcgttgagttctgccacaatgttgggctggactatgtcagctgctctcccttccgtgttcccatcgcccgcctggccgcagctcaggcagctattaaaaatcccagagcgaagtaattgatttttaacgaactatcgctaaaaattcaagccagaaaaaggttgaaaattgactgaaatgtgcgctgttgcttgccggtggcgcacatttgtgtttctgccaaacatacacttcgaccctcaaatctgtccaagaacagcgcctgaactggctcggcatatcgtttttttgacgatattgacgcgcggtttcgaagttgattctgaatttcagcaggggagtttgctcgattttcgttaagtcggttcgttcagcgtgaggaacctgcggaccaaaattcagtttccagcggaagaggttgtccttgacaggtgtgacaacttctacaaattcctgaatcagtgaatcaggcagcttcggtgcagaaagatccacgattcgattcagtgcagcagtcagttccttcatagaaggagtggctgctgctttttgctgtgctgccatttcggctggagggtgctgcaaggcacttatttcctgctccgtcttggcgcacagctctttgtactcatcacgccccaagtcaccgtctgcgtacatttgagcaagccgcagtttgcgatttttcagcttactgatctgggcgctgctgctggcgaccgagcaggtaataatgatttacttaatacggcacacatcaaaaaagcgttggaggagcttgtggatatttcagcacccaaaattaacgacaagctgattgaacgctttgtagaggttgtgacgccaattgaaaactattcatatcggtggaaacttaattttggagaaaaggtgagccgaaaagacagaacagacctttgcaaaatcgaaagcgcgccgattctcagcttcaaaattacttttcaagaagcacatgaataccgtaaagctaataagatgcctgcacagtttactttctcaaaggggagcttacgatttcgagtattgtccctttccgggttccttgaaaacagccgcttcccaacggttaacattttaatcgaattgaataacacttgcttgacattttctacggtcatacatttcactccttgcagttaggtgtcacagcggacacttcctaactacaagggcctctttgcttaccgaagtaagcaaagaggccgcacatcctgagcttattgtcaagtgtttagaagaaaaaaatccctctacaccaatttctgtgttggtgtagagggattgcctgtttaactaagtgacattgggacattggccccgcttttttcctattcaaagggaattatggacgatgatactttctttttccgggtcgcgtttactacccctgttgttgtcaccaactcggtttttgttggtgacataagagtacaacttttttcgtaaattcgattcatttcattttgcttcaactcccagcaggaatgcgcataaaaaagtggaactttcccaagtgagagaatgctctgaaaaagttggattgtctgcatttagtgcaaattgctgcacctccatctttttagtggtgagtttttcctttacttccgtgtaagaatgcccataaatgtatccccagattgcggtccggtcagattttcgccctttaataaagcgaccctcctaacgaccatctttcctctttctgatgttttctccacgctttgccataatgctcctccttgttcaatttgtaatgatgtaacattgcttttatatgtttcggctattccataggaaaaagtacgcccaatatggtgaaagtgacaaaaatatgttcgggtacggtttgatataactcgttctgttgaaatgtgtcgtattgtgtggtattatatctatacatattatatatgggcttctgtggaaatgagtatcatccattctcaaaatggatgatactttttagaggcttgaattgcccttcaagtatctcatttgttgaagtatcagaaagaggaattgtgaaggctatcagcggtgctttataaactatactgtgccctgtaaaagcgaatggaaaatacttgaagaacaatttgagcccacgggttggttgcaattgagcaataagccgtgggcttgtttcagttcatgtaaatgttggcccgaaataccggagcaacgtagaatcgtctagcaaggtggataagagacatcaaaaatgcgagaaaagctacgttgctgcggagtgttgagtagacagttgtgtatgtagcaatgatgacaaaacaccgtatttacgaacattttctacggcttggaaaaataagtgagctttttatgcaactaaaagctacgttgctccggtatgtagagtagacctattccgaaatgtttactcaacataatcagttgaggtctgatggtcaatggtggagcgtaatacacatgcgataataggcatttttgcataaaaatgcgccgtattttactctgaaaatcatgttttgtgcagtaggacgttaatactgataactgcatttatctgcgtggcgttgagtaacgaacggaaattactaatattctgtcgtgtagacatcataaaaaatgaataaatcattgtgcaggttgcaataagaatgaaggacttgtttgtatgattattacaaaaaagatggaatgggaaaatctggcaaaatagaagcgaaaaaactggtttactcaacagattaacactttgatgtagagggtggagagtgcggcgcatgaatatgcgccagtgaaaagtagtgaaagatgcaactgattttgttgagtgaacctgtctggataaagatatgcaggaaaatggacgaaatatcgaaaaaagtgttgattgctggggtaattggatacgacaacataagaaaacacttagccgtgtgcgtggcaagaggaaaaagaaataccatctgtggagagcagatgtgtacatagattgggatattaaacgaaaagacggaggaagaaaatgagcacagttagcttagagaataaaacgattttagtcacaggagcggccggatttatcggttccaatcttgtgaaacgaatttatcaggaggccccttcggcaacggtcatcggcatcgacaatatgaatgcctactatgacgttgccttgaaagagttccgtttgaatgagctggccaagtatcccacattcacttttgtaaaaggcaatatcgctgacaaggcactgattacagagctgttcgagaaatacaagcctgctgtggtcgtgaaccttgcagcacaggctggtgtgcgctactccatcaccaacccggatgcttatgtggaatctaatctggtcggctttttcaatatcttggaagcctgccgtcattgtgagagcttggagcatctggtttatgcttcctcctccagcgtctatggcagcaacaaaaaagttccgtacagcacggatgacaaagtagataaccctgtttccctgtatgcggcaaccaagaagtctaacgagctgatggcccatgcatattccaagttgtacaacattccgtctaccggcctgcgcttcttcacggtatatggccctgctggccgtccggatatggcttacttcggtttcaccaacaagctggtgaagagcgaaaccatcaagatcttcaactacggcaactgtaagcgtgacttcacttatgtggatgacatcgtggaaggtgttgtccgtgtaatgaagaaggctccggataagaagaacggcgaggacggcctgccgattccgccgtatgcagtttataacatcggcaaccagaacccggaaaacctgctggatttcgtacagattctgagcgaagagctggtacgtgcaaaggtgctgccggaagattatgacttcgaggctcacaaggaactggttccgatgcagccgggtgacgtgcctgtgacctacgccgataccagtgctttggagcgtgacttcggatataaaccttcgaccagcctgcggactggcctgcggaagttcgctgaatggtatgcagaattttataagtaagaaagaataggaaaccaagtagatgaagtgtgttgaggtttataaggaattataccaccaggaaccgtatggcgtggctttctgcccgtaccgtattagcccgctgggagctcacattgatcatcagtatggcaagatcaatggtctggcaatcgataagggcatccacatggcataccacccgaaacagaatggcgttgtggaattgcagtcgctgaatttcccgaaacgtgcgcagttctttgtgagtgctgtgccagaagaaaagcaaggagactgggctgaccatctgcgtggtgcagcaaagatgctgggtgagaaatatcgactgaaagttggtctttctggaatcattgaaggcagtttgccgattggtggtctatcctcttcggcagcggttattatctgtttcttgtctgcgctgtgcaaagtcaacggtattcatctggaaccgatggaaatgatcctgaccgcaaaggcggcagaaaaccagtatgtgggtgtttcctgtggcaagcttgatcagagttgcgaagtcctttccaagaagaatcatctactttacctcgacacgaaggatgatggctatgagttgattccgaccagtgagaagatgaaaccttataaagtggcaatcttcttctccggtttggaacgctccttgaagaattccaaatacaatctgcggcaggatgaatgcaaggctgcggcttatgcgctgatgggttatgcgggaatggattatgatacctttgccaatacccgcctgcgggatgtgccgtttgaagtatttgaaagctataaggatcgtctgccggaactgtggcggcgcagagcagaacactattatagtgagtttgcccgtgcagaaaagggtgcggagttgtggcgcgaaggtgatctggaaggctatggtcagcttgtttttgaaagcggcaagtcctcgatttacagctatgagtgtggatgcgatgaactgaaaaagctgtatgagattatggcagataccgatggtatctatggtggtcgtttctctggtgctggcttcaagggctgctgcatggcattgattgatccggtcaaagcggaagagattgaggcaaaggtcggaacagagtatctgaaagcattcccggaactggaaggaaagtacagtttccacctgtgcgagagtgcggatggtgtggaactatgaaactgacttcggtacatcatattgcaattatcgtttctgacgttgaaaaagcaaaagagttctatgttcagaagctgggctttgaggtgattcggggaaattaccgggaagcgcgtgatgactggaagctggatcttcgagtagatgaacacacagaacttgagatttttgcagaaaagaaccctccccaaagagtgaatcatccagaagcctgtgggctgcggcatctagcatttcgagtaggaagtgtagacgagacggttaaagaactggaatcgctggggatagagtacgaaccagttcggcttgatacctacacgggagaaaaaatgacatttttctgtgacccggatggactgccgatagaaatacatgagtgaggatcacatagatgaaatgtttgattttagcagcgggatatgccacacggctttatccgctgacagagaattttccgaagccgcttctgaaggttggcgagaaatccattctcgactggctcgtggacgatttggtgaaaaccactgatattgatgaatttgtggtgatttctaatcataagttcgcacagcattttgaggactggaagaacaataagaaaaaaggtcgtccttataaaatcacggtgctcgatgatggtaccagcacaaacgaaactcgtttgggtgctgtcaaggatattcagcttgcagttgaaacgctgaatatttccgatgatctgctggtcatggctggcgataacgtgctggactttagcctttccacctttgtgaactttgcaaaggagaaagaaacttcctgcgtgatgtgccacgaagaaaatgaactgaaaaaacagcagaaaacggcaattatcacagtggatgataataacctgattacatcctatgaggaaaagccgcaggagccgaaaggcaatttggcggttccgccgttctattgttatcgcagtgcggatgtaaaacgcattcagaaagcactggataatggctgcggttatgatgcaccgggcagctttgccgcatggctgagcaaacaaactccgatgcacgcctataagatgccgggtaaacggtacgatattggcgacattaacagctatgagtatgtgaaaagcgtgttctcaaagtgaaagctacgcagggtatataagcgtgaataaaaagaggatggaaaaatgagagaatttaaagacttaaaaatagcagtggccggcacaggttacgttggcctttccattgctacgctgctgagccagcaccatcatgttacagctgtggatatcatcccggagaaggttgagctgatcaacaaccggaggtctccgattcaagatgaatatatcgagaagtacctggaagagaaagaacttgacctgaccgcaaccctggatgcaaaggaagcatactctgatgcagatttcgtggtcattgctgcgccaacaaattacgatagtaagaagaatttctttgacacaagtgcagtcgaagcggtcatcaagctggtgattgagtataacccggaagccgttatggttatcaagagcacaatcccggttggctacacggcatctgttcgtgagaagttccactgcgacaatatcatcttcagcccggagtttctgcgtgagagcaaagccctctacgataatctgtatccttcccgtatcattgtcggcaccgatgtggaaaatgcacgactggttaaggctgcatacacctttgcagagctactccaggaaggagcaattaaggaaaacattgacacgttgtttatgggcttcaccgaagcagaagctgtcaaactttttgcgaatacttatctggcactgcgagtgtcctactttaacgagctggatacttacgctgagatgaaaggcttgaatacacagcagattatcaatggtgtttgtcttgatcctcgtattggcagtcattataacaaccccagcttcggctacggtgggtattgcctgcccaaggacaccaagcagttgcttgcaaattatgccgatgtaccggagaatttgattgaagcaattgtggagagcaatagaactcgtaaggacttcatcgctgatcgtgtactggaaattgctggtgcgtatgaggcaaatgatagctgggatgagagtaaggaaaaggaagttgttgttggtgtttatcgcctgaccatgaagagcaacagtgacaacttccgccagagttctatccagggtgttatgaagcgcatcaaggcaaagggagcaacggtcattatctatgagccgactttgaaggacggagagactttctttggtagtgttgtggttaatgatctggcaaagttcaaggaaatgagccacgccattattgcaaaccggtatagtaaagatcttgatgatgtgaaagaaaaggtttatacgcgggatattttccagcgtgattaaacataaaaaagaaaaccctagggaggaactagtgtatgaaagcagttattttagcaggaggttttggcacaagaatttcggaggagtccgaatttaaaccgaagccgatgattgaaattggcggtatgccgattctgtggcatattatgaaaacctattcgcactatggaattaacgaatttgttatctgcgctggatataagcagcatgtgattaaagaatggtttgcagattatttcctacacacttcggatattacctttgactttacgcaaggaaataaaatgattgttcacgatcaacatgcggaaccgtggaaagtaactattgttgacactggattgaatactatgactggcggtcgtgtaaagcgtattcagaaatttgttggtaacgagccgttctgtctgacctatggcgatgcagtgtcggatgttgatatcggaaagctgattgagttccacaagagccatggtaaatgtgtgacactgacttctgttagcttggcacagcagaaaggcgtattgaatattgatgctaacgatacgattactgcattccgagagaaagacaatgaagacggctcgttgattaatggcggctttatggtatgcaatccggaagtttttagctatttggaaggtgactggaccgtttttgaacaggatccgatgaaaaatcttgcaaaatcaggcgaactgaagagtttctatcatgatggattctggcagtgcatggatacaaagcgagaaaaggataaactggaagcattgtgggctgcagatagagctccttggaaagtgtgggaagaataatgagttttgatttgagcttttacaaagggaaaaaagtattcgtaacaggacatactggattcaagggttcttggctgtgtaagattctcgcaaatgcgggagcgattgtgaccggctattcgctcaatcctccgacagagccttcgttatttgaaattgccaatatcaagcaggatgttcattctgtgattggagacattcgggactataaagtattaaaggcagcttttgatgaggcacagcctgaaatcgtgctgcatttggcagcacagcctattgttcgtgacagctataaagatcctgcttatacatatgaaacgaacgtaatgggtacggtgaatattctggaatgtgttcgtactagtaattgcgtaaaatcttttttgaacgtaacaaccgataaagtttacctgaataaagaatgggcatggggctaccgtgaaaatgaggaattggacgggtatgacccgtattctaattccaaatcatgctcggagcttgtcacgcactcttataaaaatagctttttctccgataatcatgttgccatctccactgctcgtgcgggtaatgtgattggcggcggcgattttgctaatgaccgtattattccggactgcattcgtgctgcaatcaagcatgaagatattgtagtgcgaaatccgttctctactcgtccttatcagcatgtactggaaccgctgtatgcttatctcatgattgcggcgatgcagtatcagaatgtcaaatatgctggctattataatgttggtcctgatgatgttgactgcttccagacaggagccttggttgacctgttcgtgagcaagtggggcgatggcatgaagtggatcaatcactatgacggtggccctcatgaggccaatttcctgaagctcgattgttcaaagttgaagacaacctttggatggaaaccgcattggaatctcgacactgccattgagatggtagtggagtggagcaagtgctgggttgaaggtggagatatccgggcttgcatggataaagaaattaaagcttttttgtgttcagaaaaggtatgagtattactcaagcaattcattttttcaaggaagaaatgaatcatgaacagatattcccggaaaaaggattgggaacagaatgctttcagtttgcatctactttgatgccggttgtaaatgtggatctgttaattacaaatgagaagcatgaaatattgctttcttggagagatgacccacattgcggaacgggttggcatataccaggtggttgtattcgactgatggaaacaacagcggaccggttgcaaaaaacagcgttatctgagattggtgcaaaggtgcttgcggaatctgaaccaatcaaggtttatgaaatcttttcgaggaatcatcgtgaaggaatagaagatcaacgggaacgagctcattttattacgcttgtttataaatgcaaggtgcaaagggaatattctattcccgaggaaaaagcaattcaaggaaaagtgggttcattgcaatggtttgacgatttaccggataacttgttgcaatctcagaactgctatcgtaaagactggaatattataaaaaagaaacttttggaggactaaataatggctatttggaagaatgaggcagaagcccgcgagcagatcaaagcgatggtagcggaatactaccatgattttaaggaaaaaaagaccccgtatcaggagggggatagaatcacctatgcagcgcgtgtctttgacgaaaaggaaatgtgcgcactgactgacgcaacactggacttctggctgaccaccggccgctttgccgaccagtttgagaaagagtttgccaagtggattggcgtccgttttgcacatctggtcaacagtggctcttctgcaaacttgattgcctttatgacgctgacggctccggagctgggcgaccgccagattaagaaaggcgatgaaatcattacggttgcctgcggattccccacaacggtcacaccggctatccagtacggtgctgtgcctgtctttgtggatgtcactgtcccgcagtacaacattgacgtgaccaagctggaagctgcgctctccccgaaaacaaaggcagtcatgattgcccatacactgggcaacccgtttgacttgtccgcagtcaaggcgttctgcgatgcacataacctgtggctggtcgaggacaactgcgatgcgctgggcacccagtacaccattaacggggaaaccaagttcaccggcacatggggtgatatcggcacatccagcttctatccgccgcaccacatgacgatgggtgagggcggctgcgtctacaccaacaatccgcagctgaaccgcttgatcctgtcttaccgcgactggggccgcgactgcatctgcccctccggtcaggataacttctgcggccaccgctttgacggccagttcggtgagctgcccaagggctatgaccataagtatgtgtacagccacttcggttacaacctgaaagtgaccgatatgcaggcagcgattggctgcgagcagctgaaaaaattccccacgtttattgagcgccgccgccacaactgggaccgcctgcgcgccgcactggagccggtggccgataagctgattctgccggagcctgcagcaaacagccgcccgtcttggttcggattcctgatttccgtcaagccggaaagctgtctggaccgcaacgccgtgacccgctatgtggaaagccacaatgtgcagacccgtctgctgttcagcggcaacctgatcaagcacccctgctttgaccagatgcgcggcacggacgcataccgcgtggtgggtgagctgaccaatactgattttattatgaacaacacattctgggttggcgtttaccccggtatgaccgatgaaatgattgactatatggcaaaaacaattattgaggcagttaatcagtaagacggctgaggaggacgattaaatgaaacagcgtttggctgactatgtagcagattttctggcggcgcatggtgtaacagatgtgttctccgttgtgggcggcggagcaatgcacctgaatgatgcgctgggccataatccacggctgcacgttacctataatcaccatgagcaggcttgcgctattgcggcggaggcttatgcacgtctggaaaataaaatcgccgcagtatgcgtcacaaccggccccggcggtaccaatgcgctgacgggcgttctgggcggttggctggattctatcccgatgtttattgtttcggggcaggtccgctatgatactacggcgaggtatgccctgcagtacaccggtacgccgctgcgcgctatgggtgatcaggaatacgacatcaccaagtctgtgcagtatatgaccaaatttgccgccatgctggaaaatcctgcggatatccgctatctgctggaaaaggcgtggcatctggcaaccaccgggcgtcccggcccagtgtggctggatattccggtcaactatcagggcagttatattgaaacggatgatctgcgcggctatgacccggcagaagatgatgcacagctgcccccgccggtggatgatgcgatgattcagaccgttcttgaaaaaatcaagaatgccaaacggccggttttccatgcgggttacggaatccgcctgtccggcggctatgcggcgttccgtgcggtggctgaaaagctgaacattccgattgttacctactggaacgcagtggacctgattgaagatgacaacccgctgtattgcgggcgcgcgggcaacatgggcgaccggcccggcaactgggccatccagaatgcggacctgattcttgcggtgggcacccgtatctccatccgtcaggtgggctataactggaaaacttgggcccgcgccgcagaagttattatggtggacatcgatcaggcggagctgaaaaagcccaccctgcacgttgaaatgccggtttgggccgatgcaaaggactttttgacaaagctggacaaagcggccgttgcccccgtgaatgcgggcggcgagtggcttgcaacctgccagcgctggaaaaaagagtaccctgcggttctgccccgccagtgggaggaaaacggcgagacagccaatgtctatgcgtttgtccgatacctgagtagccgcctgccggaaaacagcctgacagcggtgtccaacggcgcttgctgtgtggtaggcaatcaggcgtatgtcatccagaaaggcagccgcatggccaataacagcgctgttgccagcatgggttacggcctgccggccgctatcggcacttgcatcggcggcggccgccggaccacgatctgtctggaaggcgatggttctattatgatgaacctgcaggaattacagaccgttctgacaaaccgccttccgattaagattttcctgatcaacaataacggctaccactccattcgcttgacgcagaacaacctcttcaaagagcactgcaaagttggtatcggcccagagagcggggacctgtctttcccggagtttgaaaagatcgccaaggcgttcggctacccgtattatagtgcgcacagcaacgccgagatgaagcaggttgtggatgaagtgcttgcactggacgggccggtgttctgcgagattttcaccgatacaaagcaggtttgggagccgaagagcagcaccaaacgcctgccggacggcacactggtcagccccccgctggaagatctggcaccgttcctgccgcgtgaggaattggcggcgcagatgtttatcccgatgatgccggaagagtgaggaaagctatgaaacgtgcaattataacaggtgcaactggtgcagtgggaacggccttaataaaggaattgatctcgcataatattgaagttctagtattttgtcgggaaggctcaaagcgaaatgttcaaatcccttcgcatgaacttgtcacaataaagtattgtgcgctgaatgaattagagacagtgcaaaatgatacagggaagaattatgatgtgttttatcattttgcatgggcgggaactactggagcagctagaaatgacatgtacctgcaaaaccaaaatgtccgctatgcgctggatgccgtggcagcggcaaaacggtttggttgccagctattcattggtgcaggaagtcaagctgaatatggtcgagttgaaggacttttaaggccggatacgcctacgttcccggagatgggttatggcattggaaagctgtgcgcaggccaaatgacacgcgagtatgcacatcaactggggatggaacatatctgggtgcggattttgagcgtatacggtcctaatgatggcacacagagcatggttatgtctaccattcttaaattgaaaaatggcgaagtgcccgaatttacaaagggagagcaactgtgggattatctatacagcggggatgcagcaaatgcgttccgccttcttggggaaaaaggatgtgatggtaaggtatatgttttaggtagcggaaaagctcgaccgcttgcagaatatataaaagatataaaaaattctgtaaacgcaaaagcggaaattgcgcttggtgcgattccatatgggaaaaaacaagttatgcacttgcaagcggacgtaacgcagcttaaacaagatacgggatgggaaaatataacatcctttagagagggcattagacgcatcattgaacaggagaattttttgtgaatgtattctatttttcgagcgatctattcgcaaatgtggcggcaacatcaatggtatcattgatggagaataataagtcgtgcgatttaattcatttttatttagtggacgatggaattaaaaatgaaacaaaaaaacagcttataacgttgatatcgagatatcatcgagaaattgattttatcccggcccctgatccgtgcgaaatatttcagtacccatttaaggacaaataccaaatgggacactcttatgtgagaatgtgcatcggtcaactgctcccacaatcagttgaccgtgtattgtgtttggatagtgatacacttgttcttgatgatttatcagaactgtggaatatggatatgggtgataatattctggcaggtgttgcagattgtatgaatctgaaagcttattctagccagtttggattatcaaacaatcaaatctattgcaatgcgggtgtttttcttgttgatttaaagaaatggagagcacagaaggtagaagatagaattaaaaatgttattcaaacaaaaaatggaaatgtatttttctttgagcagacattaatgaactactgctgccgaggaaagatagcaaaattacacccgagatataatacatatacgcttttttatgccttcgattatgagaatttgttgcgttggagaaacccgacatctttttacacataccaagaagttttggaggcaaaggaagagccggcaattattcactttacaaggaatttttatatgctaagtcgtccgtggatagagggctgtgatcatccgcttacaaataaatattgcgattacaagaaaaagacaccgtggccaatgctaggtagtgataataggtcgagaaaacagattgcacgatataaattatggcatcttattccgcaaaagttgctatgtgatatggcaaatattgtttacaacaacattagaccgcaattatggtggaaaaacgagtgactttcaacttatttgtgccttctgataagtgataactaaaacagttttacgttatacgataattttagtatataataaaagaatactgcaataaaatggagaaacataggtgaaagataaatatttattaacgatttccatcccgacctataacggtagtaaaacaatctcaaagatgctagatgtgttattgccgcaatgtgatgcacgagtccaagttctaatttctgataatgcatcaacagataacacaaaatcagttattgagagttatcgttccacatatccaatgattaaatatatccgtaatgatagaaatattggacctgattcaaatttccttcagtgcttagaactggcagaaggaaaatatacattacttttgtctgacgatgatattctaatggaaaataaactttcgcttatattgtcatttttgaacaataatgagagtatgtcgctggtttatttaaatgcaaaaggcttccatgaaacatacaaaaatgaactggaatgtgaattctattcgggagcaatatatgataattccatgttcgttactacagataaagtccaatttatgaattatgcagggcgaatgtggggattcctatcttgtttcatttgcctaactgatgcttttaggagcatcggtaattgcgatcagtttaaaaagacaaattggttgcaaagctatatacacatcctttgttctgactatggaaacagaaatctcggagtgattagtgttccatgtattggagcgggcatttatagcataatatccaacttcgattcgggaagggtggatggaatcacctacaaagaaatgttgaaatttgcggtgaaacacggatacagcaaaaaacagttagataaattattcgtttggagaatttgttttatctttaaaagaacaataataaaggaacgagctgcaggattacataaatcatcaataaaaaatgtgcttaaatgtacatggatgtatccgaaggtttgggtgcagttatatccttttttcttggttcccccttttgcatgtagaaaaatcgtgagtataaacaatagattgaagggctaccaacataaagcagaggttaaccgcaagggcgatgttataggataaaatttatgaatgaagtctagtacgctgtgaggaaatatgcaatcagtaataacgattttttttattgcattaatgatacttattagtgctatatctgaaaaaagttggtctaatccactaactatattttgcggcatgtggttcgcgatttgtttcttggcagagttgaaactttttggaatgtatgactattctgaaaatgtgttcttaattgtgctacttggaaacattggctttttttgcggatatatgcttgcaaaaaagacaaaagtaagttcgcggtatgaattttctgcaattggaatcagtaataaatatttataccagtataatactaaaattataatggcatttctctgggctgcgatagcgatttatttgctgatgtccatacaggttttggggttgcttcttgctggttttgatacggcaacaatccgggaatcctatagagaaaccggaacgactacagtaagtggaatggcgttaactgcaatttttggttcaacgctagtaaaacaattggaattgtatatagcccagccagtaatgagagcagcaataccaatatttgctattgaaatcacaggtaaaggtaagatgacgccgttagcaacgatggctttggctgttgcgggactttacactttttcaaaatttggcagatttgctttactgtatattattgcagatgttattctatgctattttattattggaaaaaatattgatcgtagaacaaagaaaaaaattaaaagagttgtcctattaggcatagtgggaatctgcctagttttggtttatttatctgtttataggtgggaaaacgaaactttttcatacgcacaatcgatttatggctatttttcaattccaatacctctacttgatttttggacaaagagaatagatgctgtaaacgcgtactcttttggcaattcatatgtattaggatttatgggctttgtaacgagagtccttaaacgtgtgggcatttctttgccagcgtatgcgacggcaactctttataattataatttagttgattcatttgtttatatattccctggacaaaaatataacgcctatgtaagtatgttttttgctttttatcttgactttagagaaattggagtctttgcaggaacgctgattttcggctatatagtagaaaaatcttataaaaaagcaaaaacaaagagagtggagtatttagctttttatttgttgttgattcaatgtattgtgaagtcatttgtgcgatgggaatttgtccttgaacaatattggctttctttccttatattaagactatggtttaaaaaagagagggtagatgaatctgatgtatgataaagctgtattaaaagcattagaaaacttaaatttggaaagaatttatcttacagaaagtagcgcatatcgaaatggacagagactagagagattcaaaaaggcgtttccaaagcatatattttcgtttgtattaaaatatcttagaaataaagaaatcaaaaagaaagttgatagtatctcaaactatataccccctgagaatgttaaatatgcagacccagcaccagaagggttgacgggtgttgcatatacatgtattacagacggctatgatgtacctaaaaatccgttgtatattgatccatgtttggattatattttatttacaaatagcagtacggatgatttggaaaaaacaaatatatggaagtcaagaatgatagataaagtcgctgtttcgcctcaaaacaatagtgcaaacagattttataaatttcatccattcgaattgttccacgaatataacttttctatatatattgatggcaatgtccaattgatatcagatacctcttcactatttgcagtggcaagaaattcgaagtcgggtattgcaatgcatagacatgctaccatgaactgtgcttataaaaatgctttgtggtgcgagtataatcatcgaggaaatatttctgccataaggaaacaaaccgaaaagtatcataaagaaggatttccagaggacttcggattattggaggcaacaatcatagttgtggatttacataatgaaaatgcaagaaaaatcatggatgaatggtggaaggaattttgtataacaggaggcggacgagatcaaatatctttaccttatgtattgtggaaaaatggatatagcatagatgatattggaaatctaggaaatgatgagtatcataatcctaaatttcgaattgttgcacataaaggcgatttgttttgaataaaaagttatggcggacattaacatcacataaaaataaaatgttgtgatagcgggttgtgtgattgtataatgagattggatataggtgaatgtcatgaagctgaatcggtatataaggcaaccttggttaattccaattgcccttcaaaataaagggctaggaattgttattccagattctgtttttttgagaagtgcatattatagttcttttggaaataaattgaatctaaaagagccaaagacctttaatgaaaaactacagtggttaaaactcaatgatagaaaaatgatttatactactatggtagataaatatgctgtcaaagagtatgtagcaaacataataggtgaaaaatacgttatacctacttttggagtttggaacaagtttgatgaaatagatttctctacattgccacgcacttttgtactaaaatgtacgcatgatagtgggggagtagtgatttgtaaagaccagtcgaattttgattttaaaaaagcacgcaagaaactaaccgaaaatttacataaggattactatttaaatggacgtgaatggccttatagaaatgtgaaacatagaataattgcagaacagtatattgacgataatcttcaggattataagatattttgctttaatgggaaaccacggatgacgcttgtttgcagcgatcgtttcacaaagaatggactaaaagaagatttctatgatgaaaattggaatcatttagaacttcaaagaccggctcatggcaacacagatcatgaaatcaagtgtccatgtcaatatgaattgatgaaagaattggcagccaagttggctgaaaatattccatttgtaagaattgatttttatgaacataagaatagagtatattttggcgaaatgacattctatccggcaagtggatttgaaggatttaatccatctgaatgggacgaaaaacttggagaatggataaaactacctaagtaagacatagaataatcagagatagtagaacagaaaaaacaatatttaactgaaggtaaactgattcaatattgtagcagattaagcgatcccgatcctagatgagattagataaaaatactagtttatgaaggatggtaatatgagagagaaacgattgctgtataatacggcatcatcattgttatatcagataatgacaataatatgcgggtttattttgccaaggctaatattaaatgcgttcggctcagaggttaatggcttagtaaactcaatatcgcaatttttggggataatctcttttctggaattgggagtgggcgccgttgtacagtccgcattgtataaaccactggcagaaaaacgaatcgaagatgtcagtaagataattgcatcagccaataagttctttactcgaattggacaaatattactgatttatgtaacgtttctggtcgtgtgttatcccttctttgcggggagacagttcggatttgtttatacagcaactttgattattgcgatatcgattagttcatttgctcagtatttccttggaatagtaaatagacttttgcttgtggcggatcagagagggtatattcaatatattgctcaaactgtagcggtaatttgcaataccgcggcatgcttcattttgatattgataggatgcaatattcaaattgtaaagctaacaacatcactaatatatttattacagcctttccttgttcatttgtatgtaaaaaggcactatattattgataaaaaaataagctatgcaaaagaacctattccgcagaaatggaatggcatagcgcagcatattgcggcggttgtcttagatggaacagatacgatagttttgacattgtttgcaagtctatctgacgtttcgatttattccgtctattttcttgttgttaagggcgttaaacaattatttatgtcaatgacgaatgggattacctcattgattggagaattgtgggcaaaacaagaactagatacattaaagactacattttcgtggactgaatgggttattcatacgggaactacttttgtatttggtgttacatcagtacttatagttccgtttgtgagagtgtacacgctaggcattgatgatgcaaattatattcaaccactatttgccgcgttgattgttgcagcgaatgctggacattgtctgcggcttccatataatattatgatattagcggcgggtcactataaacaaacgcagaataattacataattgcggctgctattaacgttgttgtgtcggttcttgctgtcaaggcgtgggggttgataggagttgctgtaggtacacttctcgctatgggatatcagacagtttggatggcatggtatgattcaaaaaatcttatccattggccgttttctagttttttgaagcagatggcggttgatattgttacagttgtactatgcgctattgcaagtcagagattctcgatgatgacggtaagctattttgggtgggtaatcaatgcaatcgaagtggccatcgtatggcttattataatgataactattaacctaatattttataaagataaggtaatgaaacttgttggtggcttgaaaaataaaatagtgcgatgattggaaaacaatttgaactctataaagtgtaaatattaaggtaaacaatgcaatctcagtaaatgtatcttcaagaaaatgtcagaaagctctcgctataaggatgacttgttcttgaatctgtgatatacttggacaaactggctcagagtttggggccatgggagaacgtggctctttttctatatatgagtgttcaataagccactgaatgaaaacaatagatgtaaatatttattgggagctaccgtgcataaaatagaccaatgtaattggctggtatttgcattattatgcttgacagaatggagaagaaaatggataatttagcnnnnnnnnnnnnnnnnnnnnnnnnnnnnnnnnnnnnnnnnnnnnnnnnnnnnnnnnnnnnnnnnnnnnnnnnnnnnnnnnnnnnnnnnnnnnnnnnnnnnaagcaagcaagcaagcaagcaagcaagcaagcaagcaagcaagcaagcaagcaagcaagtggatatttcacttttgagaataacggcaacaatagccgttgtttttttgcatactaataacacgctttcaaacaatagtgagcagttctttttgacaaaaaatcaaatagcgttttttacaacgaacaatcttttgatgaattgggctgttccagttttcctgatgattacaggtgcattacttcttgaccctaatcgacagattacatacggcgattgtattagaaaatatgtgaagagaattctactggcgttgtttgtatttggcatcccgttctcgatgttagagattctacttaatacaagatcaataacaattaaaagtgttttggaagcgactataaatgtgattaatggaaacagctggagtcatttgtggtatttgtatgcgttaataggattgtattttgttcttccaatgttaaaagcattcgtgaataattcggatgagaaaacacttctttatttaataagcatagtatttatcttcaacttcgttgtaaagtcggttgataaaattttaggagcaacaattgcttttgaaattcctattgctggatttgctgttttctatgtattagcgggaagatatattacgattataaaatcttggcttttagataaaaagcatttttgcattggtgtgattgtctttgcaattgttgttgttgcgattggaagtatatgctattatcccaaaagcaaggaattcctcggatataattctccaatgattgcagtgctttcgattgctgttttttgcctttttatgggtgttaaatcagataagatagattttatttggaagatagatagactgtgttttggcgtatatttgatacatccggtattcattaattttgtgtataaatttctgaaaatcacgccagtaacatttgacactttttatccggcaatgacattcgtgttctggattatttttgtgatagtctctttcgtaggagtttggattatgtaccaaatacccattcttaaaaaatatatcttataaggattgaatacaatatcacttatgaccaataggtcgaataatgtaatcttcaaaaaatatcagaaaaacttcactacagggctgacttgctctcggatctgtgatatactgagtttaacaacgccactatgggggccacgggaaatcgtggctctcagtctacctcatcttcttcttcatcgtccctaggcccgctccaacctatgtacacttctttggcgtcatcaagtccaaaccagtcgatacgttgtccacaactatcgcagaaaaactggtattcacggtcaataattcctttgcagcgaggacacggtgcgtatgcagtctcgtctttatagatgtgaaccttggtaacgcgcataggccagcggtaggtaggggatagaagcagttcaaggatgatggtggatagcttgaaatccggattccagttatcgtcgaaccaatcgtatttacttttcattttgattttacctccattgtgtgttgtgtgaatcatcgtgtgttgggataacacaatggtagggtaaaatctgacggctgtacatgagtacagcctacgctgctcgaaactttgcacacctcttcgtggtgggcagcaggcaacacatcagaatgtggctaagatgcagaggaaaaataatagggaaaaatcatgtgtgatatcaaaatgaagcctcaagctgaaaagaaatcacagtctaggctgatgcggccgttaattggaattattgtagttgctgtgcttgtcttgggtgttgccgcttttattgttcacctgtcttcacctcagataccatcgttaataacagcggatgggatgctgtcgtatattggctctggtatatcgtccgtggctacgattcttctagcagtgatagcttataaacaaacggaacgagcaaatcaaatggcagacaaattagcacagcaatctaatctgtttgcggagcaggcgaatgaactgtccaaacaagcaaataatgcagcaaaaaaggccaatgacttagcagaagaatcttataaggttgcacagaaatctaatgatcttgcagcacagtccaacgaggcagcaaagcaatcaaacaaattggcggaactatcgcttcaagcgacccaacaagcaaataaattaacgaaacaagcgaatgaaatgtctgagcgtgtattgaaacttgaagaagagcaatccaaagtggaaattaggccatttttccttgtgactgactgggaaggatgcaaaggtattccagcagaatttgaagataaacgccgaacgattgcctatcaggttggttcggataacgcggggagtcgagtggcattaatcttagaactgacaaacacaacacaatcgtatgaagtttttcgctatcatggcgcaatgagttcaagcggagaacggtggaggatatgtgtgagtaatcgtaatggcacgtctcttggcatcccggcagaagaaagtcgaagagtttgtttctatgcaggaagctctttcttttctggcatagagggtaaaacacttaattttgagtttattttagaaaatcgttttggtgaacgctataaggaatcttttgatgtggttgttattagattcgactgggatcgaaaggactgcaatattagcccacaaaagtatgaaatacaagcctttacgaaagactgtggacttgtaccgggttagtattgattgcgcaatttcagagtgctatactaaaaccacaatacagaatagaaaggttgatatcttatggccagaaccaaaggcagcaaaaagcgtcccaagaacaccacagactatgcattccagattgcagagaagcaagaatctattacttccatgactgctgaaatcacgtctattaccgccaatatcgacacactgaaagctgacctgaaagagaagaagactgctctcaagtcggcccagaaagaactgacgaagctggaatccaagaaagctactgccgatcagaaagccgccgaggcagcgaagaagaacgaagcggaaaatctcgtgaaaaagctgctggcaaagggtgtcagtgctgacgatattatcgagaagttaaagtaataagatgccgtgtggacaaactgaacttcagaagttcacacggcgttttttgaagatttctatatagtttataacgaaaataaaagaaacggagtgtgagaataatgaacttatcaaaaatacatcatattgcaatcattgtatctgactacgaggcagcaaaggatttctatgtgaacaagttgggattctctgttatccgagaaaattatcgcccggagcgtaaggactggaagctggatctgcgtgtcaatgaacacacggaactggagcttttcgcagaggaaaatccgccgaagcgtgtgaaccgcccggaagcctgtgggttgcgtcaccttgcattttgtgtagagagtgtggagcagacggtgaaagatctggcggaagttggcattgaatgtgagccgatccgtggggatgattataccggcaagaagatgactttcttccatgacccggatggattgccgctggaactgcatgagtaaatgaagaaaacaagaaagcccggcggtggccggaagaagttgaagccagagtacgatgccgggaaaaatctgaaagagcagatgggtgctgctgtggcgctttatgattctgagatatccttgcaggccatcggcgatgcgctgaacttaaaccctatcaaagtccggaagctcctcatcacagccggtgtgtatgaatcggaagtggcggagaaggtacaagatacatttgaggagtaccgagaaacacaagactacaaaacctccatactctcaaccgtaaaggcgcttaacctttccaaagcctcggttacctcctacctgccatataataaaggtgtgtacttcccaagtacagcagaaaaagagaagatcagtgtcggagcagagcggcagcggagatacagagctgtcaagcaactgcaaaaagaacgaacagaggagaacctctggaatgctgttgtggtatatgctagtgtgaagttctggacttattccggattgccttttacttacgaactgcataggggaagaaacggcacattcacaagagaaatatggatcgactgccgagaaactagtaaaagtctggcatggagttcggtactgcttgcttttgaaaaggtgaagggcgggaggataaaagtagagagacccaaggcactgggcgatatccggggagtgacatacatttatagtctgtttctgagatttggacttattgaggcggcgggaactgccaaggatcagagacccaagaaataaaaataccgcctgtggataatgaaccacagacggtaagaatcattacagcttattcaagaaatcttccaatacgccattccacttttcagggtattctcagggtattcatagaacattaggtgtccacccatgacgtaggtgttatagccgggtagttgtgtttctacgaaaggctttgcgatatcctgccagtgttctgcgatgaacatcaggctcggcattgtcgagccgacatcttttgccgtttccagatagttggatttcaatcccttacggtctgaaaaacttttctatgccctcaagcggttctggctgtatccgctgagtaacttccgcctgcacggctttgatggcggcccatgatttttcacgaatgccggaaagatgttcatttccagtcgaggtcataagctgcgcaacggtatcaatattgttcttatttagattgctcagaagctgggtgggtaagtttagaagtccgactggcgagtttgggaacaaaagctcaccggacatgattctgtacttgtactgattttcgctgagtcgctttgctattgctttttcatactcatctatgcagcatggattccttgtggttcgtagtttcctaagtgtaattgccagcccagttcttttaagactgaaagtacgattgaaagaacgattgatttcgttactgatttgcgtgagtgttttattgtttttgtagtaatcgattaagactttcgtaatcataacttttatggcaggagaaggtgtggaagactcagaagttgcaatcagagatattagatagtctgcatattcaacgtctgactttgtctggggcaggagaaaatcgtctttcgcaagtgtcgataaatctttgaagaaggactcaggatattttcggcctttggttttgggttttggttcctttttcttgcgcacctttggggtctttcccaaattttgtgtaaagtccagacagctataaaacaagagcaattttaatatgaggcggcagacggcgaaaccggctgtcgccttaacaacaacataacgccggcaagggggaatgtcaagggcggcgaagccgttcatatacccttgacattcctccgcagcaggtgttaatccggcatacgctcagcgaaatagatggacaactgcgcatggatgcggctccagtcctgccgccgacccgtccactttttcgtaatatccatcatcgccagatacagcattttcagcagactgtcgtccgtcgggaaaacgctcttggattttgtgaccttccgcagctgccggttaaagccttcgatcgtgttcgtggtatagatcagacggcggacttcctgaagatatttgaagtaggtgctgagattagcccagttttcccgccacgactttgagatcttgggatatttgttgtcccagttctgcgcgaaagtctccaaagcgtccagagcggcctgctcgtccactgctgcatacacggctttcagatcggacatgagagccttcaggtctttgtaagaaacgtatttgctggaattccgcagctggtgaatcatgcagttctgaatctccgtttccgggaacactgcacggatggctgtgtcgaagccagtcaaattgtctgtacatgcgatgaaaatatcctctacgccccgattcctcagaccattcagtacggtcgcccagaactttgcgctctcattctcgccgacccacatgcccagaacatctttgcggccgtccagattaaggccgatggcaatgtatactgctttctttacaatctgcccttcactacggacatggtagtggatcgcatccagaaaaactacggcatagatcgattccagaggccgctgctgccattctttcgccacaggcaggatcttatccgtgatccggcttaccgtagtgtcagacacagacagcccgtagatatcctgaatatgcgcctcaatgtcgccggtcgtcatgcctttcgcatacatggacaggatcttctcttcgatatcctgactgatgctggtctgattctttttcagaagctgcggttcaaactcaccttttcggtcacggggaacagaaacctcgacatcgccgaaacttgtccgcagatttttgctgctgtggccgttccggctgttgtccgtagctttgttcttgtagtcgtatttgctgtaaccaagatcctcatccagttcagcctccagaccattctccatgaattcggcaatggtttccttgaacaagtcctgaatgtcgtccatgctgtcgatattcgccatctgcagcaattcacggatctttgctctgcgggctttttcttccgggcttcgattctttcgggacat

SEQ ID NO: 417 - DNA, 16988 bp, unidentified
  source 1..16988: mol_type = unassigned DNA
tcagtttacctcctccagggctccggccggaatccggatcagaaaccgggtcccccggcccggctcggattccaccgaaatggttccgctgaatttttcctccacggtggcctttacgccgtaaagtcccactccgcggaagatgtttcctgttttataatcaaatttggtggagtagcccattttaaagatattgggcagatggcgggcggagatcccgggcccgtcgtcggaaacggaaaattcatactgcccgtcttttaaatgctccacgatctggatggtcccccgtctggctccggcttcaatggcttcgatggcgttgttgaccagatttttcaatacagccatcagctcatagtgctctctggtgatgaagttgtcagagcactggaaaaccagacggatatggacgggcctggtttcaaggatgtgataggtggtggcctccaggatctggagaaggtcctggaagctcatctgcttttcgtcgtactcctcggagatctcctgctcgatgccctggatgatgcggatatagtcttttttgatctcatggacgtcccgggcaatggacagggacatttttttcatgtcgtcgggcacgtccatggccgacagccgctcataaagccggtatgcattgctcatgacagattcgatctcttcggagtttttcttcataaaatagatctcgtttttcagccctgtggtcataagaaacagccgccggtaacggttttcatgctcctccttttttaacagggtccggtactggctctccgccgccaggaacagacaggcaagcagagtacgaaaagcggccaccaggatcagatatccggccatggaggaggaaagagtcccggaacggccgctttcaaagatacagacctccagcagattggacagcaggtcgcagatgaacaccgacgggaacagccgccggtaggagacagtgggcttgctggggacaaggacggaaaaaagcagtccatagcagagatagaaaatggagttggtggccagctgtcccgccgtttccggggaggaggagaggccgctggctgccagaaagaggcggaaaaggaataccaccgccgccgttgtcaccgtgatccggatcgtagagatgctttttccgatggtcataaggaggatcgggagaaggatcacggcaggggagatccggaagccggatacaaatacgttccagtaaagctgggatgccagggccacgatggtcccggtcagaagactgcgtttccattcattcatgcatttttcccccttgtttttctcatccttcaatgtcatgatacgttaagaaaagtcaaaagtcaatgaacccggcttaagaatcttttgcgggaactgggaaaaatgtacgaaaataaagccggaatctttatttttttgttgtaagaaacgatggattcgattataatggaagcataaaacgcaatcactatatcgtgtttaagaaagaggaggttattgggacatgaaaccatatcgtgaaatgtcaaaagaggagcttgcttccttaaaggagcagcttactgctgtttacaaagagtatcaggggaaaaatttaagccttaatatggcccgcggaaagccaagcccggaccagttagatctgtctcttccgatgctggatgttttaaacagcaagagcgatttcatgaccgctgacggcgatgtgagaaactacggtgttctgaccggtatccaggaagcaaaggaattaatgggcggaatgatggacgctcccgctgagaacgtgatcatgtacggaagcgccagccttactttaatgtacgataccgtatcccgttcctatacccacggcgtaatgggaaatacgccctggtgcaggctggacaaggtgaaattcctctgcccggttcccggctatgacagacactttgccattacccagttcttcggcatcgaaatgatcaatatcccgctccatgaggacggcccggatatggatctggtagagcagtatgtaaacaacgacgaggctgtaaagggaatctggtgcgtaccgctttactccaacccgtccggccagtgctactctgacgaggtcgttaaacgctttgcaaacttaaaaccggctgcaaaggatttccgtatttactgggataacgcttactgcgtacatcacctgtatccggatcatccgtgccacgttctggatatcctttccgagtgtgaaaaggctggaaacccggatatggtatataaattcggctccaccgcaaaggtcaccttcccgggcgccggaatttctgccatcgctacctccaaggctaacatcgaggatatcaagaagcagatgaataaccagctgatcagccacgataagatcaaccagctccgtcatgtacgtttcttcaagaacttagacggcatcaaggcccatatggcgaagcacgccgagctccttcgtcccagattcgaggctgtggacgagatcttaaacagagagctggcaggccttgagatcggtcagtggaccaagccccagggcggatacttcgtatcctttgatgctttagacggctgcgccaaggcgatcgttgcaaagtgtaaagaggcaggcgttgtgatgacaggcgcaggcgcgaccttcccgtatggtaaggatccccacgactccaacatccgtatcgctccgtccttcccgtccttagaggacttaaagttggctgcagagatcttctgtgtatgcgtgaagttagtgagcatcgacaaattactggaggcgtaagcgtcagcacgctggataaaattttatatttttcttctttttgggactgggccttagattttgggcccagtccctttactttttggccgggctataataaaatgagggaagatttttgaagacaagatccaagatatgggagaagaaaatgaaacatataaagaaagaatcggatggaacggccggaagccggaatcatgggaccgtccgggagggagcggcgtatctggtctttggagtccttacgaccctcattgactatgtgatctccaacggcctgttttatctggcccatatggacccggtgcctgcccagtccattgcctgggcggcggcagtgctctttgcctttgtgactaataagtggtgggtgtttggaagccataccctggagcccagggccgtatggggggaatttacctccttcgtcctgtgccggatcgccacctttttatttaatctggccgccattttcatcatggtggatatcctaaaaatggaatttttcatctgcaagctggccatttccgtggtggtggtggttttaaactacgtgctcagcaagctggtgatctttacccataaaaattaacggacagaaaaaggagtgcctggagtcatggaaccaaacagcagaaaaagatcgaccctgatccggccgggagacgggctggtcattgcattttttgttccggtggtcattatgatcatcatttttatccagagagggatcttcccctttggtgaggagagctttttacggacggacatgtaccatcagtatgcgccgttcttctcggaattccagcataagctgcggaccggaggcagtcttttgtacagctgggatgtggggatgggagtcaattttgcggccctttatgcctattacctggccagccccttaaactggctggtgatcctgtgccccaaggcgtatatcatcgagtttatgaccggcatgatcgttgtaaagatcggtctttcgggcctgagcttcgcctggtatctgagaaagcactgccatacagaaacggctgcggttggatatttcgggatcttttatgccctttccggctatatggctgcgtacagctggaatatcatgtggctggactgcatcatcctgttcccgctgatcgttcttggactggagcggctggtgaaggacgggaatggatttttttactgcatcacactggggctttccatcctttccaactattatatttccatcatgacctgcctgttcatggtgctgtattttattgcccttctgatcctggagaagccagggcccataaaaaaatacgtgatggcctgcgtccggttcgggctcttttccctgatcgccggagggctggcggcccttgtgcttctgccggaggtggccgttttaaagagcacggcttcgggaaatatgaattttccaaagacccttacgtcctatttcccgatctttgacatgctggcccgtcacatcggcaatgtggagacggagacgggactggaccactggcccaatatttactgcggcgtggcggtatttttatttttcctgctgtacctggcgtgcaaaaagatctccgcaaaggaaaaaagtgtttactgcggcctgctgctgatcttttttgccagcttctccgtgaacgccctgaattttatctggcacgggctccactatcccaacagcctgccctgccgccagtcgtttatctatattttcctcatgctgtttgtctgcttccgggcgttccagtatttgcgggatattcccaggcgccatgttgccgcggcgttctggggaagcgtctgctttgtgatcctggcggagaagctggtggagcaggagcatttccactttgctgtatattacgtggccatcctcttcctggcggcctatacgggactcatatatttatataagaagagaagaagagagctggcggcgtttctggctctggccctggtggctgtggaggcggccgtcaataccacagtcaccagcgtcaccaccaccagccgggaggcttacaccagggataataaagaggtgcaggctctgatggagaagctggagccggcggaggacttttaccgggtggagaaaaaaacgagaaagacaaaaaatgacggagcatggatgaattttccgtctgtatccctgttttcctccactgcaaacgcagatctgacgaagtttttcaagcgcatgggctgcgaggcctccaccaatgcgtacagcatcactgggagcacccccctggtggacagcctgctgtcggtccgctatgccctgtattcggaatatattccaaatacggatctggtcaattacatccaggagagcggagggacctacctgtatgagaatctgtataccctgcctctgggctttgtccttccttacgatctggcggacaactggcagtatcagatggagaacccggcggaggtgcagaatgatctgtgcctgcttttgggaaccgacgatgtcctggtgccggtggagacagaggtttccggatccgggtgtaccttcaccgctgatatggccggggaatattatgtatatatccagaataaaaaggtaaagaatgtcaaggcatccctgccatcgggagaaaagaatttcagcaatgtggaccggggatacctgttggaaatgggaaatctttctgaggggagtcggatcaccctgacgccgggagagtccggggagacccttacggcagccgtttaccgtttctctcccagggccatgatccaggtttatgaccgcctgtcccagtcgccgctccacctggatgactggagggacacgaagcttacaggaacggtaactgctgcggaatccggtactttgttcctttccatcccctatgatgagggctggaccatcaccatcgacggccagccggcggagggggaaaagatcctggaggcattcctgtctgttccggtggaagcggggacccacgagatctccttaacctacatgcccggaggacttattccaggagtggtcatttccggggcctccgcggcggtactggtccttttatggatcgtaaaacgccgccgtccaagccgggccggggtataactgccccgccgtccggatgccggtccatcgaaaaaaaccgccgcataccagatacgcggcggtttttttcagtattaatatcaatatggaaaggggaaggaaggcccctgaatcccgtatttaatcgttgggctcacagttttcccaaagctcgttcagttccatggtcatattgatccctccttagaatcaagacattcattcctgggaagcggtggatccgaagccgcgttcctgttgtttttctcatgggcatactataacactcccggctttcgttgtaaaatgtttaattttttgatataatgttaataactattaacattttgggcagggggaggctgtatatgacattcctggagatcgaagcattcttaaagataacagaaacgggcagcttttctgccgccgccgaggccctttacgtgacccagccggctctggggcgcaggatccgcgccatggaggaggagctgggatatcctctttttgtccgtgggaagggcctcagaaaggtggagctgacccgccagggccatgccttcatcgggatcgcccaccggtggcaggccctgtggaacgagacccgggaggcggcgcttttagcgccgtccagaaacttttatgtggccagcgtggggagcctgctggcgttcatgcttcccaccgtgttccgcacctttatgaaggagaatccggaatgcagcctccacgtatcgacccttcactccagcgaggcttattcctatgtgggcaaccggtccgtggacatagcctttatcacagatcccatttattcttcttcagtcggaacccatatcctttttaaggagaagctctgcctggtggcgggaaaggagctgaacctgccggagcatgtgaggatccgggagctggatccgcagctggagatccgcaccatgtgggaccggaattttgaagcctggcacagctatttttttggagataaagccattcccaggatgtatctggacgagatgggatttcttcagtactttacccagagcggggataactgggcgtttcttcccatctccatcgccagaacggtcttaagggatgcgccggtgtccatccataccctggatgtggagcctccaagccggaccctttattacctggaccggctggatgaccgctcaccgtaccaggagcaccttttaaggctctgcagacagaagctgtcccaggaagaggggatccgggtggaggaggaataaaaaagaaagacggagcagaaaaaaatggccgccctggaagctggaacagctcccggaacggccattgaaattttatgaggttcaggatggatgcagcgtttctggtccttaccgtttattgctgcgtctccagatgtgcattttttccgcctcggcaatgagctcgtcgcggaactggggatgggcgatggagatgatggcttcagccctctgccaggtggacaggccctttaagttcaccatgccgtactccgttaccaggtgatgggtattggcacgggtgtctgtaacgatggagcccggatttaaggtgggaaggatccgggattttaactggccgtcctttgtcttaaaggtggaggagcagcagatgaagctctttccgcccttggaaaggtatgcgcccagaacgaaatccagctgtccgccggcgccgctgatgtgcttgatccctgcggattcggcatttacctgtccgaacagatccaggtccacggcgttgttgatggacatgaagttatccagggcagagatggtgcggatgtcgttggtgtagcttacgggagcagacatacattccggattccggttcagatagtcgtacagcttttttgtacctgcgccgaagccgtagacctggcggcctttatcgatatttttctttgcgccggtgatctttccggccatggcgatatcgacgaaggcatccacatacatttctgtatggacgcccagatcctttaagtcagattttgcgatcagggagccgacggcgttgggcattccgccgatgcctaactgtaagcaggcgccgtcggggatctcgtttacgatcagctttgccacggcctcgtccacctctgtggcgggggctccggccatttccgggatagaaggattatcgccctctacaatcatatctactttggagatgtggatgccttcttcagttccgccgtagcagaccggcatattttcattgacctccacgatcacggtcctggaagtctcgcagacagcagccaggtgggatgcgttggggccgaagttaaagaagccgtgctcgtccatgggggctgcctggaagatggccacatccggacggttttcttcggacatatcccggtagaagcggggcagctccgaatagcgcatggggccatagaaggcaaagccctgggcaatggcctttctctcgatgccgctcatatgccaggagttccaggtgaagtggtcagccgggttttcgatcttgaagatctcggggacccacatgaggatgccgccgcggaagttgacgttataaagctccggaagcctcttggcgatctccgcgtctactgccacaggggtgctggtagtccaggcgtaatcgacccagtcgccggattttacggtttttgccgcttcgctggcggacacaagcttgtcctgatacatttttctgatatccatggtttaggacctcatttcttttatgatattctttcgctgtccggagccagaaacccgggcagaatttttattcatttttcattttagcattttctaaatggacggtcaataatttcacgaaattataaaaaaagaaggctgaatgtttataaaaaatacatgaaaaaccatgcttgttatttgacaggccaattatttggtgatatgattatgatacatcatattgtcgggggatacgggctttttccggcctccggcgatggtataatgaggaggaaaatcatatggcaaagaaaatcgtactggcaggtgcatgccgtacagccatcggcacaatgggaggcgctttaagcactgtaccggcggctgatctgggcgcggttgtgatcagggaggccttaaagagagccggtgtggctcccgaccaggtggaccaggtctacatgggctgtgtgatccaggccggacagggacagaacgtggcccgtcaggcttccatcaatgcaggacttcccatcgaggttccggcagttaccattaacgtggtatgcggctctggcttacagagcgtcaacatggcagcccagatgatcgaggcaggcgatgcagatatcgtcgttgccggcggctgcgagaacatgtccctggctccctatgcgatgatgaagggccgctacggctaccgcatgggcaatgccgagctggtggatacgatggtaaacgacgcgttatgggatgcgttcaaccactaccacatgggaatcactgccgaaaatatctgcgaccagtggggactcacaagagaagagctggacaagttcgccatggtgagccagaacaagtgcgaggctgcccagaaggcaggcgcatttaaggatgagatcgttccggtggaggtaaaaacaaagaaagccaccatccttgtagatacggacgagggtcccagagcaggctccaatatggaggctcttggaaagctgcgtccggcgtttaagaaagacggtatggtgaccgcaggcaacgcctccggcatcaacgacggtgcagcagccgttgtggtgatgagcgaggagaaggcgaaggagctgggcgttactcccatggccacatgggtagccggagctcttgcaggcgttgagccccgtatcatgggcatcggtcccgtggcagccacgaagaaggtaatggcaaaggctggaatggagatcggcgattttgacgtgatcgaggccaacgaggcatttgccgcccagtctgtggcagtaggaaaagagcttggttttgatctggaaaaattaaatcccaacggcggagccattgccctgggccatccagtcggtgcatccggctgccgtatcctggtgaccctgctccacgaaatgcagaagatggatgcaaagacaggtcttgcaacgctctgcatcggcggcggcatgggctgcgccaccatcgtaaagagggattgatcttaaactgagcaggaggcgaccggaatgagctttgttacatacgagcaggacggctatgttggcgtgatcaccatcaaccgcccggaagctttgaatgcgttaaatgtccaggtattaaaggacctggatgctgtgatcgacaatatcaatctggatgagacaagggccgtcatcgtgaccggagccggggagaaggcctttgtggccggagccgacattgcggccatgagcactatgaccgtaaaggaaggccgtgaattcggaaaattcggaaacgatatcttcaggaagctggaaacgcttccgatccccaccattgcggctgtcaatggatttgcccttggcggcggcaacgagctggccatgagctgtgacatccgctactgctccgacaatgcagtgttcgggcagccggaggtgggcctggggatcaccccgggctttggagggacccagcgccttgtgagagtcgttgggaccggaaaggcaaaagaaatggtattcaccggccagaacatcaaagccgatgaagcatacaggatcggcctggtaaacggcgtataccccagagaggagctgatgccggcagtcatgaagctggcacagaagatcgcgtccaacgcgcccattgccgtgagaaacagcaagcgtgcggtgacggacgggttcctctcggatctggaccatgccatcgccatagaggagcagtatttctccgagtgcttcgagacagaggaccagagagagggaatgaaggcttttcttgaaaaacggaaggttgaaaaattcaacaaccggtaatggtgggggagctcccccataaacgtaaggaggcagaatcatgaaggttggtgtgattggagccggaaccatgggttccgggatcgcacaggcatttgcccagacagagggctatgaagtaatgctctgcgatatcaatgagacgtttgctgcaaatggtaaaaataaaatcgcaaaagggtttgaaaaaaggatcgccaaggggaagatgacccaggaggacgcagataagatccttgcaaagatcaccacaggtgtaaaggatatctgcggagactgtgatctgatcgtggaggctgccattgaaaatatggagatcaagaagcagaccttcagagagctggacgcgatctgcaagccggagtgtatcttcgctaccaatacctcttccctgtccatcacagagatcggagcaggcattaaccgccatgtggtgggaatgcatttctttaacccggctccggtgatgaagctggtggaggtcattgcgggactgaatacggctcccgaagcggttgaggcggtaaagaagatctctgaggagatcggaaaaacgccggtacaggtggaggaggccgccggtttcgtcgtaaaccggatcctgatcccaatgatcaatgaggccatcggcatttacgccgaaggcgttgcgtctgtggaaggcatcgatacagccatgaagctgggcgcaaaccatcccatgggccccctggccctgggcgacctgatcggcctggacgtggtcctggctatcatgaacgttctggaaacagaaacaggagatcccaaataccgtccccatccgcttcttaagaagatggtgcgcggaggccttctgggacagaagaccggcaagggattttatgactattcccgctaggaattaccgggaaggaaaacgggtccagcccgcggggattcccacgggccggactgtatgtctgggaacatagagaggatgccgcatccacattctcttatgttatatatgatacaattcacaaggaggaactaaaaacatggattttacattaagtaaagagcatgagatggcgagaacattattccatgatttcgctgaaaaagaagttaagcctctcgctcaggaagttgacgagacagagcatttcccgagagagaccgttgaaaaaatggctaagaacggtttcctgggaattccggttccgaaggaatacggcggacagggctgcgacccgctctgctatgcaatgtgcgtagaggagctgtccaaggtatgcggtaccacaggcgttatcgtttccgcacatacctctctttgctgtgatccgatccagacctacggtacagaagagcagaagcagaaatatctggttccgctggcaaagggcgagaagttaggcgcattcggcttaactgagccgggcgctggtacagacgcccagggtcagcagacaaaggctgttctggacggcgacgagtgggtattaaacggctccaagatctttatcacaaacggtaaagaggctgacgtttatgtgatcatcgccgttacaggcatggttgagaagagaggcagaatgcagaaggagatctccgcattcctggtggaaaaaggaactccgggcttcagcttcggtacaaaagagaagaagatgggtatcagaggatccgctacatacgagctgatctttacagactgccgcattccgaaggaaaacatgttaggaaagcagggcgagggcttcaagatcgccatgcatactcttgacggcggacgtatcggtatcgctgcccaggctcttggccttgcagagggcgctctggagagaaccatcgagtatgtaaaggaaagaaagcagttcggccgcgcaatcggtcagttccagaatacacagttccagcttgctgatatggcgacaaaggtacaggccgcacagtacatggtataccgcgcagccgttgcaaaggcaacacagaagacatattctgttgaagcagctatggcaaaactgtatgcagcagaggttgctatggaagtaacaaccaaggctgtccagctccacggtggttatggctacatcagagagtacgacgtagagcgcatgatgcgcgatgcgaagatcacagagatctatgagggtaccagcgaagttcagagaatggtaatctccagcgctctgttaaaataagatctgacagcacgaaaaaaaccggaaaataaacgaataattaaggagtgaaatacagtgaaagtagttgtttgtattaaacaggtgccggatactaagggcggcgtaaagtttaaaccagatggaactcttgacagagcagcaatgctcacaatcatgaacccggatgataaggcaggtctggaggcagctctccgcttaaaggaccagtatggtgcagaggttacagttgttaccatgggtcttccgaaggctgaggaggttcttcgtgaggctatggctatgggcgctgataacggtatcctcgttacagaccgtgtgctcggcggtgcagacacatgggccacatcccagactctggcaggcgctttaagaaacctggattacgatctgatcatcacgggccgtcaggcgatcgatggagataccgcacaggttggaccgcagatctccgagcatcttgggatcccggtaatcagctatgcacaggagatccagatcgacggcgattctgtgatcgtaaaacgtcagtatgatgacagatatcatatgttaaaagcaaagatgccgtgtctgatcacagcactttctgaattaaatgagccgcgttacatgactccgggcggaatctttgacgcatataagaaggacatcactgtatggggcagaaacgacttaaaggacgttctggactccaacctgggtctgaagggatccccgactcagatcgcaaaggcatctgacaaggtaagaaagggcgccggtgaaaaggtcgttctggatccgacagcttctgtaaattatattgtggacaaacttacagagaagcacgtgctgtaagatacagctacgtcaaaaagcgaattcatagaataaagaaagtggtgaacagtaatgaacttggaagaatataagggtgtatatgtctttgcgcagcaggttgataacgaagtgagcagcatcgctttggagctgatcggcaaaggtaaagacttagcaaaagatttaaatactactgtaacagcagttttagtaggttccaacgtaatgggactgactgagatccttggcgagtacggcgctgacagagtcatcgttgtagatgatccggaattaaaagagtacagaactgagccctatacccatgctctgtcctctgtgatcgagaagtacaaaccggacgtattcctgatcggtgcaacagccatcggccgtgaccttggtccccgtgtctgcgcacgcatccatacaggtctgaccgctgactgtacacagctggatatcggcgatttcccgctggttcccacaccgggcaaggagcagaagcacaaccagcttcttatgacccgtccggcattcggcggaaacaccatcgcaaccatcgcctgcccggaattccgtccgcagatggcaaccgttcgtcccggtgttatgcagaagcttccgcgtgaggctggaagaaaggccgagatcgaagagttcaatcccggatttgttcccaacgagaaatacgttgagatcatggaagtcgttaaggctgtttccaacgttgccgatatcatggatgcaaagatccttgtttccggcggccgcggcgtaggaagcccggagaacttcaagatcctcgacgagctggctgaggccatcggcggcaccgtaagctgctcccgtgcagttgtagacgctggctggaagccgaaggatcttcaggttggacagactggtaagactgttcgtccccatgtttactttgccatcggtatctccggagccatccagcacgtggctggtatggaagagtccgacatcatcattgccatcaacaaagatgagtctgctccgatcttcgacgttgccgattacggcgtagtaggcgacctgaacaagatcgttccggttcttacccagaagatcaaagaagcaaaagcagcagctggcaaataagagcgaagctgaaacataaaatctgatcagaataaacaaccacatgtggaacggaagtacaatcattagaacgggaatacataaaagaggacggaaagacacttagcagaacggaaaaacacagaaaagaacggaagaacaacctttagaacggtatgaccataagaagcctgaccgtgtccagtgaactggccgggagggcttcttttttgtgcagattttttaggaattgagctttcagataaagtggatggatctccatataccgggcaggtgagggatatcccaaaggattgtttgtaaaaaactggggttctggcgggcatgaagaaggcgaggagacggggaaaagaaagggggaaaataattgaaactatttttcagatggaatatactataatatagataacgagcagcggatctcaatatatagaacctcatttgcagcggccagatactaaaaatggggaagtttacaaaggtgaatttcaatcttgtgtatagaggggtaaaagccagaggtggagttgatggggtattgactgttttcgacagttgatgcacaaaagataagaaaggcaggagaaaatgggcattcatgtagcaccgccaattatcaagaacataaaagacagccgggatgctttggatttctttgaaatggtgtccttgcctgccgaagatgagagaacgcaggaaatcatcaggagctttccaacggtgtatattcataactgggaagaagatggcgaatatgaagtttatgtcggtgaatcaaatgatatttttaaaagaacgcgccaacactatgacctgtcatttgacagatcaagatggcagagcaggctggcggaaaaaaacgccagtttgtttatcattggacacgaacattttaataaatcattaacgcttgatatagaaaaccgtttaatgcattatatgatgagcgttgaatgtgtaaaacatttacataatctgcgtgataatccacaggcaagctattatccaatggaagaactggatgaaatctttggtaagatatggaaagggctgcgcaaggaaaacggaatcctgtttccagcagaaagtgcaataaaagattccgcaatatataaggcttcgccgctccataagcttacaaaagaccaggaaagagcgaaagacctgattatcgagaaggttgcaaaagcacgaaagagtggagaagcaaagcagcttatttttattgacggagaggctggtactggaaagacggttctcaacagcagtaccttttatgaattgtattgtatggcagaagaaaataataaggatctgaactgccagcttctggttaaccacgatgagcagattacggtgtacgagcagatagcagaaaaattgggtttgactggaaagtatggaaaggtcgtgagtaaacctactgcatttattaacagccattctgaggacgagcctgtggatgtagcatttgtagatgaagcgcatttgctgcttacacaaggaaagcaatcatatagaggtaaaaatcagctaaaagatattatcgacagagcacgggtgacgatcgtaatgtttgatgaaaaccaaatccttacagcagagcagttttgggaagcgcagatccttgaagggtttcgaaatcaggcaaaacgatcgggcaatcacatcgtgctggataagcagcttcgtatgcaggtcgatgaagaaaccatggactggatcgatgcttttacaaagagaagagaattgaagaagatcccaaggataataggcggatatagcatcaaaatttttgatgaaccagaattgctcgatctggagatccagaaaagggctaaagagagtgattctatgctgtcaaggatcatagcaacgtatgattgggaatatagttccggccgtaagccagaagaccggctaatgaaatattgggaggtgttcataggaaactggcataaaccatggaacagggaattagaggcggatctttcgagacaggaaaaagaagattaa

SEQ ID NO: 418 - DNA, 18689 bp, unidentified
  source 1..18689: mol_type = unassigned DNA
atgaattttaccgcacccgcctttgtgctgggtctgccgctggtggtactgctgcaccgccttttgccgccccgcgcacgctgggtactgctgcttgcagccagccttgggttttatgcgcttggcagtccgaaggccctgccgctgctggcgtgcattacgctggaaacctacgctgcagcgctggccatcggccgctgtaaaagccgggtcggcagaaagctttggctctgctgtgcggcaatgctctgtctgggctgccttggcgttttcaaatacgccggtcttttcggcacgggggcctcgcttttgctgcctgcgggcatctccttctacacctttcagacgctcggctatgtcatagatgtataccgcggccgactggcaccggagcgccatccgggttactacgccctgtttgtcagcttttttccccagcttgtggccggacctattgagcgcagcaccgatcttttgccgcagctgcgcgaccctgcccgccggacggacagcgggggatggctgtatatcctgcgcggcttttgcaaaaagctgctgctggccgacacggcggcggtctttatagacaccgtctacgcagcccccggcgcagcgtccggccccgctgccatactggccaccgtattgtttgctgggcagatctattgggatttttccggctattcggatattgcggtgggggctgccgccctgctgggtgtgcggctgagccgcaattttgaccatccctatcaggccgtatcgctgcgcgatttctggcaccggtggcatatcagcctgacccgctggtttaccgattatctttacattccgctgggcggctcgcgctgcgcgctgaacacgctgacggtctttcttttgagcggtctgtggcacggtgcctcgcttcattttgtggtctggggcggtgtccacggtctgctgctgctcgccgagaagcggatttttcccactgacagtcaggggcgcgttgcacctgcccgccgcctgctgacccttgcagcggtctgcctcgcatgggtattcttccgggctgcctcggtttccgatgcgctgaccctgttctctcgtctgccctgcggatgggagccggcctctgtgcgcacggcggtgctcaccctcggtctgcagccagccgcccagctggtgctgggggcgctctgtctgcgccttctgcctgaaaagccactcgatgtccccacgccgggcggtgttctggcgttttgcctgctcacgctggcagtcgcggccgcatggtttgcagcgctgcatgcggggacagccaacgcctttatctatttccaattctgaacggtattccgtaacgcttatgaagaaaatcatcgcatttatgctgggtgtttttatcgccgtaccgctgcttctggcggtgtggggctttgccctgcctgcacagtacagcagcacctttttgggggagctgcccgccaagcgcaccctgctggcagccgaaagcaataagccccgtctgatccttgtgggcggcagcgctgcagcctttggggtagacagcaccctgcttgccaaagagcttccggactaccaccctgtaaattttggcctgtatgccgcgctcggcacccgggtgatgctcgatttgtccatacatgaattgcgggcaggggatattgtcatcgtcatgccggagcagcagcaacaggctctgtcggacacggtgggggtcaccgccctctggcaggccgttgacggggacttttcggcgctgggctgcctgcatgcccgcgactttgggccgatgctcgggtcatttccacggtttgccgccgccaagttccgttattttttgaccggcgcaccggagacggacggcatctaccggcgcgacagcttcaacgctgccggtgatctggccagcccgctctgcaaggccaacatcatgcccgagggctatgaccccacgatgccaatacggtttgacaccgcactgcccgaggccgcgttctgcgccgcactcaatgactacaccgcccgggcggccgatgccggggctatggtctattaccattttccgcccatgaacgcgcttgccgtggcaaatgaagatcagctcaatgcctatgccgcgcatcttcagcaggttattgccgcaccgctggccggggacccccgcgcctgcgtgatggagtccggctggttctatgatacgaattttcatctcaacgcagcggggcggacggtttttacaaagcagcttatccgggacattaaggcaatgctgggggacaccaccgcaacagaaatagccctgcccgccatgccggagccggccgcaagcaccgccgcaggcagcggcagcagcacggatgccgcatacttcacaatggcggaggatggttctgtgaccgtgaacgcggcaggccgcgcccgccgcaggctgaccgtccccgctgagataaacggcagggcagtcacaaggctctgcgccgagaccttccgcggctgcactgcgctggaggaagtcacgatacagtccgccgtcaccgccctgccggacggcctttttgccgactgcccggcactgcataccatcattctgacccagccagaccccgcccggctgcaggtggggcaggaccttctggccgatgcccccgctgcctgccgaatccagctgcccgacggcagctacacagcctactgcctgcagtattcctggtctgcctacgctgaaagattttgcacatagtaccgcacattcaggcgctgtcttgaattgtggctgatgacatgctataataaacccatatactgtaagccagcacagttcaatattggccgctgccttacggaaaattcgcaactgcggagtataactgctatgaaaaaatacaagatcgtggtggccgggaccggctatgtggggctttcgattgccacactgctttcccagcaccatcatgtgacggcggtggatatcctgccggaaaaggtcgcattgatcaatgcgcgcaaatcgccgattcaggatgattatattgaaaagtatctggctgagaaggagctggatctgaccgccacgctggacgcaaaggcagcctacgccgatgcagactttgtggtcatcgctgcacccaccaactacgacagccagacccagcactttgacacctctgccgtggaggcggtcatccgccttgtcatggaggtcaacccaaacgccgtcatggtcatcaaatcaacgatcccggtcggctacacggtgtcggtgcgggaaaagttcggcagcaggaacatcctgttcagcccggaatttctgcgggagtccaaggccctgtatgacaacctctacccgtcccgcatcatcgttggcaccgaccctgaggatgcgcaccttgtcgcagccgcccacgagtttgcggcgctgctgcaggagggggccatcaaggaaaatatcgacaccctttttatggggtttaccgaagccgaggccgtcaagctgtttgccaacacctatctggcactgcgcgttgcctacttcaatgagctggatacctacgcagagagcaagggtctgaatacaaagcagatcattgacggcgtatgccttgacccgcgcatcggcagccattacaataaccccagcttcggctacggcggctactgcctgcccaaggacaccaagcagctgctggcaaactacgccgacgtgccggaaaatcttatcgaggccattgtggagtccaaccgcacccgcaaggacttcatcgccgaccgcgtactgaagctggccgggtactacggctacgatcaggaaaacgagtttgacgaaagccgcgaaaagcccgtcaccatcggcgtctaccgcctgacgatgaagagcaacagcgacaacttccgccaaagctcgattcagggcgtcatgaaacgcatcaaggccaagggcgcacaggtcatcatctatgagcctacgctggaggacggcaagaccttcttcggctcggcagtagtcaacgacttggacaaattcaagcggcagagtcaggccattctggccaaccgctacgatgcctgcctcgacgatgtgcaggacaaggtctacacaagggatctgtttggcagagactgaaccgcctttctagcgccttttggcagttgagtaaggctcactacgccattaccgcacagtatccttctgacttttcttgtaacttaaaaaaaggggaacacctgttgtatgaaatatgattatctggtagtcggctccggtctgtacggcgccatctttgctcatgaggccaaggcccacgggaaaactgtgctggtcgtggataagcgccccaacattgcgggcaatatctacaccgagcgcatcgagggcatccatgtccacaaatacggtgcgcatatcttccacaccaacaacaaaaaggtatggaactacatcacccaatttgccgagttcaaccgctttacaaactctcccgttgccaactacaagggcgagctttactcgctgcccttcaatatgtataccttcaataagatgtggggcgttgtaacgccggaggaggcagccgcaaagatcgaggagcagcgccgtgagatcacccacgagccgcagaaccttgaggagcaggccatctcccttgtgggccgcgacatttatgaaaagctcatcaagggctacaccgaaaagcagtggggccgcgactgcaaggatctgcctgcttttatcatcaagcgcctgcctgtgcggctgacctttgacaacaactactttaacgccttgtatcagggcattcccatcggcggctatacgaagatgattgccaacctgctcgacggcatcgaggtgcggctgaacacagattacctcgaaaacaaagccgcgctggacgcaatggctgacaagatcgtctacaccggccccattgatgcctactttgactacaagctcggcacgctggaataccgctccgttcggtttgagaatgagctgctcgacaagcccagctttcagggcaatgccgccgtcaactacaccgaccgtgagaccccgtggacccgcatcattgagcataaatggttcgagttcggcaaggacgagaacggcaacgacctgcccaaaacgattatcagccgcgagtattcctccgagtggaaacccggcgatgagccgtactaccccgtcaacgatgccaaaaacggcgcactgtatgccgagtacaaaaagctggccgaggccgagccgaaggttatcttcggcggccgtctgggtgagtataagtactacgacatggatcaggttatcgccgccgtgctggaccgctgtgagagcgagctgcactaaagcacagccaagcgaaagcacaaaatgcaaacggcagcaaagtaaaccccgaaacagcctttggggcctgctttgctgccttttttatttgctcaatccgctggcgccgcttgctataacgccgccgtccataataatgtctgctccggccaggaagcccagacgctcatccagaagcagagcaaacaaagcggcgatttcttccggcttgccgttgcgcttgagcgcggagtattttttgaacacatccgcctgctcgctttccagtgcacccatcggcgtgttgggccagcgcaaaacagctttcacgggcggaaacatcacagctgaacgcctcagcctcaccgcccgcactgcgcagatcgttgactgccttttccagcttggacgccgtgcgccccaccaaaatcgtgtaatacccttcttcacagacaagcttagctgtagcaagccccatgccgctgccgccgcccgtgatgacgcatacctttttcatcatgtacaacctcttttttctttgtcagtgcagggaatccagcgcgtgaagatagcactcccactgctggtcattcatttgcagaagcttgcagatcgtcagcatcagcggctttgccgacctgctgctggacgaggaggtcaccccagaggagcagcgcgaatatctgcaaatcatccgcgatgagagcaggcggctggcgcagctttccggcagcgtgctgctattgaatcgtatcgaggcacagaccattctgaccgactgtacagacttttcgctggatgagcagctgcgccagtgcatccttgtgacccggcaaaagtggcgcgataagccactgcagtttgaggccgaactggccccctgcacctaccacggcagcgaagcactggtaaaggagatctggttgaatctgctggataatgccgctaagttcagcccggagaacggaaccatcagcgtaacgctgcaccgcgagcagggcagcccggttgtggctgtcactgaccagggctgcggtatagacgctgaaacctgccgccatatctttgagcagttctatcagggggacaccagccatcggacgcagggcaacggcttagggcttgccatggcacaaaaaatagccgccctgcacggcggcgctgtcactgtagacagccgccccggcagcggcagctgctttacggtagctttgaaataaatatggtataaggtcggttcaaatcagcccatgggctgtgcagtattgccagataccatcctccgccacgcttgggcatactgcatcggccagcgccttgagctcgggggaggcattcgccatcgccacgccggtgccgaccgcctccagcatttcccggtcattgttgccatcaccgaaggcaagcgcctgacttttgtcaagaccatagtaggccagcacctttttgataccgatgcccttgccgccatcggccgggatgacatccaccgcacggtcccaccaggctgcgatcttagccccgctcacaccctgcagaatagcagggtagtccttggcgcggcagcccagcataagctggtaaaccggctggcggcataccgcatcaaagtcagcggtcaggtcaggcttttcgttcgcaatggcaaaatagtctgccaaatcagtgtcggtgccgttcgcagctatgcggtcccgggtggccgccgccaccggacggccaagcgatgccgcattctggattaggcgctgcagatcagcgccgttgatcgggcggctgtagatcgtatcagcccccgcatagcataaagagccgttgaaggtcagataggcgtcaaattctgccccgccgaaatccggcagcgttaccggcgcgcgccctgtggcaatgcacaggcggataccgttggcccgcaggcggtggagtgcttccaccgtgcagggggagatgtgcttggactgcatgtcgatcagtgtgccgtctatatcaaaaaagatgatcttgatttgctgcatacgggcttttcctttctgtgccgggtgtgttttttccagtataccataaaagctgcacacaggccatcaaatttcccgcaggatcacagcacaatcccgccaaaaaagcgccgtcccttgccaaaagggacagcgcacggtctgggctgtacagcagcccaacatatttattataccattttctgcccggagcggcaagattgaaactgcacaaatctttcgctgcatcgttggcatatctgcgaatagacgaattccaagggctgtggtatagtatagtcacagaaagaaaacagccggagataaggagcagacaactccaagggaagctgattttccaaggagaaattccataggaaatctccaaagaaagcaagacgccggcggtatttcgtaaggaaggaggctcaagtccaatggcaaactttaaagatcctattcatcaccggcgggcctgggcctgctgaatgaaaaagcgccgcatccgaagccgcaggtcataacctgaacaaaacatattgaacgagatgtcaggcagcttacttttaaacagcagactcaggggccgtccacaaagacccccacgcaacatatagatcaggatgaaagaaggctggttatcatgactggttccacgccacccaacagaggttatctgaaatccacctgatccataaggagaaactccaatgtactaagtgtcagaggttgatcctcaatctcaaagcctgaaattctgcaaagggaatgattccccatgaaaataggaaccaactccgaaaaataatgaataaaggttatgaggctatgactccaatcatttaggtactgccggggcgaacggaaagttcgccccggttttgtttgtgccacaatctccggttcatgtacagcgtactcaagcgcacagccttgcattttcttccggattttgttactattgatataagtatgattattaacaggattaaaggagataaatctgcatgagcgtaaaaacggtttcatcgcaggctgatgctgccaacccgcttggttatgaaaaggagggcaagctgcttgtcggctttgccattccctgcattatctcgatgctggtgacggcactgtacaacattgttgaccagatctttatcgggcagggtgtgggcctgctgggcaatgctgccaccaacattgcgtttccgctctcgattgcctgcacagccattgcgctgctgctcggcatcggcagtgcgacgaatttcagcctccagctgggtgccggcaatgaaaagcgctctgctgaatatgcaggcaacggcctgtgcctgatggcgctgttcggcaccgtgctgatggcggtcacactgctttttctgacgccaatgctgaaattcttcggcgcgacgccggatgttttgccctacgcagaggcctacacccgcatcactgcgctggggtttccgttcctcattatgaataccggcatgagcaagctgattctggcagacggcagcccgcgctattctatgatgtcgatgctcatcggcgcgctcatcaatacggtccttgacccgctgctcatctttgggttttctatgggcatgaccggtgctgcgcttgccacgatccttgggcagatcgcatcgttctgcatcagcatgcggtatctcttccattttaaatccgtacctttctcacggagctgctttacgattgacggtgacagaacgcgcaagattttcagctacggtgcctccgcctgctttaaccagattgctatggctgttgtccagatcgttttgaacaacacccttgcacactacggtgctctgtcgatctacggcagcgatattcctctggcctgcgcgggcattatctcaaaggtcaatatgatttttatgtccttcgtcatcggcatttcgcagggtgtgcagccgatcatcggcttcaattacggtgctgcgctctaccgccgcgtcaaaaagagctatctgctggcgctggctgtggctaccggcctttctctggcagcgtttgcctgcttccagcttttcccgcggcagatcatcagtattttcggcaccggcagcgagatgtactaccagttttcggagcggtacttccgcatttatatgttcctgacgctgatcaacggcatccagccggtcacatccaacttcttcaactcgatcggcaaggcgcgcctcggcgtattcatgtccctgacacgccagattttgttcctgctgccgctcatcgtcatcttcccgctttttatgggcattgacggcgtcatgtacgcaggccccattgcggacggtgctgccgccatcgtctgcggctttttcaccgtgcgtgagctgcgggagctgacccgcctgcagcaaaaaatcgaaaaaacgaactaagatactaacaaagcgcccccgcatcactgtgcgggggcgctttgctgtcccgtgacatttttagcacatgggcgatatgacgaaaaaacctgcacctgattggcaaaaaggtagaaagtacaggaaaccacttgaatcgtaccggtttccgcactacaatggaaaccagtaagctaaatcgggtttccgcaggaggcaagtgatggacgaacacaacgagctgcgcacaaggctgtgcgcagtcggaatggagctgttccgcagggatgggctgcgctttacaatgcagcaggccgctgcgatgatgcacatcagcaaaaagacgatctacgcagtttacccctccaaggaggcgctgctgctggatatggtggacgatgcgtttacaaggattcacgcccgcaagcaacgcattcttgacggcccagacaccctggcagaaaagctgcgggcagtcattatcgccctgccggaggagtacaccgcgatggatctgcagcagatggatcttttggatgaaaaatatcccagaatcgcagcgcgcgtgcgggagcatctggaaaccggctgggagcctaccttggcgctgttggagcgggcaatgggggagggcgttatccgccgggtatccctgccggttctgcagcgaatgatctccgcttccattgaggattttcttgcagaccgcgcgctcgatgcacagggcatatcctacacggatgctttggatgagatgatttccattttactggaggggttgttggtacgatgagatacagtctttgcaatcattgggaatttacagagcaatggagcgatgccttctgccggggtgaagctgttgactgccgtccggtgcgcctgccccatacctgccgggagctgccgctccactacgcagacccctctgactatgagatggtctgcggttaccgccgcacactgacttttcccgatgcgccccgggtattcctgcgctttgacggcgccgcccatcaggcagagatctacctgaacggccagccggccgggcagcatcagggcggctacaccggcttcaccatcgaaattaccgaccatgtgcgccgcggcgcagaaaatctgctagccgtgcggctggatacgcgcgaggaccccagcctgccgcccttcggctttgtcatcgactacctgacctacggcggtttataccgggaggtctggctcgagacctcgccgcagagccgtgtgagcgatcttttcgtgcatacaccgactctgaccgaggctgccgtacagctgaccgttgaggcaccggagcaggccgctgcgctgcgcgtccggctctgcagcagtgcgggcgaaacgctggtgagccgccagctgcccccggcagaatcggcggaatgccgtcttatgctgcctgacgccgcgccgtgggacactgagcatccgactctctaccgctgcatagcagagctgctcgatgccgaagggcgggtgctgcacagccgggaaaccgccttcggcttccggacggctgtgttccgggcggacggcttttacctgaacgggaaaaagatctttctgcgcgggctgaaccgccaccaaagctacccctatattggctacgccgcgcccgaaagcctgcagcggcaggatgcccgcatcctgaaaaacgagctgcactgcaacgccgtgcgcacaagccattacccgcaaagccagtattttcttgatgaatgcgaccgtctggggctgcttgtatttaccgagctgcccggctggcagcatatcggcgatgcggcatggaaggaccgcgcctgtgccatgctgcaggagatgctgctgcaaaaccgcaatcaccccagcatcattctgtggggcgtgcgcatcaatgagagcgtggacgatgacgaattctatgcgcgcacaaaccaaattgcccacgcactggacccgagccgggcgacctcgggcgtacggtatctggaaaaaagccaccttctggaggatgtttacgcctacaacgatttctcccacaacggctcaaacgccggtgccaagcggaaaaaggatgtaacgcctgatttgagcaaggcactgctgatctccgaatgcaacggtcacatgtaccccaccaagccctatgacgatgccccgcatcggcaggagcatgccctgcgccatgcgcgtgtgctggacgctgcctacgcagatggagagcacgcgggctgctttggttggtgtatgtttgattatgccacccacaaggatttcggctccggggaccgcatctgctatcacggcgtactggacagcttccgcaatcccaagctggcggcgtctgtctacgcatcgcagggcggggaggagccggtgctgacggtcagctccacgatggacatcggtgactatcccgccgggcagatcggcacggtctatgtgtttaccaatgccgagcaggtggacctttacaaaaacgatgtgtttgtgacgaccctgcacaaaagcggctggacggcgctgccgcacccgccgctggccgtggatgacacgatcggtgtcctgcttgaaacgcaggagcattttgacaaggccaaggccgacacgctgcgcgactgcctgcttgccgccgggcgctacggcttggccgggctgccgctgcgctacaagctgaagctggcgtggtgcatggtgcgctataagctgagctttgcggacggtgtggcgctgtatggcaagtatgtcggcaactggggcggcgcggctacgcgttggcggttcgatgctaaaaacggagataccgtggtaaagagcgtcacgctctgcccctgccaccggctgcatcttgaggtaacgccctccgccactgtcctgcaggagggtgactcctacgatatggccggagttcgggtgcgcatccttgatgaaaacggcagccccgccgtctatgcacagctgccgctgacctttaccataaccggggccgccgcgctggtcggccctgcggcggcaaccgctgagggcggcatgggcgggacttatctgcgcacagtagggcagaccggtacggccgcgctgaccgttttggccccgcagtgtgcgcccgtcaccgtagaatttaccgtcacaaagaaggagtgtgcagtatggaactgacaacaaagcaaaaagcagccttcggcatcggtgcagtgggcaaggatatggtctacgcgctgtctgcctcctatgtcatgtactattatcaggatgtactgggcctgcctgccacctttgtcggcctgattctgatgatcgcgcgtgtgtttgacgccttcaatgatccctttatgggggtgctggtggccaagacccgcacccgctggggacggttccggccgtggattctcagcggcaccgttctgaatgcggtggttctctacgcgctgtttgccgcgcctgtgctggagggcgcgggcatgatggtctacttcagcgtcatctacatcctgtggggcgtcacctacacgatgatggatattccttactggtcaatgatccccgccgtgacccgcaccccggccgaacgagaaaatctgtcggtcgtgggccgcacctgtgcgggcgtcggctcggcgctcattgcgatgtttaccatgctgctggttggcgcccttggcggcgacagcgagcgcgccggtttccgctgggtggcgctgctcgtggccgtcatctttgtagttaccgaggcgatctgctgcgccagcgtcaaggagaccggcagcgccgagataaagaccgccaccgtcggcgagatgttcaaggcgctgttctccaacgatcaggcgcttgtggtcgtaggcagcatcgttttaatcaactcggcgctgtatctgacctccaactttatcatctatttcttcaagtacgatttcggcggcacaggctggaaggccagctacacgttgttctcaaccatcggcggcgcggcgcagattctcggcatgatggttctctatccggtgctgcgcaaaaagctcagcaatactgccgtatttacggtaagtctggggttggcgctgggcggctatgccgtgctgctcctgctctgcctgacaggcctttccggcagtctggcactgctctgcgtgccgggcgtggtggtgtttgcctgcaacggtatgctcagcgtactgacaacccttttcctctccaacagtgtggattacggccagctcaagacggggcgccgtgaggagagcgtcatcttctccatgcagacctttgttgtaaaggctgcatccggcgttgcggtttttctgaccggcatcagtctggatctgatcgggctggccggcaataccgaggagaccggccccatcgctgcccagagcgccggcacactgctcgggctgcggctcatgatgaccgtgctgcctatggccgtccttgcggcggcgcttgtactgttccgccgcaggttcaccctgacggatgaccgcgcagccgaaatcagcgccgcacttcatagggaggaaaaccaaaatggctgagatgcagtggtatgccgcaacagacagcggccggtttgacggcacggcagccatcaccccgcgcagcggtgccgtctgcctgagggcagagctgcccgccggggtgctgcaaaatgctgttgctacgctgccatggacgatggcagacgatgaaaagctcttcatgaacggctaccagacatggaccgcctgcccggagctgggcaaatgggaccggcagcacggtgtggagcatgttccgaaattccttttggagaaatacagctttgaccgttacggcgattatcattttgttccctacagcggcaaaaggggacagagccacggcttttcctactgctatttccggcgcggaaagacctaccggcttttggccagcttggacgaggcaccgggctacacgatcttttcctatgacagccgcgccgcacagctgcgcattgagcgcgactgcgccggggtacagcataccggcggcagctttcctgcgttctccctcttttttgccgagggcaccgaggacgaggtatttgacgcatggtttgcggcgctgggctgccgcccccgcaccacgcgcagactggccgggtattccagctggtataaccgctaccagaatattgatgaggcctcgattcaggaagatctcaacggctgcaaaacgcttttccgcacaggggatctctttcagatcgacgatggctgggagcgcaaggtaggggactggctggagcctgatcctgccaaatttcccaacggactgcgcccgctggcagatgcagcccacaaaagcggctttctggccgggctgtggctggcaccgtttgtctgtgagaaggaatcactgctctgcaaaaatcacccggactggctgctgcaggtggacggtcagccctggtgctgcggctgcaactggagcagcttttatgcgctggacattgaccacccggaggtgcaggcctacctcaagcaggtctttgaccgcgttctgcaggattggggcttcgaccttgtcaagctggactttctctacggcgcagcaccgttcggcaacgcacgggaatcccgcgcaggccggatgcagcgcgccatggcactgctgcgctcatggtgcggcgacaagctgattctcggctgcggcgtgccggtcatgcctgcctttggcatcgttgactattgccgcgttgggtgtgatgtagggctggactgggatgatgtatggtatatgcggcttttccaccgcgagcgggtctctacaaagcagtccatcggcaacacaattttccgccgccagcttaacggacgcgcctacggcagcgaccccgatgtctttttcctgcgtgaggaaaactgcaagctgaccgcacagcaaaagcagaccctggcccgggtcaacgcgctgttcagcggcatcctgctcacctccgatatgcccagccgctatacggatgagatgcgccgccaatacaacgccctgcgagaattgaccgactacgccgaaaactgcaccgtggatgcagacgacggcctgaccgtacactacactttgcacgggaagcagcagacaatcaaaatatcctgacaatcgttaaggcaataccgcataatacaccatgaatagcgaggaatttccatgaagatgcaagaagatgagaactggcggctcaatcaagcgcttgaggacgctgtgcagggcctgcagcaggcccccacgcaggagcagcttgcccataccctgaccgttgtgcgccgcgccatgcaggccggcggacagtggatcgccgccgtggagacaacgcccggcgcgtctgccgcgctgcgccccaaaattgtgcagaccgccgacggcgggcgctggtggtatgccttcacctcgtttgacgagcagatgaaaagccccgatgccgtgaaatccacattctgggctgacatcagcagcctgtttgacgccgcgctggctgcgcaggagattcagggcatcatcctgaatccgtggcactgtacgctgcagctggataaaacgctgattcgcatcatcaagccgtaaaagcaggggagagggtaagtatgaaaattcgttctgttgcaattctgggggccggtgctgttggctcctatctgctgtgggggctgaccgacaagccgggggtgacggtcagcgttgtggccgagggtacacgcgccgcccggctgcgccgcgccgggcgtacgatcaacggcaagacctaccgcccgcaggtactgacccccgcgcaggcacacggcgcagacctgctcatcgttgcgctgaaatacggtgccctgcgtggggcgctggatgacatccgtgcgattgtgggcgataacaccaccgtcatgagtctgatgaacggcgttgacagcgaggagatcatcggggaagcggttggtgacagccatgtgctgcccgcgcttattaaagtggcgtcccaccgcaccgagggcggtgtcttttttgacccggacacaacgatcgggatcatctacggcgagccgcagccgccctttgacagcccccgcgtgcaggctgtggccgacctgtttgacggcacggggctgcactaccagaccacagcgcatatccgcgaggagatctggagcaagttccggctgaatgtctgcaacaacctgccgcaggcaattttgggtgcaggtgtcggctgctaccgcgacagcgcccacatgcaggccatcagtggcggtctgcgccgcgagctggagaccatcgccgccgcaaagggcattgacctgagtctggtggacaacgccatcagctacggcagccttgtaaagccgactgcgcggtactcgaccctgcaggatctggacgcccaccgccacactgaaatcgagatgttctccggtgcgctcatccgcatggggcaggagcttggcatccctacgccgtataacgagtacacctaccacatgatcaaggccatggaagaaaaaaatgacggtctgtttgactatgcagagggggaagcagcgacaagagcgcggtaaagcgtaagcctaactataaatacttggcagggggcgcacgatgtgcgccccctgcttctttgccaacctgacatgctgggcgggactaacacccgcagagcatgactttggcggagaaggtgccattctgataggtaaaggtactggtgccgccgtttttctctgcaatatgggtgacggactggataccgataccgttttccctccgcttggaagagcggaaaacgccgttcttttcgtggacctcgccgtcaaacgcattttcaacctcgatcagaagaatccggtcggcatgtatataggcggttatctcgatttgccgcctgcccggtgcggtgcgaaggctcgcctccagcgcattttccagcaggttggacagcaccatacacatatcaatctcatcaatcggcagtgcttccggcaggtcgagtctggcgcggaaggggatatcatcgcgctttgccatggcacagtaatagccgacaacgctgtccgccgcacggttttcacagaagcacatatcaagattcggaatgcgggagacggtttttgcaaggtagcttttcagattctccaaatcacccgcctcggccagcacagaaatttgctggatttggtggcgcatatcgtgccgtgcctgccgcgcttcctcgatggcggtcttgaggttctcatagcgctgctgctgcatcgaaagaaactggttctcctgctgcagctttgcattgcggttgaggctggttgccatcagcaggaaaatcgcattgaagcagaacataaaaaccagaagtgcgctgcttagcacaatatagccctgcagtacgcggccggtctggagcgttgcctgatagcgcggaatcatgaaaatgttcaaaaggatgaacgccagcggcaggacccagaacacataccatgtttgcgcaaaattatcgtcctcgaccattgcacgcaccgcatgtgtcgcaggataatacgcggccagcacggtgatccagcaaacggcgttataaaacacgcaggccccaaggcagagccacggctcgttcggcggcagctgctgattccggatgattgcggcgctgactgcgcgggacaagctgttcacacacgcgaacacggcgcagacggacagcgcaatcgtgccggatttccagagggagatatcaagcgttcgggtatacaggcaagcagcagccagtgcgaccaccgcaaggggaaagagggtagaagcctgaagccgatagcagacaagcccgctgccgatgcacaggcacgccatcagcggaaaaagccagccggccagccttccgggtgactgcttcagataggcttttacagggaaatagccaagcaaaaggccgggaagtacaacgagcagctctaaaactgggcgcagaatatctttcat

SEQ ID NO: 419 - DNA, 22379 bp, unidentified
  source 1..22379: mol_type = unassigned DNA
atgaatacaaaagatgtgatcctggagctccgcacgaaaaaaggcctgtcgcaggacgagctggcggagaaggtctatgtgacccggcaggccgtctcccgctgggaaaccggcgagacggtcccgaacaccgagacgctgaagctgctctcgcgcttttttgacgtctcgatcaacacgctgctcggtgcgccgcggcagctcatctgccagtgctgcggcatgccgctcgaagacgggaacatgagccgcgaaccggacggctcgttcaacgaggattactgcaagtggtgctatacggacggcgcattcacgtatcagagcatggatgcgctgatcgatttctgcgcggcccacatggcaaacgatgcctttccgcccgtccgggtccgcgcctacctgcaggacctgctgccgaagctcaagcactggcagatcgccgagaacaaataaccacaagatctatcccatctggagtcaacaaacatgatcgataccatgctcgtccggggcgcaaaagtccataatctcaaaaatatcgacgtcgagatcccactgggcaagatcgtcggcatcgccggcgtgtccggctcgggaaaatcctcgctggcgctgggtgtcctgtacgccgagggttcgcgccggtatctcgaggcgctttctacctacacccgccgaagaatgacgcaggcgtcgaaggcctgcgtggacgaggtgctgcatgtccccgccgccctggccctgcaccagcgccccggcgtgccgggcatccgcagcaccttcggcacgggcacggagctgctgagcagtctgcgcctgatgtactcccgccttgccagccaccgctgcccgaacgggcatgaactcgcgccgtcgctgctcgttgcagccggaaaggagctcgtctgcccgacgtgcggcgcgcatttttatgcgccgtcggctgaggagctggcgttcaactcacagggcgcgtgccagacctgcggcggcaccggcgtcgtccgcacggtcgatcttgatacactggtgccggacgactccctgaccatcgacgagggcgcggtcgccccgtggaacagcctgatgtggtccttgatgacggatatctgccgcgcgatgggcgtgcgcaccgacgtgcccttccgcgacctgacggaacaggaaaaggacatcgtctaccacggtccggccgagaagaagcacatcctctaccacgcaaaaaaggccggctccaacgactttgccgagctggatttcacgtattataacgccgtctacaccgtggagaatgccctagcaaaggtcaaggacgagaagggaatgaagcgggtggaaaaattcctgaaggaagatgtctgcccggactgccgcggcacgcgcctgtccgccgccgcccgtgcgccgaaggtgcgcggcatttcgctggacgaagcctgcacgatgacgctcgcgcagctggtcgaatgggtgcagggcgtcccggccagcttaccggaggacatgcgcccgatggccgagagcatctgcgaggcgttccagagtaccgccaaacggctcatggacctgggactcggttacctgacgctcgaccgctcggctgccacgctctccaccggcgagcgccagcggatgcagctggcccgtgccgcgcgcaaccgcacgacgggcgtcctctacgtgctggatgagccgtccatcggtctgcacccgtccaacatcgtcggcctcaccggcgtgatgcacgatctggtggatgacggcaactccgtcattctggtcgaccacgacacgcagatcttaaaggaagccgactggatcgtagagatgggtccggaagcgggcgcgaagggcggacacgtcatcgcgcaggggacgatcccggcgatcgaggaaaaccccgcgtcccagatcggtcccttcctctccggaaaagccgagacggagctgcggccccgggcggcgaaggaagctgtgtttgcagatgggaccatgcatctgtccacgtctcagatccataccgtcaagccgctggaggtcgagatcccgaagggacggctgaccgtcgtcaccggtgtgtccggctccggcaagaccaccatggtgctcgagagcctcattcccgctctggaggcaagcatcagcggcagcgccctgcccgcgcatatccgcgcagtcaaagccgacggtattgcgcatgtcaagctcatcgacgccacgcccatcggcatcaatgtccgctcgacggtcgccacctacgcgggcgtccacgacgagctgcggaagctgtatgcgagatctgccgacgcaaaggaaaggggctatcaggcgagcgacttttcctacaacaccggctccctccgctgccccggctgtgacgggacgggcgaggtgagtctggacgtgcagttcctgccggacgtcaacatcccgtgccccgactgccgcggctcgcgctacgcaagagccgcttatgatgtgaagctcgcaaataagaccggcaaatgcgtgtccctgccggagcttatggacatggatgtagcttccgcgcttgacttctgcagggatatgaagaccgtcagccagaagcttggcattctgaagcggctcggcctcggctatctgacgctcggcgaggaaacgccgagcctctccggcggcgaagcgcagcggctgaagcttgcgagcgagatcggcaaaacgcagaccgattccgtcttcgttttcgacgagccgtccatcggcctgcacccgctggacgtgcgggtgctgctcggcgtctttcaggcgctgctggacagcggcgcgacggtcgtcgtcatcgagcacgatctggacgtcatccgcaatgccgatcacatcatcgacatgggccccggcggcggagacgccggcggccgcatcattgcagccggtacgccggacgagatccggcaggatcccgccagcgtcaccggccggtatctgtaaaaccagaaaaggaggccagcagcatggaattgcctgcctgtccggtagagacgacgctgatgctcatcggcgataagtggaaggtgctgatcctgcgcgatctgatgagcgggacgaagcgcttcggcgagctgaaaaagtccatcggtcacgtcacgcagaaggtcctgaccgcgcagctgcgcgatatggaggccaaaggcctgctcacgcgcaaggtctacgccgaggtaccgccgcgcgtggaatataccctgaccgctaccggctacagcctgcggcccatcctcgactctatggtggcctggggcacggattatcagaagcaaaacggaggcgcaccatgcgatccataagacggcctgcacggccgagatcgccgcaaagatcccctgcacgcaggtccttgggacctataccgtgacctttgaccgctgaaagagaggagacctctatgccatatccctggatcgacgactatctcctgcagaagcccagtgtcacaaaggacctgcagccggactggaactggatccgctatcagatcggcggcaaactgttcgccgccgtctgcctggacgatcaggaccagccgtattacatcaccctgaagctcgaccccgccgagggagacttcctccgcgggcagtatgaagacatcctgcccggctactacatgaacaagacccactggaactccgtccgcgcgcagggctccgtccctgacgatctgctgagaaacctcctcgacgaagcctaccgcctggtcctccgcgccctccccaaaaagaaacaacgggagatcacaggcgaataaagaaaagcatgagctgctgcgaaaaaggcaccggggctatttgccccggtgcttttcctttcgtttctgctgccggcaggtaaagcggcgctgcttttcttcttcccgctgctcgcgcgagcgggtctgcttttcaagcttctgcgcctcgcgctgcagctgcagcgcctgctgtgaccgggtgccgactgtgccggcggcggtctgcttccggatctggcgctgcatccgcttcggatttgccgcgtccggccggatggccgcggcaacagacggactgaaccgcagacggctgtggtttttcagcacgtaggccaggacctcatagtccttcggctccgcgccgaaggtgaccttgcagaccgaaagcgtattgccttcgatccgctcaaagatcccgacccagaacggcgcctcaaacaaaaccgtcagtctggtcaaattgctgtccataacgaaaccctcctgaaaagaaattccgcaggaacggacgacccggaggggagggttacttacctgcgccgcgcgggcgcagacggctgggctacctaccagctctggcggaccaaagactcagcccacgttgcgtttttatcctgcgattatattaggcgcagatctgcgcgtaataccggattcagcggccgaacagagcggcggcctgctccatgcgccgggcgatcggcacgccgaacggacagcgcgcttcgcacgcatggcagccgatgcattcggaggccgtatgccccagcagctcgtagtgcgactggatggtcgccgggacctcgggctgcatggtcgcaagatcgtagaatttgttgatcatcgcgatatccagctccgcggcgcacggcttgcagtgcccgcagtaggtgcactggccgcggtaggagtggaacggcgcgttggcgagcaccgacgcgtagtccttttcctcggccgacgcggtctcgtaggcgacggccgcgtcgacctgctccttcgtgtcgtagccgcacaggatggaacagaccgccgggcgcgtcagcgcgtaatggatgcactgcaccggcgtcagacagacgccgaacggcgagcgtttctcatcgaacagccgcccgcccgcgaagcccttcatgaccgtgatgccgacatcgttctgctcacagacgctgtacagatgtgcgcgcgccgcgtcgatgcctttgagccccgcgtcaaagcgctcggcgaacatcgtgtcgatatcctcgctcgccgggagcatgtcgaaggccgggttgacgctgaacaaaatcatttccacgaagccggactccgccgccttcaccgcgaccttcgggttgtgcgagctgaggccgatgtggcggatgacgccggtctttttgagctccatcacgtaggaaagatagtcggagtgcaggatctgctcccactcctcctcggagtccacgtagtggatcatgccgaggtcgatgtaatcggtctgcaggcgcgtcagcagatcctcgaacgccgggcgcacatagatcagatcgcgcgtgcggtaatactgcccgttcttccacgtcgagccgagatggccctgaatgtaccagtgggcgcggtcgtcccggatgcccagaccgatgatgtcccgggacttcgggtccggcatccaacagtcaagaatgttgatgccggcgtcggcggcgtaatggatcagctccacaccttcttcctccggatggcgctcgagccattccgcgccgaagccgatctcactgacctgcagccctgttttccccagtcttcgcgtttgcatctgtgttcctcctgattataagttatgttaactgataaaggaagcctgtgtttctgtttccactatagcagaagccatcggaaaaatccaccatccgacgcgaaagcatcctgctgcaggtacgaaaaattcgaaaaaaatttttttcgccgaaaatcgcatgattctttatctatgcaaagcttaaaatcgctaaagtgattctttctggaacatttcacaccgaaacgctcggcaatgccgcatttcgggcacttgacaagcggaatgcccgcgcggtattttatgggatattaaaaaaagaaggcgaaaaacatgacccattacaatctcctgaagctgaagcccggcgcggatgccggtgccatctttgcgcagtgcgaagcggtctacgccgcgctggaagcggagctgccgtttttgcacgacgccaaagtcatccgctgctgcactgtgcgcgattccaacgcggatatcctgatgatcatgcagatcgaccggccggagcagctcggcacgtatctgcagcacccgaagcatgtcgctctggcgcaggggatgaaggacagcatcgctgccagaatgtcgtttgacgcggaataacttccacgaatccgaaaaagagagaagagaaacgttatgcagaagaaaaaaacagcagttcccacctatctgggcgtggccgcagtctggatcggcagccacttcggccccggctttgccaccggcgcgttcagcgtccgctggtacgtcaaatacggctgggtcggccttgtgacgcccctgctcgccatgctgatcaccggcggcgtcatgtatttcatgctggaatacgcccgcgagcacggcacgccgaactatcgtcccttcgcccggtcctgctacggcgagaagctgggcggcgtggtcgccgtcttatacgatatctgctttctgatgaccatgatgtgcgccggcggtcttgccttctccggtgagggcaagctcctgcagggcttcctcggcgtcaattattgggcgacggccatcgtcacgatcctcatttccgccgccctctgcctctatggctccaagctgctggcaaagtcctcgggctatatgatgtacgccatcgtcggcgtcgtcctgctgatcacggtgctggccctgacctgcggcgacagcgacgtgcccggggccttcgccaactccgcggccaacgccaaggaccccagcctcctggacgcgatcctcagcgccatgcagtacggctgcttccagtccaccatcgtcttcaacgtcatgtccgtctcggacgtggtgaaggacaaaaaggaggcgcgcaaggccatcggcgcgggctatctgatcacgatcctgctgatggtctgcctgatcttcacgctgttcagctatacgaatgtctttgacgtctgcgccgagacgctgccggtcatgtccgtcctgaaccgcctgggcatgaaatggctgcagtggctgtacgtgattttgatgacgctcgccgtgctcacgagcgcggccggactcgcgcatgccggcaatgtccggtttgacggcctgttccggtttatcaaaaacgcgcagctgcgccgctttgtcatcacggccatcctgcttggcatcgccgctgtcggcgcggccctgggcttccaggccatgctgcagcagggcacctccatcgtcggctgggctgccatccccattgtcgtcatccccgccttcaccatcgtcgcctccaaggtgcgaaaagccaaatgacccatccaacccgcccggccccgccgggcgggttttgtatcgccgcctatctaatgccttccccctatgaggggaaggtggcacggcgaagccgtgacggatgaggtggaagcacttgcgttaacgagacggtgtccacctcatcagtcagcctgacggctgacagcttcccctcataggggaagccattggagtgcgttccccaaggcctcccctcccaggggaggtggctcggcgcagccgagacggagaggtcgccgcaaatttgcagcaacctctcagtcaccttcggtgacagctcccctggaaggggagcctttccccgcaagaaggtaacattcatctggatttccaaagcaccttctattgatggcagatattctacggaaactagctgcaaatttggaacccccgtatcaggcggcgcgtaccaaaacgcccgtaaggtgaccaccgagtggaacgccagaccgaaacattagggcttacctgaaatcagatgcagaaagcacccaacgcatccaagcgccccttttctcccctatcttttccggcaagacggaaaagatagggccgccggaggcgcgtcagaaacgaccacgacggaacgaagccttgcatgcaaggcttcttatcctctgtgctcgttttttcctttccaaaccgcaagcgaaacttgcggtttgggtttttctatgcaaaccagccgacaacctctcggtcagccttcggctgacagctcccctgaaaggggagccttttggggtgcttgacagccttgctatactgaaatcaggaaccaaccacaggaggtatgttttatgagcaaaaaacttgtcgcctatttttccgcttccggcgtgacgaagaagcttgccgaaaagctggctgccgccgtggatgcggacctgtttgagatccggccgaagatcccctataccaaagccgacctcaactggatggacaagcagtcccgcagcaccatcgagatgcagaatccgtcctcccggccagagatcgccgagggcggcccggacctttccggctacgacacgatcttcgtcggcttccccatctggtggtatatcgcgccgacgatcgtcaataccttcctcgagagctgcgacctgaccggcaagaccgtcgtccccttcgccacctccggcggcagcggcatgggcagcaccaacaaggccctcgcgcccagttgcaagggcgcaaagctgctcgaaggcaaggtcttcaagctcagcgccagcgccgacgcgctccgcacctgggcggagagctgcaaataaaaacagcagaaaacgcgcagtccgcatccgcgggctgcgcgttttgcctgtgcggcgcaatcgcgcgttgcaatttcaccggatccatgatatagtaaaaccaattatcagaaagtgcagggaaaccgccatgcgaatgagaagaagaaacaacctcgcgccccggatggaggcctgcgagtccgtctggatccacgagccggaggcgctgcgcggcagctggcgcagcctcatgcccggctgccgtgagctgcgcgtcgaggtcggctgcggcaagggcaagttcaccgttgagaccgcggaggccgaacccgatgtcctgctcatcgccatcgagcgtgtgcaggacgcgctggtgctcgcgatggaggccgcgatccgcaagggcctcaaaaacgtcttcttcgtctcgctcgacgcggcgaacatcgaccagtttttcgccgacgatgagatcgacctgctctacatcaatttctgcgacccctggccgcgcaagaagaacgccaagcgccgcctgacctaccacaccttcctggaaaaatacaagaaggtcctgaagctcggcggccagatccatttcaagaccgacaacgccaatctctttgcctggagcctgccggagatggagagctgcttcctcgagctgcgcaatgtcaccgacgatctgcacgcgaacggcccggtcggcatcatgaccggctatgaggaaaaattctacgccctcggcacgcccatccaccgggtcgaggccgtcgtcgtgaccaagcagccgcgcccggccgacgcaaaggagcccgaagaggccgaagcaggggaggacgcataagatgctgccctccatcggcatcatcggcggcgcggacggcccgaccgccgtgttcgtatccggcggcctgtcctggggctggctcgccgcagcggcgctggcgctcctcgccctcgtcgtctggctctccaaccgccatagatcataaaaaaccacgctgcccggctcccaggcagcgtggtttttattatgatgcttattcgtagatcgggtgctttttgacgagcgctgccacggcggcgagcacggcttcgcggtttgcgtcgtagtcggtcgcgatcttgtcgatgcagtcggcgacgacgggcatgtcttcctcggtaaagccgcgcgtggtgcaggccggagtgccgatgcgcacgccgctggtgacgccgggcttctgcgggtcgttcggaatggcgttcttgttgacggtgatgtggacctcgtcgagcttgatctgcaggtccttgccggtgatgtttttcttgcgaagatccgccagcatcaggtggttgtccgtgccgccggtgacaaggtcaaacccgcgctcgagcagcgccgcagccagcgccttcgcgtttttgacgacgttttcggcgtagaccttgaacgccggctgtgccgcctcgcgcaggcagacggccttgcctgcgatcacgtgcatcagcggcccgccctgcgtgccggggaagacggcgctgttgagcttctttgcaaactgctcgtcgcgagagaggatcatgccgccgcgcgggccgcgcagcgtcttatgcgtggtggtggtgacaacatcggcgtaggggacggggttcatatgctggccgcccgcaaccagacccgcgatgtgtgccatgtcgaccatcagcagcgcgccgctgcggtgcgcgatgtcggcgaagatcttaaaatcgatcgcccggggataggccgacgcgcctgccacaaggagcttcggatggtagcggcgcacgagatcctcgacctgatcgtagtcgatgcggccggtctgcgggtcgacgccgtagctgatgctgttgtagtatttgccggagaggttcacgcgcgcgccgtgggtcaggtggccgccgctggccagatccatgcccatgagcgtgtcgccgggctgcagcagggcggcgtagacctccagattcgcctgcgcgccggaatgcggctgcacgttggcgtaggcagcgccgaagagcgctttagcgcgctccatcgcaatgttctccagcacgtcgacatagtcgcagccgccgtaataccgcttgccgggataaccctcggcgtatttgttcgtcaggacggaacccatggcggcgatgacggccggggaggcgatgttctccgaggcgatcagctcgatgttctgcttctgacggtgaaattcgttttcgatgcaggcggcgatctccgggtcctgcgtctgcaggaagttcatgctggtttcgagtacgttagccattgcgatgtgtctccttacttgatatacgatagaaatgaaaaaatgagcaggccgtctccggtctgctcattgaaatgccgtattacaattgctgtagctgcggctctgtccttttgcctgagagattcggctcacgccttgcaccttcggcactcaactcaatgagttctccagagattccttctgtctccagtccgcgcgggcgttctgaagacgatcaacgggattcctgtattcaattgacggcgttattatacacacctgacggacaaatgtcaacaggctgtatgcggaaattttcagccttccaccttcggcagctgcgcaatgcttgcggccagctgttcgtcggtcgggatggtatcggtcatctcgtggtcgttgaacttctggtaggcgacgagatcgaaatagccggtgccggtgaggccgaagacgatggtcttttcctcgcccgtttccttgcacttgagcgcctcgtcgatggcggcgcggatggcgtggctggactcgggggcggggaggatgccctcggtgcgggcgaaatactccgcggcctcaaagacgctcgtctgctcgacgctgcgggcctccatcagcccgtcgtggtacagctgcgagaggatggggctcatgccgtggtagcgcaggccgcccgcgtggttggccgaggggatgaagccgctgccgagcgtgtacatcttcgccagcgggcagaccatgccggtgtcgcagaagtcatacgcgaacacgccgcgcgtcaagctggggcaggaggcgggctcgacggcgatgaagcggtagtccttttcgccgcgcagcttttcgcccatgaacggggagatcaggccgccgaggttcgagccgccgccggcgcagccgatgatgatgtcgggcgtgatgccgtatttgtcgagggcgatcttcgtctcaaggccgatgacgctctggtgcagcagcacctgattgaggacgctgccgagcacgtagcggtagccgggcgtcgtcgtggcgacctccacggcctcactgatggcgcagccgagggagccggtggtatccgggtccttggccagaatggcgcggccgatgttcgtggtgttcgacgggctgggggtgacgctcgcgccgtaagtgcgcatgacctcgcggcggaacggcttctgctcatacgagcacttgaccatgaacaccttcaggtcgaggcccagatacgcgcaggccatagaaagcgcggtgccccactggccggcgcccgtctccgtcgtgacgcccttgagaccctgcttcttcgcgtagtaggcctgggcgatggcggagttcagcttgtggctaccggaggtattgttgccttcaaacttgtaatagatcttcgccggcgtgccgagcttttcctccaggcagtaggcccggaccagcggcgacggacggtacatcttgtagaaatcgcggatctcctgcgggatggggatatagggcgtgtcgttgtccagctcctgctcgatgagctcgtcgcagaagacgggacgcagatcgtcgaagcccatgggcttgccggtgccggggttgaccagcggcgcgggcttgttcttcatgtccgcgcggacattgtaccaattctggggcatctcagattcagacagatagatcttgtaaggaatgttttcggttttcatggttgcttctcctttcgcatgttggtctctccgggagaagggcaacaaaaaagaccttcatccacagagaaaaccggtttcggtttgatctcttgggacaaaagtctgaaaacttctgcggtgccacccaaattgacaattgcttgtccgctcatgatacgctgacacgtatcttcccctgtaacggtgggaactccgtcaggacctacttgcttgcgcgttcaacctgccctccgcagtccattcggcaaacgtctttctgctgcactcgcaccatccggcagctctctgggagaaatcctgcttgcttactcgtctgcatcaacggtttcatcttggctcggattatacagcggccaaaccggtttgtcaagtgtttttttcaataaaccgacaaaattcctcggctatccagatgcttgcaaatggcgcgcccatatgctataaaaagcggagatattgcttattcgggggcctcgccatgaaaaactcctgccagaggacgatctatgcctgctacgccggttatgtcgtgcaggcggtcgtcaataattttgttccgctgctgttcgttatgttcgagcggagctaccagatcccgctgtccaggatcacgctgctcatcaccgtgaatttctgcatccagctgggcgtcgatctgctgtcgacctggtttcttgaccgcatcggctaccgcgcggcgatcctgttctcgcacgcgttctccgcggcggggctcgtgctgctgacgatcctgccggatgtgtttccggatcccgcggccgggctgacggccgccgtggccgtctacgcgctgggcggcgggctcctcgaggtgctgatcagcccgatcatggagtcctgtccgacggacaacaaggagcgctacatgagcctcctgcactcgttctactgctggggccatatggccgtcgtgctgctttccacggcgtttttcgccgttttcggcatcgaaaagtggaagatcatggcccttctgtgggcgcttgtcccgctggccaacggtattttcttcgccgtctcgccgctctatcccatccagagcggcgagaccggggccctgccgctgcgcgagctgtgccggaagaagctgttctgggtcttcatgctcatgatgctctgcgccggtgcggcggagcaggcggtgagccagtggtcctccgcctttgccgagcagggcctcggcgtgtcgaagacggtgggggacctggcaggcccgatggccttcgccgcggccatgggcatttcccgggcactgttcggcaggtacggcgggaagctcgacctggggcggtatatgcaggccagcgcccttttgtgcatcgcggcctacggctgcatcgtcttcgtgccctcgccggtcctgagtctgatcggctgcgcggtcacgggcttctcggtcggcattttctggccggggacgttcagccgtgcggcggcctcgatccgggacgggggaacggccatgttcgccctgctggcgctggccggggaccttggctgcgcgggtgggccgacgctggcgggcctcgtctcgagcgcctgcggcggcagtctgcgcgcgggcatcctcgccgcgctgatcttcccggctctgatgcttgtctgtctgctcggcatgcggaaaacacagtgacaaacgcgcaggagcgcctcagcggccctcctgcgcgttcatgtctgtcagggagtattttttgtgcggccgctttttggccgcgttcatgtcctgcagcgacgcgggcgcgtccggctgcccccggcggcagttcatgtcgcttagcgcgcagctgcgcgtatcgtcgtgtgagatgccgttcatgtttttcaggctgaacggctcttttcctttcggcatatcaagcgcctcctttttgctggttttcccggcacagaagcgaaatatgcagccccgcccgaaaaacaggcggggccaaggctcagtcgcggcggcagttcatgttcgtgaggctgcaggtcctgtccggctgcgcgttcgcggcgttcatatcctgcagggaaggggactgctccggctgccccttgcggcagttcatatcgcctagcgcgcagctgcggccgctgtcatccgagatcccgttcatgttggtaagaccgaaagatgtgttcttctgattcatgttgtattcctccattacaataaaaataattattactaatattattatacagatagcaacagaaaagtcaacccccaaataaaaaaagtgctcagatggatgcacataccatatttttgtgctatcctgtgtacagggcggggggcgaatgaaagtaaaacagatgaaagaataggagttcatgatgagaatcgaatttgaaaacatcgtccttcgggatatgatagagtccgacattgaagactatgtgcgctggttcaccgtggagcgtgaatgggaaaactgggatgctccctgggagaaagaggacacaaatgcggaagctgagcggaaaagctggacggaacgctatgaatacaggaaaaatcttctagatgatgtccgccgttacaggcttgagatcgaatggaacggcaggcatatcggctcggtaaacgcctatcacattgatgaaaactacgaatggatcggagcagccgagagtgggcagatggtccatctggctgtcggcgttggtatttgcgaacatgatttatggggcaatgggatcggcacaaacgctttgcgtgcctttataaattaccagttaaaaatcggcgcggacgaaatttacacgcagacctggtcaggcaatgttcgtatgatccgctgcgccgaaaagctcggctttgttgaatgcaatcgcaacataggcacacgagaggtcgacgggcaatgttatgatggactgacctttcggttggaggaataaaaattacatatcgaatatgactctgtgagccacattcccgtggatgtaccgccaaaaaagaaacaggcatgaccgaagcggtcatgcctgttttttataatcagccgttttttgtgcgatcccctgcacccctcacgcttcccaggaaagccggatcgactggggcaggacgagctggtcgtaggtgacatcgttgcttacgtagttcacgccctccagactgctgcagtacccgccgtagtaggcgaggcccgacgcgtcgaacacggcgacggtgaacccgcagttgtcgacgtatgtgccgtcctccgtgatgagcccggcggtgctcccggcgagataacgcttggtggacgccgcaccgttgaccagcaccgtcttgtcgttgcgcacgagggccagccgctcaccgtcaaacgccatctcgctgatgctggagtagccgacggcaaacggcagctccgaatcaaaatcggacgtcagcgcgacctggaattgcccgtctgcctcctgcgtcagcacgcagatgcgccgctccgacacgcggatgcaggtaaaatcgtccgtctcggtgatatttgtgtaatcctcgtccgtgaagtcgtccatcacggccagcttctgcaggacggcggcggtcttgacgtcgattaaggttacataatatatattattttcaaccgtatgcagcaccagtgccgacccgtccggcgtcagcccgaggtgccggatctcgaccgccgggtccagcgggaagaagcaggcgagctggtcggcgcacagataggtgtccgggaagctgtccgcctccgactggacatagggcaggatatagatcccatagccgcccggaatgcggctcatgtcgacgagcttgccgttttccgtccggttgctgagccggaagaagcacgcgtcatccgtcacgacgctctctgagcttggccagtaccggtcgccctgctgcacgcttgaggcgccatagctggagctgctgccgtccatattcttgtcgatctgcagctccacgtactcgtccggaagcaccgggatgcggaaaaagtcccgcagggcatgtatggcgtcccgttctgcatcggtggcgtatgcgtcgtgatcgtcccagctgtcaagcgtggtgataaacaggtgcggcagatcgacggagaaccagagcggatactcgtcgtagtagtccgcgacgcggatgaccttcgtgccggtctgcccgggctcgagcgtgtcgaggatctcctgataggcctttctgtagccgaaggggtttgtgtcactgtcggtccagacgttgacgcgcgtgtcgacctccacgccggaatactgccgcggctgttcccgcgaaacagcgacaggggagaagcggaacgcggtatctgcggtatagtcccggccggagaagcgcaccgtgctgtcccagaacagattctgccgcagcgcggcctgcagctgtacctgcagccctgcggcggccgccgggtccccggcgaagacatgctcgtcgaacgtcacgtcctcgcgcggcgcggccaccgcgtgcgtgcagaccgccgcgccgcacgcgcataccagcgccagcgcgagaaatacgatcagagtcttacgcatcgtcgtcctccctgccggtcagctcggcaagcgcctttgagacgcggtcagactgatagctgaacgtctgcttcacgtattccatcagcgtcagcccctgctcgtcgagcgccgcggtctgcgcgtcgccgacgatcttcccctcgtggagcagtacggctcgcccgatgaaccccgtcacctcctcgatgaggtgcgtggacaaaatcaccgtctcgtgcggctcaagaatgccgagcaggaccttgtagaaatcctcgcggttaaagacgtcgttccccgcgaacggctcgtccatcaggatatagtccgccccctgcgacagggccatgatgacctcaaactggtttttctgccccgtcgagaagctgcggatgggcttgtccatcggcagaccgaaaaactccatcagcccctcaaagcggcgggagaggaacgtctcaaaatgctcctcataaaattcccggtgcgcctgggccgaaagggcggggaagaagctgtgctcgcaggtggcgaaggagaaccggccgatattcgcgcgcgtgatggccgcgccgtccagcgtgaccgagccgctgtcatagcggatgagcgacaggatgcacttcatgagcgtcgtcttgcccgcgccgttctcgccgaacaggccgacgatctcgccgggcccgaccgtcaggctcacgtgatcgagcgcctgcttgtccgcatagcgcttgcagagatccttgatttccagcatcagaaatacgcctcccagatctgtaaagtttccgccggcggcatgcagcgcgccgggacgccgtggtgatagaccgtcgcgaagatcgcgagcagtatgagacttacaagaaaaccgactgcgcaggcgaccgccgggatcgtcaggcagcgcacgtgcagctcctttgcgctcggcagccgcttcatgacgtaaatgctctttgtctgccgggaaaatgacgcgtagttcgccgcggcgttgaacccgcagacgagcagatacacccagaaccccgagagccggtgccggatgaggctgttgaggctcgccatgaccgcgccattgcgcaagaccagcgccccgtagcggaactcatacagttcgcgcagcgcctgccggtagccgctgaagaatcccagcccccagaacacgacaaacaccagcagcgccagcacgtaggcgatgaacgccgtccgcagatcgtcgcccggcggggcgaagcgggcgagcttcttagtccagttcatcctcgggcccctcctttccgttgtgcgcctgcaggaatccaagatatccgcatatgcccgcggcgaacagcgccgccacgctttgcaggatccccgcggtccggccggagccgaacccgaccggcagcaccagcagcatcagtccggtcagcacgaccagcgccagccgccgcccgccgttcttccgccgcagccccagctgcatgtatgcggtcaataccccgagcgccaacacgaacaccacgttccgcacccacagatacccgtccgccagcggcagcagcccgtgcaggaattcgctgcggtaaaaatccacaaagatgccctgcgcgccctccgcataccgcgcgtccgccgcgtgcagcgccgccgtgccgaccgaagccatcagctgcacgccccacacgcacgcaaagcagagcgcattgcacacgccgctccagagcagcacccgcgtctccgggatctgcagccgccgcagcgtgtagccgtaccggctgcccgcgccgaagcagctggcgagcagcagctggcaggcgaccagccccagcgaaaagatcacccgcagcgccgtgaccagctcgctgcccgtgagtgaagcccggaacccacgcaggccgaacaggacgtaggccgccgcgtccagcgccagcattcccagcagcaccaatgccagccgcccgatcgcggcccgcgcgtgcagcgcaaataccgaaagctgctttttcatgtctcttcctcctcccacgcctgcgcgagcaggcgcagcgcgtcttccttcgtgatgcccatctgccgcagcgtccgcgccgcgttgcgcagctcctcggacaaaagctcctgccgcagcgccgcgagcgttttttccggcagcgtcatgcagcttttcgcgcccgtgcgcgattcgatcagctgttcttcctccagcagatggaaggccttctgtaccgtattcgggttgatccccagcagcgccgagagcacgcgccgcgacggcagctcatcgccgtcccggatcgtcccggcgaccgcgccgcgcttgatataccggatgatctgcagatacaccggcgtcccatccacggcccggaacgcgtcaaatgaaaccatatcctcaccaccgtattacttgactcatacacttgataactgtattatacagataacacacttctctgtcaaccccgcccttgacatttcccccgaaaccggatactctgaaaaagaaaaggctcccctttcaggggagctggcagccgcagactgactgagaggtcgtctcctgcctctgaatttaagcaagcgccaatgtttcaggcgtcgttccacacgatagtcaccttacgggcgtcatactacgcgccgcctgatatgtaggaagcaaatttgcaactgattgcctttgaatgtctgccgtcaatagaaggtgcagaagaaatccggatagcctgttcctttatgcgggcgtccctcaacgatcatcccacccacaggaggtccccatgtctgaactcaccaagcgcgctttggagcagtcgctcaagaatctgctgctgcagaagccgctcaacaagatcaccatcagcgacatcgccgacgactgcggcatcaaccgcatgacgttctactaccacttcaaggacatctatgaccttgtcgagtggtcctgccaggaggacgcggccaaggccctggccgggaagaagacctacgagacctggcagcagggctttgagcagatctttgaggccgtgctggccaacaagcccttcatcatgaacgtctaccactccgtcagccgcgagcaggtggaaaattacctctaccagctcacctatgacctgctcgagggcgtggtggaggagcaggcggccggcatgtccgtccgcccggaggacaaggcgttcatcgccaacgtctataaatacgccttcgtcggcctcatgctcgactggatcaagcacgacatgaagggcgagccgaagcagatcatcgaccggctcgaccgcgtcatccacggcagcgttaccgccgcgctggagcgcttccgcctcgacgccccatcagatccacccgtttgataaaaaactatacaatttcccgcccggtgataagaactttatcaccgggcattttctgcttatggcgctttttctggacctgtagtatgctcataccatcgaaagggaaacataaaacatcgtttccagactttttatggaggtattgatcatgtattattcgagcggcaactatgaagcatttgcaagacccaaaaagcccgagggcgtggacaacaaatcggcctatatcgtcggcagcggcctggccgcgctgaccgcagcctgctatctcgtccgcgacggccagatgaagggcgaacgggtgcacatccttgagaaggactccatccccggcggcgcctgtgacggctacaagttcgaaaacgtcggctacgtcatgcgcggcggccgcgagatggacaaccatttcgaggtcatgtgggacctgttccactccatcccctccatcgagaccgagggcgtgagcgtcctcgacgagtactactggctcaacaaggaggacccgaactactccctctgccgcgccaccgaaaaccgcggccaggacgcccacaccgacggcaagttcgacatctccgacaagggcgcgatggagatcatgaagctcttcttcaccccgaacgaggacctgcaggacaagcgcatcaccgacttcttcgacgatgaagtcttcaactccaacttctggctctactggcgcacgatgttcgcctttgaaaactggcacagcgcgctcgagatgaagctctatatccagcgctatatccaccacatcggcggtctgcccgacttcaaggcgctgcgcttcacgaagtacaaccagtatgagtccatgatcctcccgatgatcaagtatctcgagagcttcggtgtccagttccactacggcgtgcaggtcgtgaacgtggagtttgactgctccgacccggcccacaagctcgccaagcgcatcgacatcctccgcgacggcaaggaagacgccatcgacctcactgagaacgacctcgtcttcatcaccaacggcggctgcgtcgaaaattcctcccgcggcagccagaacgagcccgccccctacaacaccgagatcaaacccggcggcggctgggacatgtggcgcaagatcgccgcgcaggatccgtccttcggccatcccgacaagttctgctatgaccccgagcagaccaactggatgagcgccaccgtcgagaccctcgaccagaagatcatcccctatatcaagaacatctgcaagcgcgatccgttcaccggccatgtcgtcaccggcggcatcgtcaccgtcaaggattcgagctggctcatgagctggaccatcaaccgtcagccgcagttccgcgcgcagcccaaggaccactgcctcgtctgggtctactcgctctttaccgacaagcccggcgattatatcaagaagcccatgcgcgaatgcaccggcaaggagatctgcatggagtggctctaccacatcggcgtgcccgaggaccagatcgaggaactggcgacgaacagcgccaataccgtcccggtcatgatgccgtatatcgacgcgttcttcatgccgcgcgcctacggcgaccgcccgaaggtcgtgcccgacggctccgtgaacttcgccttcctcggccagttcgccgagaccccgcgcgacaccatcttcaccaccgagtattccatgcgcaccggcatggaggctgtctataccctcctgaacgtcgaccgcggcgtgccggaggtctggggcagcgtctatgacgtccgcgacctgctcgacgccactgtcaagctccgcgacggcaaaaagcctaccgacatgaagctctccctcgtccagaaggtcgccctcgataaggccctcagcaagatcaagggcaccgacatcgaaaagctcctgaaggagtacaacatcatctga

SEQ ID NO: 420 - DNA, 15355 bp, unidentified
  source 1..15355: mol_type = unassigned DNA
atggtgatacatatggcagcaagaattaatgagcagcagtttgaagaaaaggtattgaaagcggataaaccggttttggtggatttttattcggatacatgcattccatgcaagagaatggctggagtgctcggcgagattgaggatgattacgacggcaagcttgacgtgttcaagatcaatgtaaactatgagcagggactggctggcaaatacgaagtaatgtctgcaccgacactgatctacttcatccatggagagcagcagtggagactgaccggagtggtaaagcgtgaggaaatcacaaagcttgttaccgacatctgatgcatcacttgaaatgctttaagaggtgcccaatatttgggacaccatgaaataaaagaaatttacaggtgtaagaaaggagaatacaatgacaatcacaattgcaggaaacaagaaagagtatgacgagggcgtaaccgtagagcagttgatcgagaaggagaacgttgagaatccattatatgttaccgtaacgatcaatgatgacttcgtagacagagagaagtttggcgagacagtattaaaggatggcgatgccgttgaattcctttacttcatgggaggaggagcaagataatggcttttacaaacgaacagcttgagagatattcccgccacatcatccttcaggaggttggtgtaaagggacagaagaagctcttaaacgccagcgttctgatcatcggagcaggcggactcggggcaccggcagcactttatctggctgcagcaggtgttggtacgatcggtattgttgatgccgatgaggtagatctttccaacctgcagagacaggtcatccacaccaccaatgatgtgggcaaggcaaaggtgaaatccgctgcggagacaatggaagcgatcaacccggatgttaccgtcaagacatatcgcacatttgtagattccacaaacattatggatctgatcaaggattatgacttcatcattgacggtaccgataacttcccggcaaaatttttgatcaatgatgcctgcgttatggcaggaaagccattctcccatgccggtatcattcgtttcaagggccagctcatgacctatgtaccgggagaaggaccatgttaccgttgtgtattcaagaatccaccgccaaaggatgcggttccaacctgtaagcaggctggtgtcatcggtgctatgggcggtgttatcggaagtcttcaggcaatggaggcaatcaagtatattatcggtaagggagaacttcttaccggaaagcttttaacatacgatgcactgaaaatggaatttcacacgatcaagcttccgaaggatcatcactgtgccgtatgtggcgacgagccaacgatcacagagcttatcgattatgagcaggcagaatgtgatcttaagtaaaactattcaccggtgtgctaagtaagtttacggcctggcaagcttgcctgcaaaaagcagtgagcttactcagtgcagatgccggtgaatagaatacagaacatagagatgatatagaaagtaaggtgaaagcatggcaataacgttgaaaatgaaaaaagaagattacgagaagatcctggcacactgtcaggcaggtcttccgaatgaatcctgtggacttctggcgggagatattgacggagaagtaaaaagcatcacagaggtatatctgctgacgaacattgatgccagcaacgagcatttctccatggatccgaaggagcagcttgcggctgtaaaggatgccagagcaaagggaaagaagctgatcggaaactttcattctcatccggaatcgccatcacgtccttccgaggaggacaagagacttgcatatgattccacaatggaatatctgatcctgtctctgcaggaggcagacaatccggtgctcaaggcattcgggattgatccggacaagaatgttacaatccatgagattgaatatctataaaggcattcggaaaattttcctgaatgcaccggaataaaagccgatggcttttcgtgaaataaagggtgacaaacgacacagaaaggatggttccatgagtaaagattttgaagtacggcagatcaacacagatgtattgatcatcggaggaggtaccgcaggctgttacgcagcactgactctgagccgtgacacagggctgtccgtggtgattgcggagaaagcccatattaagcggagcggatgtctggcagcaggagtcaacgcgatcaacgcttatatcacgaaggggcatgctccacaggattatgtcgattatgccagaaaggatgccgcaggtattgtcagagaggatctgctgcttaccgcagcggagcatttcaatgaagtgactgcagatatggaaaatcttggtcttgtgatcctgaaagatgagaatggtgattatgtcaccagaggaaaccgtaatattaagatcaacggagagaacttcaagccgattcttgccaaggcagtacaggaacaggaaaatgtatcggttataaaccgtgtcaatatcacaaagcttctgacaaaggataataaagtttatggtgcggtaggattttctctcgaggatgaaaccgcttatgagatccatgcgggtgccgtgctggtggcaaccggcggggcagctggactttataaaccgaacaatccgggattttcccgacataaaatgtggtatccgccatttaataccggtgccggatatgccatgggaatccgggcaggcgcagagatgacctccttcgaaatgcgatttatcgcacttcgctgcaaggacacgatcgcaccgaccggaaccattgcacagggagtgggagcaaagcagatcaattctaagggctttgtttacgaagacaaatacggactcaccacaagcgagcgtgtctatggcacggttcgcgagaaccagcttggaaacggtccatgctacctgaagacaagcggtattgacaaggatcaggaagaaaatcttttaaaggcatacctgaacatggcgccaagccagacgctcaaatggatcgagaccggggaacttccgggcgagcaggatgttgagatcgagggaacagagccttacattgtcggcggacacacggcaagcggttactgggtagacaccaaccgtgagacaacgatccacggtctgtatgctgccggagatgtggcaggaggatgtccacagaaatatgtaaccggcgcactggcagagggtgagcttgcggcaaaggcaatcgagaagcagttaagcgggacttctgtagccgatggtgcggacgaggagattgcccgtcaggcacaggaagagactgccgcttatcaggatattttagccggagagcagtcaccgtttacggcggaggagcttgaggaggcaatgcagaaggtgatggatgaatatgccggcggtatatctacccattaccagtacaatgagaagcagttaaagcttgccgatgagaagatcgatcagctgactgcactcgcagatgaacttaccgcacggaatatgcatgagcttttattcgtttatgaattaaaggagcgactgatcgtttgcaagagtctgatcgcacatctgagaggacgtaaggagacgaggtggcattcctttaatgagaatctggatcatccgaacgaggatgagaactttttcaaatatgtcaattcccgtctggaggatggaaagatccggatcatactgagagatattgtaaaggaggggtcctatgagcatacaaattaaccggcagaaatgtatcggctgcggtcagtgcatgcaggtctgcccgggaacgctgatcgaaaagcaggagggaaaagcagtgatgcgctatccgaaggactgctggggatgcgcttcctgcgtgaaagaatgcccggttggagcgataggatttttcctcggagcagatatcggaggaaacggcagtgtgatgactgtgacaaaagacggacagatcttacattggaatattcataaaagcgatggacgcgaggttacgattgaggtagaccggcgcagttccaataaatattagaaaaggatggaggacgactatgagtggattaacacatttggatgaattagaggcagaagcaatctacataatcagagaggttgcagcggagtgtgagaagccggttatgttatattcgatcggcaaggacagttcggtaatgcttcacctggcaatgaaagcattttacccggagaagccgccatttccttttcttcacgttaacacaacctggaaattccgtgagatgatcgagttccgtgacaagaccgcaaaggaacttggcattgagatgctcgagtacatcaacgaagagggtgtgaagcagggaatcaacccgtttgatcacggtgctgcttacaccgacatcatgaaaacacaggcactgaagcaggcattaaataaatacggttttacagcagcatttggtggcggacgacgtgacgaggaaaagagccgtgccaaggagagaatcttctccttcagaaatgagtcgcatgcatgggatccgaagaaccagcgtccggagatgtggaaattatataatacggagatcaacaagggcgagagcattcgtgtattcccaatctccaactggactgagaaggacatctggcagtatatcaagcgggaaaatatcccgatcgtgcctctttactttgcggcagagagaccggttgtataccgtgacggcaacattatcatggtagatgatgatcgtatgcgtctggagccgggcgagaagccggagatgaagatggttcgtttccgtacactgggctgctatccgctttccggtggtgtggaatccaatgcaacaacactcgatgagatcattgaggagactctcagctccgtagagtctgagagaacaagccgtgtgatcgataaggacggcggcgctgcaagtatggaaaaaagaaagagagaggggtatttctaggatgaatggattattaaaatttataacctgtggaagtgtagatgatggaaaatcaaccttgatcggtcatatcttatatgattccaagctgttatatgcagatcaggaaaaagcattgatcctggatagcaaggttggctcccgtggcggtgagattgattattccttgctgcttgacggactgatggcagagcgtgagcagggtatcacgatcgatgtggcataccgttatttcacaacggacaacagaagctttatcgtagcagatacaccgggtcacgaggagtatacaagaaacatggcagttggtgcttcctttgcacagcttgccgtagttatggtcgatgcaaagcagggtgttctggtacagacaagacgccatgcaagaatttgtgctttgatgggaatccgctattttgtatttgcggtaaataagatggatttagcagattacagcgaggagcgtttccgtgcgatcgaaaaggacatcaaggatctggcagaaagccttggtctttacagcgtaaagatcattccagtcagcgcaacagagggtgacaacgtaacggttgtatctgagaatatgccttggtatcagggtggtacactgttaaattatctggagacagtcgatatctccgagcaggagaattcttccgtattctatatgccggtacagcgtgtatgccgtccgaatcatgagttccgtggtttccagggacagattgaaagcggacgtattaaagtcggcgagacgataaccacactgccgagcgatgagaaggcaacgatcaagtcaatcctgaacggttctacggaggtgcaggaggctgaggcaggtcaggcagtaacgatccagcttgaccgtgaagtggacgtaagccgtggctgcgtattggccaataaggaagatcttccttacactaaggacgtaacaacgacacttttgtggatggatgatgagccactttctcttggcaaggagtaccttgttaagcttggaaccaagaagattccgggaatgctaaagagcattgagtacaagatcgatgtcaacagcggagagcatattcaggcagaccatgttgagaaaaatgagattgccgtttgccatctggaatttgcagagaagattatcgttgacaagttcaaaaccaacaagacactcggcgagctgatcctgatcgaccgtatcagtcatgcaacttcggcctgcggtgttgttgaggatgtttccaccgatggtgaggtaccatatttccagaaggatgatatcaaaaccggcggatatattttcgaggaattctacttcaatctggagaacgcattcctctctaaggtaaatacacaggataaaacataccatgttggcgataccgtgccgatcgagggcgacagctttaagtatccggattatttcgatattcttgcagcagacagtgatgccgttatcctgatccgtaaccgtgtgatcgaggacatcattccactgtccgaatatcagtacacaggacttcctgttctcgatgagagaggatttgcactgcgcatccgtgtaaaggcagacctcgacaattatctgtacgagtacaagaatctggacaaggagaatcatttggaattcttcaacaagtggtccaagtttgaaacctaccgtagaattatatgcactgataatttctggatgatatgatgcaagggccaaaagtagatagcaatgtatgtttacatacaaattgctatctactggcttgacccgccaaacaccgacaagaagcagatttgcttgcaaatctgtgggattggagatggttgcaggattgcggaaattgcgtcgcaatggagcaatccgtggcatcagggtaatgcgaacacttgcgtgttcgcattagaagttgcttcgcatattattagtgtcaaccgtagttttagcagttagaagaggagttccatatgaagatttctaccagaggaagatatgctttgatcctgatgctggatctggcgaatcataatcgcggcgtgccggtgccgttaaaagaaaccgcaaaacgccagcagatttcagaaaaatatctggagcagattatttccgtgctcaacaaagctggttttgtaaagagcgtccgtgggcctcagggtggttatctgctgaaaaaaacaccggaggagtacacggtgggaatgatcctgcggcagacggagggcgatttaatgtccctttcttcggacacctccaacgaaatggaaaaggcttctgtgatcaaccgcgtttgggataaaatgggaaaagcggtcaatgatattgtagacaatattacactgcaggaccttttggactgggaggaagagcagacggaagaggccggattttatgtaatctaaataataaaaataataccgataatgtttcttggcgatacaggataaggcattatcggtatctttggttttgagaagagaacaacgggaaaggaaaacggatatgaaagatattataattataggaagcggtccggcgggattgtcggctgcagtttatggaagacgtgccggtctggatattcttgtgatcgaaaaggaatattgtggaaccgggcagatcgcggagagtggtcaggtggataattatctgggcattccggggattgacggatattctctgggagaaaaatttcgggagcatgctgagaatctggggacggcttttctggaggaagaggtcacgaagctggagcagtccgatggttattggaaggtacttctggcaggcggggatgttttggagacgaagaccgtgatctatgcggcaggagcatcccatcgccatttaaacgtaccgggagaggacaaactttccggcagaggtgtgtcctactgtgctacctgtgacggcgcattttttcagggaaaggtgacggcagtgatcggcggtggtgatacggcactggatgatgctctttatctgtcgcagatctgtgagaaggtttatctgatccaccgtcgtgacgagtttcgcggaaatgcggggacggtgcagaaggtaaaggatgcagaaaatattgagatcctgacgaatgcgagagtacaggagattcagggagaacagcgggtagaggctgtggtgctggaggatggccgcagactggaagtggctggtgtctttgcggcagtaggaatggagccggtaacaggactgcttcaaggcgttgcagaacttgatgagtatggttatgtggcagcaggagagcaggggatcacctcggcccagggactgtttgtggccggagatgtgcggaccaaggtgcttcgtcaggtgattacggcggcagcagatggagctaatgcagcgacagaggcggagaggtatatccggagatagtatgtaacatagaaaatgtttattgactttcctttcttttttttttataacgataaaaaaagggaagattgagtatctatacggtgaacgataatgacaatattcagtaaaaaagaaaaagccggaaatcaacggagaatatttcataaggacacagtccgtcaggcattctggcgggctttgcccattatggggagttatttgtttgtgagcatgtcctatgggcttttaatgcaggaggcgggctatcgctggggctggtcgttgcttgtgagcatgacggtgtataccggggcattccagtttgttctgatcacatttttaagcagcggtgcgtctcttctcaccatcgggctcacggcattgtttatgaacagccggcagtttttctatggactcagctttgtggaggaattccggcagatgggaaaacgttatccgtatatggtgcatacaatgacagacgaaacgtatgcggcaaactgtgcactgcagatgcagcaggagcagagggcgaaagagtctgaccagaaaatgggacagaacgaaaagaaagcggtgccggaagaggacgaaaagaacatagcaaaatcccgggagaacatcaggaaacgtgatgagatgttttggatcgcgttgttttcaaggataagctggatgcttggtgcggtggctggcggcgtgatcggacagagcattcccgtggaacttaagggtattgacttttgtatgacagcgctgtttgtcacgatatttgtggatcagtggcggtcggcaaagagccatattccggcattgcttggtcttggctgtggagtggttctgcttcttcttgtgggaccggattactttttgctgccgacgctgatactggtgtcaggtattctgcttctgatccgtggaaccatgaactctgcggtcggagcagcttctggagaggaggctgtggaaaatgaataatatacaggcatttacggcaatcatgctggcggtggcatgtactcttctgatgcgtgcactgccctttaccctgttaggaaaacgtcaggagatcccggaggtcatccggtatctgggaaatatccttccggcggcgatcatggcggtgctgatcgtatactgcctgaaatccgtgccgatggattttggcggaacagggatgtatcagcttctggctgcaggagtctgcgtactgttacatgtctggaagaagaatacactgtttagcattgtcggaagcacggcattttatatgatattgctgcagtttgcatgacaaaacgaaaaaaagatatcataataatcgggattgtggtacactaagaaagattgggagatattttgccgggtggcaggtatcttcatagaaggaaaggaatacaggattcatatgttaaatcagttttctagaacacagcttttattgggaaaggaaggaattgaccggctggcagaggcgaaagtggctgtttttggcatcggaggagttggcggctatgtggtggaagcgcttgccagaagtggtgtcggttcttttgtattggtggatgacgataaggtatgtctgacgaatctgaatcgtcagatcattgccacacgcagtacagtgggcaaatataaaacagacgtgatgcgtgaccgcattctggatattaatccgcaggcgcaggtggaggtcagacagtgcttttatctgccggaaaatgccgatgaatttgatttctcagagtattcttatgtggtagatgctgtggatacagtgacagcgaagctggagatcattatgcgtgcgaagcagaccggcaccccggtgatcagcagcatgggggcaggcaataagctggatccgacgaagtttcaggtggcagatatttatgatacgacgatctgtcctctggcgagagtcatgcgccgggagcttcgcaaaagaaatgtcaaggatctgaaggtggttttctctactgagaagtcgattcgccctttggaggatatgagtatcagctgcaggacaaactgcatctgtccaccgggagcaaagcacaaatgcacagagcgccgcgatattcctggtagtgtggcatttgtcccatctgtagcgggactgattattgccggagaggttgtgaaggatctggcaggtccgttgccggttcaagaatagaagggatgatatccgattatgaatattgaaaagttagaaaaaaatctgagagacctgatcctggaggagcaggtgaagcttggttatcgtaaggagcttttgcgtctgtattatccgttatcctctctgaatcatctgctggaggtagattgtacggaagaggaaatgttggagaggatgaaggagttttcagagaccacaagagcgcattttggcgggattacagcatcttcccaaaaagaaagattttgcattcagattccaccggagggagtggagtatgtccatgagcatcaggaagaggatgatttcctggtgaaatttatagagacgatcgcccgtcacggctgtactctgaaggatgtggaaacgctttttgcacagtattcggatcaggtgtttgagggcagttatgcaggggatgattttgattatgtgttctattttcgggacagtaagccgaatgattaccgctattgcatcaccttcgagggctgccacgtgatctatcaccggtttaccccggaggattatgtggactttgactttggagaggtcacaccagtcgtgtgttcttaaatcgtgcgcgaaggcaaaagtgaacatagagattgccagatgccgatgcttgcatctggtagctggcagatcgatatgtgaatgcgcccgcgagtgagaaaaagcgaagctttttcgaaccttttgccggagcgttgcgaaaattcattatgggcgaaatttgaaaatagaaagaggtaaattatgtttacaggtactatatggtcattgctgccaccgatcctggcgatcatgcttgctttgatcacaaaagaggtttacagttccctgtttgtgggaattgtagtaggaagctttatgtatgcgcagtttcatccgtggactgcattcaccgtgatctttgatactatcaaggacagcatgaatatcaatattttgtttttcctggtaatgcttggtatgattgtcgtgctgatgtcccgctccggcggttcggcggcttacggaaaatgggcgatctccaagatcaaaaacaaaaaggttgcacttttggcgacgatggggcttggcgtacttattttcgtggatgattattttaactgtctgacggttggctcggtgatgcgtccggtgaccgaccggtacaaggtgtccagagcaaagcttgcttatattattgatgccacggcagcgccggtctgcatcattgcaccgatctcaagctgggcggcggctgtcaattcctatgtgccgaagggatcctcgctgacgggcttcagtctgtttctgcggacgattccgtacaatctgtatgcaatcctgacccttttgatggtgctttatctgatcctcaccggttttgatttcggtttgatgaagaaacatgagatcaatgcggagcgcggtgatctgtttacgtccggagaggatgcactgaaggaggagaagcaggaagaggttaacgaaaagggacgtgttgctgatctggttcttccggtagtgcttctgatcgtatctgcgatcggtgccatgatctataccggatatttaggaggagcaacgaatgtggtcgctgcgttctccggctgtgactctgagcggagcctgatctttgcaggacttgtcacgatccttttctgtttgatctggtatcttccgagaaaggttctgaactttgacgatttcatggaaagctttgtggagggatttcgtctgatggttcctgccatggcgatcctgacctttgcgtgggcgctgaagggaattggtgatcatcttgagatcagtacatttgtgaaaagtgttgtcggacagaatgcttcggcaagtatgtttataccgatgctcatatttattattgcaatctttctggcgttttcgaccggaacgagctggggaaccttcgcaattcttgtaccgatcgtaattgcaatgttcccggagcagggacatatggagatgatgatcatttcggtgtcggcggtactggcaggtgcggtatgcggcgatcatgtgtccccgatttcggacaccacggttatgtcctcggcgggagcacagtgtaatcatatgaatcatgtttcaacgcagcttccgtatgcggctgtcgtggcggcagtctgcgtggttggctatatactggcggcattcatccagatctggtgggttgttctgaccttaagcgcggcaatcctgctggcggtgctgacggcgatgcggatatggcttcagaagaaagcgtgatcttaaagagagacaagtttcatcatctgagggttatttggggacagtctagccgactgcctcagataactctttttttgcctcttgttcctctactcttttaatcataatatacacatctccttaaatttcgatttgtcagattcataaaacactattttctataaattgtatcataatcacttaattcgaaaatgtaattattgtttatagtttgcttcaagccatctggcaacaccatcttcgtcattcgacaaaatcacctctgttgcatattgttttaattcatcgtgtgcatttgcaacagcataacttttatcagccatttgaaacatgtctatatcatttttttcatcaccaaacacaattagcttttcgcaattcaacatgctttgtaattgccttatagcatttgattttgatgcctctaacggcataatttctaaccattgttcatttgtataaatatccgtttgatatacacaatgatatttatccttatatttatcatacaaaggcataagcttttttggctcatcaatacaggtaatataaaaaatatcaccctctttcaactcagacaatgaattcacctcatttgttcgaacatcgcctctacggctttcgaggaacatattcataccctctgtacacatttttcgcacaaacgaaaatttttccaccccattaatgtatgcgtaaacaatgggatacacgttattgctaaacaaatcttctagcacggaatgtacggaatcatcaaaataattagcgattaatattttttccgtaatattatcaatcacaaatgctccattatacacaattaacggaatttttgcatttattcctgcggtcacttttttcgctgtaactaaagaacgtgccgtagcataggaaaaaatcatcccttctttaaccaatgaattgattacttgatttgtgtatttagaggttacttcgttacttctcaataatgtcccatctaaatctgaaacatacaaatcactcatgcattatcctccgtcaacttcatatttttcacttcccattgtaccatgcacaattctcacattccacttatattttttgaagatcccgcatccgtccaatcctgcatctcacctgtcaaaactaagctggcatattccatagggttgtcaagagccatatataaatttcatggctttttcgtcctttcgttttattacagataagccggttgtttttaaggttaaaaccaaaaaactatttgtatatttactattttttggtataatctataagggaagagatcataggaatgttctgtcgccgtttgaagacggcagattatattaggaaaggtctgggtattatgattataagaaatgattatataaaagcagtagaaccctttatagataagccggtcgtaaagattttgacaggtgttcgacgttgtggcaaatcaaccattttccggatgatcaaggaagaattgatccgcagaggagtatccggagaaaatatcattgagaagcggtatacggaaatggatattccggaggatataacggcacagcagatgtatcaggagttgatcgaagcaataggggagaaagagcactgctatctgtttctggatgaaatacaagaggtgcataattgggaaaaggcagtgaacagcatactggagaatggcaaagcggatatttatgtgaccggatcaaattcaaaattaatgtccagtgaaatttccacttatttaacggggcgtttcgttgaaatccctgtgtttacattatcttttagagaatatctggaatttaagaaagaacgtgcgatgtcgcagacggaactgttggaagaatatattcgattcggaggctttccgatcattgcacttggtgaatatgaggaaacatcagcatatcagatcgtgaatggtatttatcataccgtcgtatcccgtgacattgtaaaaaggcatcagatcaaaaaacaggaattatttgatcgtgttgtgaaatatattattgaaaatacaggaaaaactttttcagccaattcaatttcgaattttttgaaaaatgagcatagaagtgtttccgtagaaagtgtttataattatttacgctggcttcaacaggcatttattatttttccctgtgcacgttatgatcttcagggaaaaagtgtcttaaagacgcaggaaaagtattacctcgcagacatttccctgcgttatgctttacttggttataacagaaaaatgctggacagtacaatggaaaatatcgtttttctggaactaaaacggcgtggatatgatgtatttataggaaaaaatggaacgaaagaaatagattttatggcagagcgcagggatgaaaagatatatgtacaggtatgcgtacagcttccggtaaattcagaccgcgaaatagcaaatcttatggagatcagagatcattatcccaaatatgtcgttacgttaaacaccatggatacaggaaacgagaacggcattcgcatcgttcatctggcggatttcttgttgatggataaattttaa

SEQ ID NO: 421 - DNA, 10156 bp, unidentified
  source 1..10156: mol_type = unassigned DNA
ttacagcatcatgatgagccgcgtaccgaaggccgccagccatgctacgatgcactgatttgccaccatgataagcgcccacttgccgcccagctcccgcttgaccgaggccaccgccgcgatgcagggcgtatagagcaggcagaacaccagcaggggtgcagcagccgccggggacagcgcagcggcaaaggccgcagaggagccatagaggatggtgagggtcgaaacgacgctctccttggccataaagccggtgatcagggccgtagacacccgccagtcggcaaagcccagtggcgcaaacagcggcgcgatcccgctggccagccatgcaaggatgctctgctgcgggtcagcggtgaggctgagccgcaggtcgaagctctgcaggaaccagatgatgatggtcgccacaaagatgaccgtaaaggcgcgctggaggaaatcgcgggccttttcccagagcagctggaccacattcttgaggccgggcaggcggtagttgggcagctccatcacaaaggggacggcctcgcccttaaagacactgctcttcagcaggatggccatcagaatgcccaccgcaatgccgaggaaatagaggctgaccatcaccagagccgcgtgctccgggaagaaggccgccgcaaacaggctgtagatgggcagcttggccgagcagctcataaagggggtgagcaggatggtcattttgcggtcgcgctccgagggcagggtgcggctggccatgacgccggggacggtgcagccgaagccgatgagcattggcacgatgctccgccccgagaggccgatgcggcggagaagcttatccatcacgaatgccacgcgggccatgtatccggtatcctccagcagagagaggaagaagaacagggtcacgatgatgggcaggaagctcaacacactgcccacaccggtgaagatgccgtcgatgaccagcgagtggacggctgcgttgacgttccacgccgtgagggtggagtccgccgcggcggtcagggcatcaatgcccatttccagcaggttctggagcgccagaccgatgacgccgaaggtgaggtagaacaccagcgccatgatgcccacaaaggccgggatggcggtatagcggcccgtgaggaaccggtcgatccgggccgagcggagctgctccttgctctggcggggcttcacgacggtctgctccaccagctggtggatgaagtggaaccgcatatccgcgatggcggcggcgcgatccagaccccgctcctgctccatctggacgatgatgtgctcgatcatctctttttcgttctggtcgagcttcagggccgcctcgatgcgctggtcgccctccacgagctttgtggccgcaaagcgcaccgggatgcctgcggccttggcatgatcctcgatcaggtggatgatgccgtggatgcagcggtggactgcgccgccgtgatcctcctcgccgcagaaatccatccggcccggccgctcctgatactttgcgacatggagcgcatgatccaccagctcgtccacgccctcgttctttgccgcagagatgggcacgaccgggatgcccagcatggcctccatcttattgatgcggacagtgccgccgttgccgcgcatctcgtccatcatgttcagcgccagcaccatcggcgtatccagctccatgagctgcatggtgaggtacagattcctctcgatgttggtggcgtccacgatattgatgatgcccgtgggcttctcgccgatgatgaactgccgggtcacgatctcctcgctggtatagggcgacatggagtagatgccgggcaggtctgtgacctccgtattcgggttattccggatcgcaccgctcttgcggtccaccgtcacacccgggaaattgccgacgtgctggttggagccggtgagctggttgaagagggtcgtcttgccgcagttctggttgcccgccagcgcaaaggtaagggtcgtgccgtcgggcagagggttctcgccctttttggtgtggtagcgtccgccttcgccgaggcccgggtgctccaccggcttttcactttctgccgccgcctttttcaccgccggggctttggccagagtgaccccgatgcgggcggcatcgtccagccggagggtcagctcgtagccgtggatgctcagctccatcgggtcgcccatcggggcaaacttgaccagcgtgacctcctcaccggggatcagccccatatccagaaaatgctgccgcagagcgccttcgccgcccacggtcccgaccacggcggtctcgccgatgttcaaatctttcaacgtcatatggaatgttcctctcgagcgcgtttgttagtttgcattaacaacagtaatataggctaactttccggcgttgtcaagagaaacggggctgttctgaactgttctctgaaaaaaatcatgccgccttcctcgaatatccgaaaaagtgcaaaaaataagagcctgtacccgggaattacccgccgtacaggctcttatcgtcttttattcagttcgcggtgtggtagccatcagggttcttcttctgccagttccagctgtcggcgcacatttcctcgatgccgtactcagccacccagcccagctcgtttttggccttggtggggtcggcatagcactcggcgatgtcgccggggcggcgggcctcgatgacgtaggggatgggcttgccgcaggccttctcgaaggcgtggatgacatccagcacgctgtagcccttgccggtgccgaggttgcagatgaagaggccgcagttcgtttccagcttcttgatggcgcagacatggccgcgggccaggtccacgacatggatgtagtcgcggacgccggtgccgtcgggagtggggtagtcattgccgaagacatggaccttttccagcttgcccacagccaccttggcgatgtagggcatgaggttgttggggatgccgttggggtcctcgccgatgaggccggacttgtgggcgccgatggggttgaagtagcgcagcagagccacgttcagggtggggtcagccttgcagacatcggtgaggatgcgctcggtcatggccttggtggtgccgtaggggttggtggtggcacccacggggaaatcctcggtgatcggcacactggcggggtcgccgtagacggtggcggaagagctgaacacgaagttgtggcagttgtgcctgcgcatcacatccaggatgaccagcgtgcagttgaggttattgtagtagtattcgatgggcttggacacgctctcgccaacggccttataggctgcgaactggatgaccgccgtgatgtcgggacactcggcgaagatcttctccacatcctcgtgtttggtcatatcggcctgatagaagcggaagtccttgccggtgatctgcttgacgcggtcgaggaccacaggggatgcattgtagtaattgtccgccacgacaacgtcgtagccggcattcaggagctcgatgcaggtgtggctgccgatgtagcctgcgccgccggaaaccaaaatagccatgtccagtacctctcttgttccagatgttgctttgcgcagagcccttgtgctctgtctgactaaaggataccgctttttgcacagagaatcaagtaccggcttttttattaaaatgtatttttgttgcatcttttcagccagtctgatgaactgcaaagatttttagtccgcaaggcatggagaggacacgcaaaggacagcaaaggacagctcccgcaagagagctgccctttgctgcggctgatatttgcttacaaacggccgcactgacggccggtgaagaagcggagcgtagtgttggcccggaagactttgcctgcccgcagcaccgtcgtcgggaactccgggtgagaggggctgcaggggaagtgctgggtctcaagggcaaagccgccgtacttttccagcgggacgccgcccttgccgggggaggggcagttctgcaggaagttgccggtgtagagctggatgcccggctgggtggtgtacatcttcatgctgatgccggtcttgtcgctggacgcccaggcgcagaggctctggctggcaccccggggccggtcgaggacatagcagtggtcgaagccgccgcccgccatggtggtctggtagaagccggtgtcgaggtcgcgtcccagaggctttccggtgcggaagtccatcggcgtaccgtccacgggcaggatcttgcccgtggggcaggtctcgttgttgccctcgaggtagttggaagcgtaaatgcggagcttctggcccagcacattgccgccgccgtcgaggttgaaataggtgtggttggtcaggttgatgatggtgtcctcgtcggtggacacacggtagtccatccgcagggtgttgtccggcgtgaggatataccgcacactgaccttcagatttccggggaaaccgtcttcgcccgccgggctttcggtctccatcaaaagggtgtcgccgaacatcttcacatcgtaaattttgcgggggaaggtgccgtgcaggtgatttttgccattgttggcttccagcttgtaggtcttgccgctgagagaaaattccgcattttcaatgcggttggcgtaccggcccacgaacgcaccgcagcaggtgctgccggatgagttgaaatccgcctcatagtcggcgagggtgtcgtgcccgacgaccacatccaccatacccgtttttgtagggacgaagagatttttgatcacacagccatagttcagcacgctgatctcaagtccaccgggattggagatgatgtattcatccaccttatcaccgttttgggtcacaccaaagggcttggagcggaactgtgccataaggctcgcctccttcttcattattttcggtcagggcagcgcagccccggcctcatccataactatgattatagcacagttttccagccttgtgtgagaatgattttagatttatcttccaaaatttcgagagattttttggacatattgcctccctctcaggcgctgacgcgccagctctcccaaagggagagccattggcatgacggtcaggtctgagctgcccgcttgggggccactgtggcgcaaaagggcgggccctgctatccccgataggcggtgctttcccggcgcgccccggacgctgctgctatcagggaacaaaagaaaccgccgcacatcagactgtgcagcggtttcggggcagatacttattctatgtgagctcagaaagcccggaccacggtgggcggcttatttttcgtagatgacgatcatgtagcagtaggtatcaccgccgtcctgcacacggtggacggccacctttacgctcgtccagtccgaagaatagttggtataaactctcacgccgcctcgggagcaatggagcacataggaagcctgggtgatggcactgcccgccgactcgggcatttttgccgcataaaactgcacgctgacgctggtgctgtaatccttcagcgcctctttcagcatggcaataccggcagcgctggagttgtagaaatactcgcccgcagcgttgctggccagataaccggtagatccgttgaaccattttgccttgtttgcccgtaagtcctcatcgatcttctcaagggcagccggggagacatcgtaggtcaccttcaggtcaggttttcctatctggccccggagataatctccgtaggccttttccatggcacgctcggtcaccttgccgccgccgcagccggtaagcagggtcagtgccatcatggccgcaagggccagagacaggatacggttgagtcgtttcatagtatgcgtcctccttatagtatggcggtgttccagcgaagcatcgacacctttttcttattataccccccccccctacataattgtcaataggctgtccatgaatgctcccgccaccgacatgatcctacccggagcgagacggagagggctttccaggacagtgctctatcaaagagccttcctatcgccgtgtgggcggcccaccggcagcgggctaaccctctcaggcgctttgcgccagcaccgggttgcggcgtgactgagagggctagcccccccaaaaagaaaccgccgcacatcagactgtgcagcggtttcggggcagatacttattctatatagataggagacagcctcaggcctccggctgggcgggctgagcctcggcggcgttcgactgcgcgatatactcggcggcatcgtcggggatgtcgtccatcccgtcgtcacccacatcgaccaccagcggcggcttcttgaagaggatgtcgtagaggatggggacgatgtacagggtcatcagggtggcatagctcaggccgcagatgatgacgatggccatgccgctcatgagctggctcgccatatcgttgctgaacaccatctgcagcatggccagaacggtggtcagggtggtcatgaggataggacgcatacgggtcttgccggtggcgacaagggccgcacggcgctccagaccacccagacgcagctggttggcgtagtccacgaagacgatgccgttgttgacgacggtacccatcaggacgatgaagcccatcagggagatcatggtcagctgctggccggtgaccagcatacccagcaggccgccggtgaaggccagcggcaccgtgaacaggacgatgaagggggacagcaggctctggaactgagccaccatgaccagatagacgaagggcagggccagagccatccactgcaccatctcatcgaccatcatgttgacggtggaggactcgccgtccagcgagaaggagcagccctcgggcatctcatcggtgagggcgaaggcgtccagcttcttctgcagcacgcgggactggaccgtggtgttgtagccgtccagcgtgtctgccgtcaccgtgatgtagcgggtctggttctcgcttgtgatggagtcgggggcagtacccgtcgtccagaaagcaatatcgcccagcgtgcaggtgccggtggtgatggtgccggtggcgtccataacgctggtggtgaaggtcatgtccatcatgttttccttggtcacagggtcaagattatcgctgatctggactttcatggtggagccgtccaccgtgacgggcgtctccgccgtcgtggtggtggtgagcttggcggcgatctgctggtagacctgcgcaaccgtcaggccataggcgcggaccttgtcgcggtcgatgtccagattgatggtcgcatcgccctggccgaggccggtggcggcattggtgaagccctcggtgtcgttgaccatctggacgaccttatcgcccagtgcggtaatggtatcggcgtcagggccgtagatcttgaccgagaggccgctgctcagctggctggtcagatcctgcatgccgctgatctcgacggtgccggtgcagttctcgacgccggaaacggcatctttcagggcctgctccacggcggcgatccgggtggaggacagggactggtccagcatgacgttaaaccggtagctgccgtagctgttggcggcgctcagcaggtcggtgatagcgctgggcaggcccagctgaccgatgtcgatgccggccacagtggtatcggtggtgacgcccacctctttcacgccgtccacggccatgacagcctcgacgacctgtccggccacaccgtaggattcctctttggtcaggccgtcgtcggtggagagggcgatggtggcctcattgctggaaatttcgggcagaaggacgacgcccatggagaagaccttccagccgcagaaggccagcagcacgacagcggccagcagcggcagagcgcggtgctgctggcaccactcaaggctgtgggcatacttatcctggatcttttcgaaccagaccagacgcttcggctcagcctttttcaggacggtggaagcagcggcaggcacgacggtgatggccacgatgagagaggccatcaggcagtagccgatgcacatggacatgggctgcagcaggctgcgcaccgtgccggaggcgaacaccaccggcaggaagacgcagaccgaagtaagggtggaggccacgaccgacatgcccacctgacgagcgccctgcacggcggcgcgggccgccggtacgccccggccccgcagacggtagatgttctcgatgacgacgaccgagttatccaccagcataccgacgcccagcgacaggcccgccagcgtcatgatgttcatgtcgaggccggtgaagtacatcagagcgacggcgaacaggacggacagcgggatgctgacgccgaccacgagggtgggcttgatgtccttcaggaagatggccagcacgatgatggccagcgcagctcccaccagcatactgctgatgatgctgttgacgatgatggtgatgtagttgccctggttggacaggacgacgacgtgaaggtcagaatactgggcctgcagctccttgaatgccttcaggcagccgtccgagacgctgctggcgctggaattggcgttgcggaaaattttcagcaccacggcccgctccccgttcaggcgggtgtagctggcctcggcgttgtcgatgacggccacgtcggccacatcggagaggcggacatcgccgaagccatcaacgtggagcagaagtgcgccctcgatgtccgaaacgctgtcgtactcttcgccgaccttcagcagccaggactcgccgctcttatcggcgacgtagccggcaggcatcgagaagttctgggcgtagatgagctgggcgagggtcttgatgtccagctgcttggccacgtcggcgctggcaagagccttttccttggtctcctcgtagagctgcttggcgtcttccagctggttttcgtagtccttcagcttctcccgggcctcggtgaactgcatataggcgctgagctgctggctggaatagctgcccagagcgacggagaactggttcatcaggccggggacattgtccatggctttgatgacctcgtccagagtcttataaatggtgctcaggctgttggagacttccagctcgttggcaaggtcggagacggtgccgtcgctggtacccagacggccctgcagctcctgcagagcggcggtgagcttatcggtgatgtcgcgcagctcgccgacgatctcgatgagggagtcgatgtcccgcataccggtctggttgaactggtccacgacacgctgcaggccgtcgcggacgtcgatgagggcctgctggatctccggctcattgaccacgccgatgagctggttgacgctgttcagcaaagcctgcgcctggtcgcgcacgacggtgacggcgtcggccacctctgtacccatctgggccatgaccgtatcggagacggtgttgccgaagtttttcagctgtttttcatactcggcgcggcccgcggcgatctgcgcctcagcggcgtcgagccgggcgcgggcgtcggccagctgggtgtcgatgagctccagcaggcgggcgttcacttcgtctatcttatcctgattcagctgcacctgcaccatcttttcgatgaggccgttggctgacacgctggaaacgccgctggtgcggcccacataaggcacaagggtgttatccacgaagtccgacagatcgtagacatcgctgccctcccggctgacagccaccgtcataaaggcgttcatgttcaggctgtactcgatgatggagggggtcagacaggtgccgggcaggctggacgcggtctggtccaccttattggaggtcttgaccatcgcgctgttcatgtcggtgccttcggcgaatttcatgagcagaaggctgtagttttctgccgaggtcgccgtgatgctctcgacgccggacactgtacccagcgcgttctccatcacatcggagacttctgactccacacgctccgggctggcaccggggtagacggtgaccaccatgaggtatggcgtgctgatgtcgggcagaaggttcgtctgcatgttcgtgatggacacgaagcccagcagcaggaccatgatgaccgcaacaaggatggtgaacggctttttgacactgaatttttccat

SEQ ID NO: 422 - DNA, 14079 bp, unidentified; identical to SEQ ID NO: 287
  source 1..14079: mol_type = unassigned DNA

SEQ ID NO: 423 - DNA, 14318 bp, unidentified
  source 1..14318: mol_type = unassigned DNA
atggagatggaacagctctatgatgtgatcgtgataggtggagggccggccgggcttacggcggccctttatcttgccagggcacgctatcgcgtgttggtggtagagaaggagcatttcggcggccagatcactatcacgaatgagatcgtgaactatcccggcgtagcgaaaaccagcggtagagaattgacggacacaatgcggcagcaggcagagggcttcggtgcagagttcctgctggccgaggtcacggcttttgaactggacggagacgtcaagaccgtgaagaccgggcgcggagaataccgctgctttggcgtgcttctggccacgggcgcccatccgcgtatgataggctttcccggcgaggcggagttccgtggacggggcgtagcctactgcgccacctgcgacggcgagttttttaccggcaaggaggtttttgtcataggcggcggctttgccgcggcggaggagagcgttttcctgacacgctacgcaaagcacgtcaccatactgattcgcgaggaggacttcacctgcgccgaggctgtgtcgcgcgccgctaaagagcatccgaagattactgtcctctcccataccgcagtggtggaggccacgggcgatacggctctgcggagcctgcgatacagagatttgagaaccggagaggaaacggtttttgcaccgcatgaggataccttcggcgtgtttgtgtttgcgggctacgagccggaaacggccttgatccgggacaagatcgagactgacccgagaggctatatcgttacggacggctcgcagcggacgagccttgagggcgtatacgccgcgggcgacgtgtgcgtgaaggagctgcggcaggtggtcaccgccgtgggcgatggggcaaaggctgcgactgcgctggaaaagtatgccgcagccatgcaggaaaaaactggtcttcgcccccgaaagcctgagataaaagaaacgaaggcggcatccggcggcgaggctcagcccgaggggatattcccgcagcaggtaatgcagcagcttgaggcagtatttgaaagaatgcaggagcccctgatactggagctttgccttgacgagaaggctgtttcagaggaactccgctcctatatggaggagcttgcacgactcacacccaaactcacagtaagaaaatctaccgaaggcgctgagcatatgccgctggtgcgtgtgctgcgctctgacggcagcgactccggtctcgctttccacggggtaccgggcggacacgaatttacttcttttatcatggggctttacaacgtggccggaccgggacaggctcttgacggggaaactatgggccgaataaaggcgcttgatgcgcctacagatatgcagatattcgtttcgctgtcctgcaccatgtgcccggaactggtgatcgcagcccagcacatagccgccctcaaccctaatgtcagggcagaggcatacgatctgaatcacttccccgccttgaaggaaacgtataatgtcatgagcgtaccctgtctcgtgctgaacggcgaaaaggtactgttcgggaaaaagagcataagccagctgctggacacgctggaacagcaagagcaaaagagccgcacatcggatctgcccgagggatgatggccggaagcagtacatatcagttacttgagtaaccgctgccggcccctgcgctgacaacggcgttgtgataaccggggttgatatgcgactgaagccaaggcaggctgcacacaggcggcctgccttttcttccgccaagcggttagagatggctaactaaaatacagagcagaaaggaactcagagcttgaacagggaaaaggagatcgaaaccgttactctcatggtgcgccggtattgccggggcgtacatgggacaagggacggggtactttgcccggcgtgtgccgccctgccggaatatgccaggcagcggcgggacggatgcccgcatggggagatagacagccgtgagtgaacaaaaaagtttctgggacagaaatgccggttgttacgaccgctttatgcgaaaggatcgggcggcgtatgaggagatgtatacgctgatccggccggtcgtgaaagccaagacggtactggagcttgccaccggtacgggactgatcgcaaagcacatcgtgaatgcggcggcgcacatcgaggcgacggacgcctctgcggagatgattgcagaggccaagcgggacgaccgctcggcgaagctgcacttttccgtgcaggatatgttttgcctgccctacgcggataagtcctttgatgtagtgatcgtgtccaacgcgctgcacatcgtgccgcagccggagaaagcccttgccgagatccatcgggtactgaaagaggacggcgtgctcatcgcgcccaccttcacccacgcggggaactcgttttccggcaaggtcaaagcctttttcatgaagctggcgggctttcccctccacagcaggtggacgagcgagggatacctgcgtttcctgcggcaaaacggttggtcagtgcggaaaagcgttgttctgaaagcctcgttcctgctgacctatgcggaatgtgtgaaatcggaggggcaggatgttattttttgagaacacccgcaagcctgtggggcttggcgggaagctcatggtcgccatgatgaatgtcgggcacagtgccgtggcccggtgggggcttcaatttctgaatgctgcgccgttgtgcaaggcagtgtggcggatatgatcttcgcagacgactggttcgatgcggtcacagcctttgagatcctctatttctggcccgatctgccgcaggctgcggttcgtggactgcaacaagccgttctggaggaaacggatggaccaggcatttgtgcgggcgaaaggcggctgcgacaaatggcacgattacgagatgacgattgcgccttacgaaaacggccagcgcacttgtcctgtcccttggcatcgccattcagaattttcccgagggggcgatcatctccatgccgctccgggcggagggcgagagcaagggcagggcgtttctcggcggcgtgctctccggcgtggtggagcccatcggcgcggtgctgacgattcttgcggcgctgccgtattttctgagcttcgcggcgggcgccatgctctataaggcattggcggagtaagaaatgatgcccgccgctgacgacaactttagcgacagcttgcgcggtttgcgtttgccaaacagcctatccgaaaaggcagggacaccacttgcggggttcctgccttgcgctgtatggcgatgcttggagtattgaaaagaatatgcgcaggcatccaggacaggcggacagagagtctctgcattgaactgggcaaacagaaaaatcacaaacctcattgacaaactcgatctgctcggttataatataccagtagtatatactgctggtatatcgggaggcatcaatggaacgtacagagactcaaatgaagatcctcgaagtggggaaaaaagaatttctggaaaaaggattcaaggacgcatctctgaataaaatcgtcgcagaggcgggcttcacgaaaggcgccttctacggctattacccggataaggctgcgctttttgaagatcttgtgggcgaggcggcaaagggactgttggagcagttcaaagccgcacaggccgcccatttcgctcttgtctccgaggaaaagacgaaggacagcctgaagctgtccactgagtatttgcgtgtctttgtggaatatatgtacgcccattttgatgccttcaagctgatcctctgccgggcggaaggtacgcgctatgcaaatttcttggaggagcttgtggaactggaggtagagtgctcagaggaatactacgcacttctccgcaaaagaggaaagctctccgggaaaatgacaaagcagcttcaccacatgatcaccagcgcctattttacggcggtatgtgagacgattgcccatgatatgcccaaagatgaagcgatgcggtatattgaggagcttgcaaagtttttcaactctggctggaaaggcttgctccggctggaataatgcacgatcacacaagcgctttaatttttttacacgcgagttagcatattctaactaaacgatataaaattggaggtcgtttattatgcttaaaacagattcgaagaagctggaaacaagggactttatatcagtgggcatcttttcgctcatctatgctgtggtggcgtttgtggttggcggtgctgcgcagatgacgccggtcactttcccgtttatgccaatgatcgtggcgctctttacggggacagttttcatgctctatgtggcaaaaataccgaagaagggagctctctccattctcggtgtaatcgcggcgatcttgctgtttgttacaggaatgttctggatgatgtccgtattcttcctgggcttcggcgtgatcgcggatattatctgcgcttccgctgatttcagatcctttaagaaaaacctgcttgcctactgcgtcatggcgcttgcgccgatgggggcatacattccaatggttgtcatgcccgcacagtttgatgcttttatgaagaataaaggtgacttctcctcctttgaaggagtgattcattcgattggggctgcctggtgggcgatccccgcaatgattatcgggacgatcgtctgcgcgatcatcggcggactgattggaaagaagcttatgaaaaaacactttgaaaaagcagggattgtataaatgagactcgacccacggacgaagcttctgattctcgcggtcacaagcgtttccgtttttatgaataaaagcatcgcggtggagtgtgtgcttgcggggattccgcttgtgcttctgagcacttccggcaatctgaaaagaacgctgaaatacgcagctttttttctcacgcttctgctgatccagctttttatcgtaccgaggctgcccgtgactttcggcgggatcgtctatatgtttgcagtgtatatccgcaagcttcttccctgttttatgctgggcagctttctgattgcaacgacaagcgtaagtaaatttcttgcggcgatcacaaagctccgattgtcgaaggggctcacgatcgctcttgccgttacgctccgttatttcccgaccatgagagaggagtgggcctccatacgggatgccatggcgctgcgagggatatcagcgtccgcggccgggctgatcagccatcctgtacagacgatggagcatgtctatgttcccctgcttgtttctgcttccagaatttcggacgagatcacgcaggcagcgattacaagaggcattgagcacacaggtgaaagaagctgtatagaggaaatcgcgttttcgtttgctgatttgctggtggtgattgcttacgctgcgctcgttgccggcatggtatacgcgggcatgaaaggggtgttttgattatgatatcgtttcaaaatgtctcttttacatacgctgaaagcgggaacggcggagtccttgatttgaaccttatcgttcggtccggcgaatgcgtgctgctttgcggaccatcaggatgtggaaaaacaaccgttacacggctcgcaaacggactgattccccatttcttccacggcaatctttcggggcaggtgaaggtaaacggtatggatacccgggagacagagattgctgcgctatcggatgcggtagggacggtttttcagaatcctcgaacgcagtttttcaatacggatacggacagcgagatcgtgtttgggcttgaaaatcggggcattccgcgagaggctctgcgctcccgattggatgaacttacggaggagctgcatcttagcgggctccggggtcgaaatatctttgaactgtccggcggcgagaagcagaagatcgcgttttccagcgtgtatgcttcggctcccgatgtccttgtgtttgacgagccatcatcgaatctcgacatgaaggccatcggagaattggcggatttgctccaacgggcgaaaatatcaggaaagaccattctgatcgcagagcaccgcatctggtatctgatggacattgtggaccgcgtcgtttatatgcaggatggccggattgcgtcggacatggaggcttcagcgttcaaggcgctgcctgaagcagatattcgcagaatgggactgcgtgtcaggaatctgtcggtatccgaatcgggcggcgtgaaaacaatcgctgccgatggatcgctttccgctcagaaaatcagcgtccgtctcggcggccggtatgtattgaatgatatctcttttcaggcaagccgcggagaaatcatcgccattgtgggcgccaacggcgccgggaaatcgaccctcgccagaatgctctgcggattgcaaaagaacgtctccggtactgttttgtgggctggaaaaccgatgagccggcggttgagacggaaaaaggcatacatggtcatgcaggatgtggggcaccagctctttaccgacagcgtggcggcggaatgcgcgcttggcataaaggccccgaacaaagacgagatcgaccgcgcattagaaaaggtggatctgctggcgtataaggaacggcatcccttgtctctttccggcgggcagatgcagcgccttgcggtcgtggtgagcgatatctgcggcaaggagctgctggtgttcgatgaacctaccagcggactggatctgaaaagcatggaagaggtcggaaccttgacacgaagccttgcgacgcaaggcaaggtgcttttgatcatcacacatgatattgagtttatgatgcggatctgcacaagaatactgttcatccgggacggagaaatcgcggaggacctttccggtggacagaaagaaaagattgtaagacttttgcgaggtgaggaatgatggcgggaaaagaaaactcggcgatgacgattctgatggattttgcgaagccgtgcaaagggaaactgatcggctccgttgtatttgcggttttgggggcgctttgcggcatgatcccctatatcgcggtgtcccgcgggatcattatgatctgccacgaagactatgctttcagcaagttggcgtttctggcattgattgcgtttgcgggctatctcgggcaggtgtggttcggaacgttttctacaatgaaaagccatgagtctgcctttatcattctgcggaatatccgcatggcgataacagagaagctctcccgtgtccccatgggaacgatccttgatacgccgtccgggaaattcaaaacgatcatcgtggacaccgtggaaaagctggagcttccgctggcgcatatggtaccggagctcactgccaacatcctgatcccagttctaatgctcgtttacctcttcagccttgattggagactcgcgctgatctctcttgtgacgattccggtgggtgccttctgctatatgggaatgatgaaggattacgagaagagatatgccagagtacttgccgcagggaaaaacatggatgccgcaacggtggaatacatcggcggcatcgaagtggtgaagacgttcaatcagggtgaacgctcatataaaaaatacgccgacgccgtggcggaaaacgagacagccaaagtgacctggttcaagcagaccaacggctactatgtgatggggctttccatcctgacggcaacgcttgtgggcgtgctgcccttggggagctggctctttataaacggaagggtcgaagcgggtacgctgatcacctgcatcatcctcgcccttggactcgtaaaaccactgattcaggcattgcagtacaccgacagcctggccatggtggattccaccgtaaaagaggtaggggatcttctggatgagccggagcttgtgcggccgaccgagagagctgtccttgcggatgccgacgtatcctttgatcgtgttaccttccggtacaaagagacggaggttttgcatgggatttcctttgactgcgcaaaaaacggtatgacggccattgtgggtccctccggctccggtaaatctaccattgcgcggctcatcgcctccttctgggaggcggagagcggctgcgtccgtattggcggcgtggacgtgcggaacattcctctccctcagataatggagcttgtctcatatgtgtcacaggataacttcctgttccatctgtctatccgggaaaacattcggattggaaaaccggaggccacagacgcagagatcgaggcagcggcaaaaaaagcgagctgtcacgatttcatcgccgctctgccggagggctatgatacgctggcgggcgatgcgggaagccacctctccggcggagaaaggcagcggatcgccattgcaagggcgatcctgaagaacagcccgatcgtggtgctggatgaagccacggcatttaccgaccctgaaaatgaggccgttattcaagcatccatcgcagggcttgtagcaggaaaagctttaattgtcattgcgcatcggctgtctaccattacaaaagcagacaagatccttgtcgtggagaaagggaatgtcgctgcggaaggaacccatgaggagcttcttgaaacaagcgatctatacaaggaattgtggaaagcccatatgcagggcaaagataccgcagaggaggtggcgggatgataaggctgtttcaaagacttttgttgttctcgggcttacagaagaagcgtcttatccgctcttttcttgcatacctcgtcagctcattctttgagatgatcccaatcatggccattctaacggtgctcacaggaatcctgaagcagctttccggcgatgttatgcctgaaagcacgatctggatctcgcttggcatcatgatcgtttccattgcagggcgaatcgtgtttgtcgatctttctgccaatgccagaactcttggcagcttcgcgttcgggtcggaaaagcgcatggagatcggcgaacgcctgaaaagggcgcctatgggctatttcaatgaaaacaggctcggggatatcactgcggcggtgacgaccacacttggcgatctggagcagcagtccgttaccattatggaaaatgtggcgggcgggtttatccacgccatcgtgattggcgtttggcttatgatctatgagtggcggatcgggctgatctccttggccggacttgctgtggcgctccttgtttattcgcttatcggcaaggtcggcaggaaacacgcaccccgccgtcaggcagcccaggctggcctggtcactgccgttttggaatatgtgcagggcatgggcgtagtcaaggcgtttgggctggcggagcgcaccggaaaagcagttgacaccgcaatcgaggaaagcaaagaggcaaatatcgtgcttgaaaaggcgttttccaaaatgacggcgctctatcagacggtgttcaagctcgcacgggcggctattctggtttttgcgccctatcttttggcaggaggaagcatcacgccggagaagtgcctgctgcttctcgtgtccagcttcatgatctatgccgccgtggaggtggcgggcagtatgtcctccgttgcccgcgcggtggaggcttccctggaccggctggataacatcatggacattccatccctggacgaaaacggggcggatcttgtgccggaaaatttcaatatcgaagtgaaggatatgtcctttggatacggggaaaaggaggtattgcatcaaatcagcttaagcgtgccccagggaagctcctgcgccatcgttggtccctccggctccggaaaaaccacgctggtcggtctgatcgcccgtttctgggatgtgaaggaaggacagatcacgctcggcggccgggatgtgcgggaatataccagcggcagccttctcaagaatttcgccatcgtatttcagaatgtgtatctctttgaggacaccgtcgagaacaatatccggtttggcagaccggacgcaagcgaggatgaaatcatagcagtcgcaaagaaagcctgctgccatgactttatcatgacgctgcccgacggttatcagacaacgatcggcgaaggaggctccagcctctccggcggagaaaagcagcggatctccattgcaagggcaattctgaaggacgcacccatcgtcattttggatgaagctacagccagcgtggatcccgaaaacgagcaggagctgcaaaaggccatccgggagctgacaaaaggcaaaacgatcctgatgatcgcccaccgtctgtccaccgtgcgcacggcagatcaaatcatcgtgctggagaacggcaggatcgttcaacgcggaaaccatgaggagctgatgcacgaagacggcctgtacaggcgctttgtgggaatgcgcagccaggcgatcggctggacgctgaaaggcgggaaagcagatggatagaaggctagacaaaagatacttgaccggagcggtatctgcaatggaaaaacagtatggcgtggaaaagacaggcgcgatcatagaagatgcatggagacgttatgcggaaatcgtagacgaaaacgccgacgagccgaaaaagatgtatatgcatacgaggaaacgcatctatcctgccatcgccgcctttgacgccatgacgggaaatggaatctcccgtgaggaagcggcggcttttctgaatagatattatgaaaagcgggcagcgggcgttggtgcaaaaatccgaggggcaatgaagataccgggtctgtataagctggtgccgaggttctttgccaaaatgacaaaaagctcctttggagaggactgcggttttcgggctgattggatacgaacagagcaggaggaaatgtgcttcgacatgctggcctgcccctatcaggacacctgtgtgaaatacggctgcccggagatcgtggccggcttttgccgcgcggatgacgaggcctacgggcatatgcatccaaagctcaaatggggacggacaaagacgctcggacagggcggagactgctgtgattttagactgacgatagagtcatgaccctatggaaagacggatgagatacaagaccctccaatgctttcttgcggcgctgactatgatcgcgttcctcgctcctgctgcatatgcatccggtacaccggacgcatatgaggcaggcgcaaacgctgtttccgaaaagtatattggcaaaacggttccaggcgcgtgtgtcgtgatttcggaattgcggcggccatctgcgggtctttcacggggatcagctatgccgtaaagagaaaaaccagagcatcggtccttacgatcgttttatttgcatcgcaaattatagctgcgtggatgctcggattcttaacagtaatataaattaacagaaaacggaggaatggatttatggacaaaaagaaaaagtggacggtcaaggatgttattacaacggtattgctctccgcagtgctgatcgtgatccagctcgtcgtcaatatggtctgcatggccaacgactttgtcagcatggtactgtcggtggggatcaccatgttcctctgcgcgccggtctatatgctcatggtcagccggatcggcaagcggtttgtgacgctgatctatatgacgatcctcggcgtgattttcctgttgatgggcaactggttcttgcttccttattatgttctcgtggggatcctctgcgaggcgattctctggaaggaaggctcctgccaaaaaccgaaacggctgaccgccgtctggacagcggcaagccttttatacaacggggtcaatctgctgcccatctggttcttctgggatacctactacgattttgcgctggcaagcggcatggagcagagctacatcgattcctatgtgcgttactacacctctcccggctggctggcctttattctgctgttcacgacgctgatgggctttttaggctgcatggtgggcagccggctgatccgcaggcattttcagaaggccggcgtcctatgagagcggacgcatcctttgcggtgccggtcaagctgtgggcgctgctgtgcgtctttgccggagtgaccatcggcgggaatgtgctgctcacctgcatcctgaccggcggcgcgcttctttatctcgtcttacagcggaacttccgccttgccgcgtcctatggctgcttttatctgctgctggcgctgctgctctacggcatccgcttccacgggctgcgcatgccggtcttttcggagttttatgtcctgatgttctggaatctgtcaccgatctttctggtgtcatgggatctgatcaccacgccgccggggatgctctccgcgttcttatcccgcctccgtatgcccaccccgttcattctcgggcttcttgtggtctttcgcttcttccctaccatgcggacggagctgaaaggcgtaggcaggtccatgaaaaaccgggggctgaccgcggcgggacagctgctcgcacatcccgtgcagagcatggagtatgtgctggttccgtttcttcttcgggtattgcagcttgcggatcagctttccgtttccgccgttgcaagaggcgcggagcgtccgggcgtgcgcggcagctattatgagaaaaggatcggggcgcgggatcgcatcgcggcagccgcatgtgcgatagtcacggcttcctatttggttttggaaaggagcatggcatgatcgagcttacacgcgcttcctttcaatacgaaaactcggacagaggcgtgcgggacatttccctttcggtaaaaagcggcgaatgcgtcgtgctgacggggctttccggctgcggcaagaccaccgtgacaaggcttgtcaacggacttgcgccgtcctattatcccggagccttcagcggaagtgtgaggatagacggcaaggacatatcaaggctttccacatgggagatcgggcatttggtgggaagcgtttttcaggaccccaaaagccagttcttttcctccgagcttgccggagaggtggcctttccctgcgagaattacggcctgtccacccgggagatacgggagaggacggacgccgccatagaggcattgaagctgtcccgtttgagagacagggcagttgacgtcctctcaagcggagaaaagcagcgggcggccattgcgtccgtatatgccatgaagccaagggtctttgtgtgcgacgagccgacgtccaacctcgatgccgccgggacgcggcagcttgcgcagaccctttggcagctcaaggagcagggctttaccctgctcctcgcggagcatcggatcgactggctgatggggatcgcagaccgctttttatatctgcgggatggcagaatagcggccgagtatacaccggaggatctgctcctcctgccaaaagcggacatcttagggatgggcctgcgttctccgcacgagggaaagtgccctcccgctccctccgtattggacgagagccctgccgtcttgaagacagcagggctctcgaaaagaatatgcagagaagtcattttcgatgatgtttccctctcctttccgaaaggcagagtgaccgccataacggggcaaaacggcgcggggaaaaccacccttgcgcagatcctctgcgggctggcaaggcagacaaggggacatatcctgatagatgggaaaaaagcaagagcggcagtccggcgcagggagatctattactgcggcaacgacacgtcaacgcagttttttgcggcgagcgtggcggaggagctgctgctgaataccagatcgacagaagaaagcaagagccgtgcaaggaacctgctcgaagagcttgggctttacgagtacagggacgcgcacccgtccaccctgtccggcgggcagaagcagcgccttgccatcgcctgcgccgtcttttccggccgcgggatactgatccttgacgagcccaccagcggtcttgacgggcagaatatgcgcctgatcgcggaaaggctgaaaagcgaagcgcggaacggcagaaccatcctcgtgatcacccacgacagggaactgatcgagagctgctgcgataacattgtggaggttgaaaaacgatcatcatgaaaccgccaaggggcgctatgggatatccgcgccggagaaatcgttttccgctcctgccggcagctccaccgcgatggtcgtgcccttgtccgagctttcctccacccaaacggagccgccgtggaggttggcgatctcccacaccagagaaagtcccagtcccgcgccgccgtactcgcggctgcgggatttgtctacccggaa

SEQ ID NO: 424 - DNA, 9279 bp, unidentified
  source 1..9279: mol_type = unassigned DNA
atgagtaatgataaaagaaaagtgtacgttgtcggacataagaatccagatacggattccatctgtaccgcgatcgcttatgcaaatttaaagacgaaactgacgcagatcaggcatgaaccgcgtcgtgccggtcaattaaatgaagaaactcagtatgtactggaacgttttggagtgaaagtgccgttacttttatcggacttaagagagcagatcaaagatgtggatctaagggaaagcgaagagattaacggaaatctgtccattcgtactgcatgggaaaagatgaccgagatgaatacgcatacacttcctatcacaagagacgggatgctggaaggtgtgatcacgaaaggtgatatcgccaaatcctatatggatgtttacgataatacgatgctggcaaaggcgagaacccagtatcggaatattgcagccgctgtagaaggaaaagtggagacaggaaatgagcatggctattttcagaaaggaaaggtcgcaatcgcagcatccggtaaaaatcttatgacccgatttattgaaaaggatgacctggtgatcatgggagaccgggttgatgcacaacagtgtgccattgatatggatgcaagttgtatggtcatatgtcagggctatccgatctcggaagacatcctgcgtcaggcagagaaaaaacagatcgttgtgatccgtacaccgcatgatacatttactgctgcacagcatatcaaccagagtatcccggtccgttttttcatgaccagagaaaatctggttacatttcatatacgggattttgtggatgacgtaaaagaagttatggcaagaaaaagattccgtgatttcccggttctgggcaaccagggaaagtttgtaggacttgtatcccggagacgcctgttgaatgtgaagaaaaagcaggtgatcctagttgaccataatgaaaaaaatcaggcagtcgacggagtggaagaagcagatgtcctggagattatcgatcatcatcgcctgagcagtattgagacgatgggaccggtttatttccgtaatcagccggtgggatgtacggctacgatcgtatatcagatgtatgaagaaaatggaattgcggtggatgcagtcaatgcggcactcctctgttcagcaatcatttctgataccctgatgttccgttctccgacctgtacaccactggatgaggtaacagcgagaaaactggcagaaatcgcttcgatcaatattgaagaactggcacaggagatgttcaatgcaggaagcaatttgaaaggaaagagtgcagaagagattttattcctggatttcaagcagtttacggtgaatgatacgatgtttggagtcggacaggtcaattccatgagtgcagaggaactgaaagaaatcaaagaaagagttctgcctcatatggagaaggcacgtaaaaatcatgggctgaatatgatcttctttatgctgacgaatattatcacagaatcttcagaactgatctgctgtggagcagaggcgagagaaaaaatcatcagtgcttatgatctgcaggatgatgctgagatactgatgctcaaaggagttgtatcccgtaagaagcagctcgtgccgacactggttggtgcgttgcagcagtaaggagcaggaggaaaaaatggcaaagcagatatggaaaccgggaaatatggtttatccattaccggcggtaatggtcagtacaggagataaaaaaggaaatcagaatattctgacggtagcgtggacaggaactgtttgtacgaatcctgcaatggtatacatatcagtgcgtccggaacgttattcttatcatatgatcgaagaaagcggtgaatttgtgatcaatctgaccacggagaaactggcaagggcaacggatttctgcggtgtccgttcggggcgggatgtagataaatggaaagagtgtcatctgagtgcaaagaaagcacagacgctggaatatgctccctgtattgaagaggcaccggtcaatattgagtgcaaagtaaagaagatcgagaagcttggaagtcaccatatgttcctggcggaagtgacggcagttcaggcagacgaagcgtatctgaatgaaaagggaaagtttgaattgaataagacgggacttctggcttattctcatggagagtatttagggcttggaaagaagatcggtacctttggatacagtgtgaaaaagaaggcggaccggagacgaaagagagggaaaaagtaaatgatttcatttgaaaatgattattctgaaggggcaagtgaaaaaatccttcaaaggctgatagagaccaatatggaacagctttcaggatatggaaatgaccggtattgtgaatcggcaaaagaaaaaatccgtaaggcctgtgggtgtcctgaggcagaaatctacttcctgtcaggaggaacgcagacgaaccggattgtgatcagttccatgcttcagccttatgagggcgtgatcgcagcacagacaggccatgtaagcagtcatgaagcaggtgcaatcgaatcttccggtcataaagtactgacactgccacagcatgacggaaagatcgagccggaagagctggcagattatctgaatgacttttatggggatggaaatcatgaacatatggtgttcccgggaatggtttatatttcacatcccactgagtatggaacgctttatacaaaaggggagctggcggagctggcagatatctgcctggaataccatattccactttatctggatggtgcaagactgggatatgccctggcggcagatacggatgtgacgttaaaggatgtggcggattattgcgatgtattttacattggcggaacaaaagtcggtgcattgtgtggagaggcggttgttttcacaaaagagaatgttccggcacatttcctgacccggatcaagcaacagggaggtctgctggcaaagggcagactgcttggaatccagtttgatacactatttacagaaaatctttatctggagctggggcggcatgcgatgaaatgtgcggaaaagctgaaggcgatatttaaagaaaaaaaatatccgttttatattgattcgccaaccaatcagatttttgtagttctggaaaatgaaaaaatgaaagaacttgagaaaaaggtaaagttcagtttctgggagaaagcagatgatacgcatacagttgtgcgttttgcagtgagctgggcgacacaggaagaaatgatcgatgaattacaggagctgctgtaaaaggggctgatattcttgatttcagaagaatgaaacaggtggaattcgggaaaaatagaatagaaaaagaaatacatgagaatcattctcaataaaattcttgaattaaggagcagaatctgctaagatacatatggttagttaatactaactatgtgtgaatgaatcatggaagctccttttgccctgaaatacctgaatccagggcttgaggattcctaaagaaaggaagaacaggcaatggattatttagaaattgaaaaagtgattggaagagagattattgattcaagaggaaacccgacagtagaggcagaggtacatcttgcagatggaactgttggatttggtgcagcaccgagtggagcatcaacgggagaatttgaggctcttgaattgagagacggagataaagcccgttttggaggcaaaggtgtttctaaggcagtggagaacattaatacaattatcaatgatgcacttcagggaatggatgcaagtgatgtctatgcagttgacaaggccatgatccaggcagatggaacaaaggataaatcaaagctgggagcaaatgcaatccttgctgtatcgattgcaagtgcgagagcagcagccacatccctggatattccgctgtaccgtttccttggcggagtcaatggtaacagacttccggttccgatgatgaacattgtaaatggtggatgccatgcattatcttcaggactggatgttcaggagtttatgatcatgccggttggagctccttcatttaaagaatgcctgagatggtgtgcagaagtgttccatgcacttgcaggtatcctgaaagagcgtggacttgcaacgtcagtaggagatgaaggtggatttgcaccggcactgaagtctgatgaagaagcgatcgagacgattctcgaggcagtgaaaaaggcaggatacgagcctggaaaagattttaaaattgccatggatgcagcatcttctgaatggaagacaggcaaggttggcgaatataaacttccaaaagcaggaactgtgtatacatctgaacagttgatcgaacactggaagagtcttgtagagaaatatccgatcatttccatcgaggatgcactggatgaggaagactgggaaggctggaagaaactgacagcagagctgggagacaaagtacagcttgtcggtgatgacttattcgttacaaatacagagcgtcttgcaaaaggaattgagcttggatgtggtaattctatcctgatcaaattaaatcagatcggttctgtatctgagacactggaggcaattaagatggcacataaggcaggatatacagcaatcgcatcccaccgttccggtgagacagaagatacaacgatcgcagatcttgcagttgcactgaacacctgccagatcaagaccggtgcaccgagccgttccgagcgtgtagcgaaatataatcagcttttaagaattgaggaagaactcggagcaagtgcagtatatccgggaatcaaggcatttaatgtacagcagtaagtaaaaggaatactgccggataataaaaagatgtcggggtcaaaagcccccacttattatcatgctttcattgataatgagtgggggctttgtgatgattttttggtgttgagggaaattgcgttatgattttttatgtccttcgtccgcaagggcccgaatagaagagacatattctgatggcgtcatcccggtagaacgcttaaactgccgggaaaaatagtggatggaagagtatccaaggtattcagaaatctgagtaaaattcatctgtccgctgcggatcatggattttgcttcactgatctttaaggcagaataatattcaatcactcctgtcccttccgaatcccggaataatttctgcagacgggagcgactgatcaggttatcatggcagatctgctcaatcgttaaatgatctgccagatggctgagcagatagttctttatatgagagaataattctgcatctgtatttttggagagtgtccggtcagacagtggggtccgggaaacttctccggtcagaagagaattctgattacgccggtaaaggctgaggagaagttcttctaaatgaaggcggataagctgaccacagacaggggatgtatcttttctgatctgcagggatgtctgatagggatcgtccagccgtccttccaaaaaacttcctgcttctgcaatgattccggcaagcagccgacgttcagtttcttcgaggtgaaggatctttcctctgaaaaattccatcgcaggatctgtgcaggaaaaagagatcacgatcagattcggtgcgatctttccgtttgccttgacccagtgaaattcacccgggtagtgaaaagcgatttctccgcgtctgagagtatgggtaagaggacctgcaccaatctccacttctcctttatcaacgcatacaaactcccagaaatcatgggattctccgggaaaagaaaaggtactcatatattcaaaataatgaagggaaaacagctcttctatatgaaaaagatcctgaagctgaattccataatatttctttggatttgaaaaatgatctgtatttgcagctacaatatgcattctgagcctcctcctttttcaaaaatgttcttagtaaggatatcatagcattattttccgaaaatgcaaagagaaaatgcagattgtgcaaatgaaagataagatagtataaagatttttatggggttttatcatacaatagaagaagtgtaacatagaaagtgaaatggaggaatcaatcatgaaaaaaccggttcttgtaattatggcggctggaatgggaagcagatatggcggactgaagcagatcgatccagtcgataaagaaggacatatcattatggacttttcaatcttcgatgcaaagcgtgcgggatttgaaaaagttgtatttatcattaaaaaagaggatgaggctgattttaaggaagcagtcggcaacagaatggaaaagatcatggatgttgcatatgcatatcaggatcttcataacctgccggaaggatttgaagttccggagggtcgtgtgaagccatggggaacggctcatgcagttctgagtgcgattgatgaagtggatggaccatttgctgttatcaatgcagatgattattatggatgtcatgcatttgaagtaatctataattatctgacaacgcatgaagatgatgacaaataccgttataccatggtgggataccgtctgaaaaatacggtgacagataacggacatgttgcaagagggatctgtgacctgaatgatgcaaaagaattagttgcagttcatgagcgtacaagaattgagaagcgtaatggtggaattgcatattcagaggatgacggagctacatggacagaggtagatccggagacactggtttctatgaatatgtggggatttacaagaagtattctggatgagatcaaggcagaatttcctgcatttcttgaaaaaggactgaaagagaatccgatgaagtgtgagtatttcctgccatctgttgtgagcaacttattagagtctgagagagcaaccgtgcaggtacttgagtcagaagataaatggtatggagttacatataaagaggacaagccggttgttgtagaggcaatccaggcattgaaagatgcaggagagtatccgcagaaattatgggaggaagactaaagatgggaagagtgtctgaagcacagatcaatgaagcgattgcaaattttgattatgagggaaagcttttaagtaaagagccttttggaagcggtcatattaatgatacatatcttttaaagtatgagatttcagagatgggaatcctgaaagtgatccttcagcgtatgaaccgtgagatttttacgaatccggtagaactgatggagaatgtagtaggggttacgacgttccttcgtaagaagatcattgagaacggcggagatccggagcgtgaaactctgaatgtaatcccggcaaaggatggaaagccttactatgtggattctaagggtgagtactggcgttcttatgtatacattacggatgcaagcagttatgaccaggtagagaaaccggaagacttttacgaaagtgcagtcgcatttggacatttccagcggatgctggctgattatcctgcagagacactccatgagacgatcaagggattccatgatacaagagcaagattccaggtatttaaagataccgttgcaaaggatgtatgcggacgtgcagcagaagtacaggatgagatcaactttgtactggcacatgaagacgtggcaaatgtatttggggagcttcaggacaaaggaaaacttccgcttcgtgtcacgcacaatgatacaaagctgaacaatattatgatcgacgacaagaccggaaagggaatctgcgttattgatcttgatacagttatgccgggacttgcaatgaacgattttggtgattccatccgttttggggcaagtacagcagcagaggatgagacagacttaagcaaagtatcctgcagtatggatctttttgaaatctatgtaaagggcttccttgagggatgtgacggaaagctgacaaagaaagaagttgaacttcttccgatgggagcaaaagtcatgacttttgagtgcggtatgcgtttcctgacagattatctggatggagatcattacttcaagatccacagagaaaagcacaatcttgacagatgccgtacccagttcaaactggtggcagatatggaaaagaaatgggatatcatgcaggagatcgtagcaaaatataatcgctgatcgtgcaacatttttaccataagatgaaccaaaaatacaaggtatattcagagaatttatggtataatgtacctgtaagttgaaggaaagataacttgatcatattggttgaaggaggagttaaaatgtcaattttagtaaccggaggagccggatttattggaagccatacctgtgtggaacttctgaatgcaggatatgatgttgttgttgcagataacttatacaacgcatctgaaaagtcactggaaagagtaaaaaagattacaggaaaagacctgaaattctacaaagcagacattcgtgataaagaagctatgaatgagatctttgagaaagaagaaattgagtcagtgattcattttgcaggactgaaagcagttggtgagtctgtagcaaagccgcttgagtattatgagaacaatattggcggaacgattacgctttgtgatgttatgagaaaccatggtgtgaagaatattatcttcagttcttctgcaacagtatatggtgatccggcatttattccgatcactgagaaatgcccgaaaggaacctgcacaaatccatacggatggacaaagtggatgctggagcagatcctgacagatcttcatacagcagatcctgagtggaatgtagtacttcttcgttacttcaacccgatcggagcacataagagcggtctcatcggtgaagatccgaagggaatcccgaacaacctgattccatatatcactcaggtagctatcggtaaattagagcgtcttggagtattcggagatgactatgatacgcatgacggtacaggtgtccgtgattatatccatgtagttgaccttgcgatcggacatgtgcgtgcagtagagaaactgaaagagaaagcaggagtatccgtatacaaccttggaacaggaaatggatattctgttcttgatatggtaaaagcattcagcaaggcatgcggaaaagagattccgtatgagatcaagcctcgtcgtgccggagatatcgcaacatgctattgtgacgcatccaaggcaaaagaagagctgcactgggtagctgaaagaggactggatgagatgtgcgaagattcatggagatggcagagccagaatccaaatggatacgagggataa

SEQ ID NO: 425 - DNA, 9508 bp, unidentified
  source 1..9508: mol_type = unassigned DNA
ttacttccgcattccaagacaatggttaataaactgctgtgcggttcttcctgatatgcctccgtggcttaattcccacttattagcctcagccataagttcttcttctgacatatcaagtccatttttcttggcaagtcctattacaatattataatattccttattagatggtttagaatagcttatctgacacccaaatctattaacaagcgacatcttttcttcaatcgtatctgatctgtgaagtccgttagaagattccatatcatttctgtcgttccatgtttctttgataagatgtcttctgttagatgtcgcatatataagaatattgtcaggcttagtttcaacgccaccctcaatgactgcctttaagaacttgtactcaatctcaaattcttcaaatgataaatcatccatatatataatgaacttgtagtttctgttcttaatggccgctattacatttgataaatccttaaactgatgcttatatatctctatcattcttaagccctggtcataatattcattaacgatagccttgatacttgtagacttaccagttccactgtcaccaaataaaagagcattattggcttttctgccctgaacaaagttctctgtattctcaacaagcttctttttttgtatctcatatccaataagatcatctaatacaaccttatccatattattaatagggttaaatgtaagctttccattctctgttgcagatattctgaacgccttgttaagtccgaacatacctacgccatatgctttatagaattctgtaactatatcaaagaattcatctgcattagcagctttggcaagcttttcgcttaatgcctgaaccttttcacttacatttttattatacatcagctccttcttaacgattgccttataatcagagattatagagaaacagtcaatgccgagttctttctctataaatgaaaaatcataatggaaaagattgtagaatactttaaagtcattctttgcaaatacattaacacttccgtcattagctcctaccttttcacaggtaatgctgaatggattctcattaataataagaaaatatgtaagataattctgccataaattcttatcgaaaccataatctgttgcaacttctaaaattctttttacctgagtatatatatctgtaaccagctcttcttttgatgataatttgttatcaaaacgattgaatatatctgccattgatgataaaatagaactgttatcgagatttccatacataattaattgagatatttctttatacattttagtattcctttcgccaatgtgtatatgtaacttttatataataacacatataatatcacattgagagcgaattttgtcactttttttagaaatattagttcgattaactattgacagctaacgaactaatgatataatctgtaaagaactttgcaaaagtttgtaaaagttttaacagacttttattttttaatgattagtgaggatttcaaatgaaaatcgtatcagatatcaacgcatttgtgtatattgtattgaccatcttctattgttatcagggaatatacgttattatcgcattgcttggtaaaaagaaaaaaaagaattacaacaccgaagctaagacacttcacaaatacgcatttattattgccgcacgtaatgaaaatgccgttatcggcaatttaattgacagtattaagaaccagaattatccttcagagcttattgatgttatcgtagtagctgataactgtactgataatactgcggagatttcaagacaacacggtgccattgtttatgagcgtttcaacaatatacttattggtaaaggctatgctatggactatgtctttaataagatatgtgaagaacgcggtgattacacttgttatgacggttatttcgtattcgatgcagataatattatcgatgtcaattacgtcagagagatgaacaaagtattcgacagtgggtacaaagttgtcacaagctatcgtaactctaagaattatgacactaactggattacagccggttattctttatggtttataagagaagctaaatatcttaacaacccacgaatgatgattaagacaagctgtgctgtatccggaactggctatcttgtagacagctctattatcaagaagaaccacggctggaaatgcaatcttttaacagaggatattgaatttactgtaactaatattcttgatggcgaaaaggttggttattgcgaagatgctatgttctatgatgaacagccaacaacatttaaacagtcttggaatcagcgtatgcgttggacaaaaggcttctatcaggtattatttaagtatggcagagacttattcaggacaatgttcaaggaaaagagaatgttcgtatcctgctatgatatgataatgacacttgcacctgctactttatttacacttggaacaatacttcttaatgtaataatattattatgtggtggtcttaatcctacattattcaagcagattgctggtccaactgttcaggctattttacttggtttctttaatttctatatgatgcttttagtaataggacttataactttaataactgagtggaagaagattcttgcacctgcaagaaagaagattatgtatcttttctcttttcctctctttatagctacatatattccaatctcaattgtagcgttatttaagaaggttgaatggaagccaattcctcatactgttgttaagactattgatgatttatcaatgacacagtataagcagtaattctattaagaatttaaactaaataatgatataaaaaaaggggctgtcgcactaagaaattagtgcggtgccccttcttttatgttaaggcggtatataatctaaaaaaataaatcccaggcttcgaaaaacctgggatttatagtaaaatattagtatgctattacataataaattacaaaaagattatactttaaatcagagtggatatcaactaaaacttccactcgaaaactgcaaaagagatatcaatttcatatttcttctagaagggcattctgcacctgaccatgcaacacttgcacgattcagaagcattcattttgccccttgttctaagcgtattctcgcagaagtttcaagattgaggcaaatgccaataaatatactttcgtgtggaaaaaagccgttacaaaaaatcaggcaaaactgttaattaagttagctgattttgtagctgaatgtgaacaactctatgacataaaaatagtttatggaaatgtagtaaaaatcaaacatttaaagagactacgcaaaaagctgtatgctctcaaaaatgctggaaatatcacattcgtgcatggtataggcaaaagaaaaacaccattacaaaaaagtattgaagcattagaagaagctctttctaaacttaaagaatacactcaataataaatagtaacttaaaaatcgtatttttataggaaaaagaggctggtaccctaacgattttcaatcgttaaagcgacagccccttatttgctttattctacaaacacaatcattacttttcattcctgtcaatctttaaatctttgtaatattgcattggagtaacaccatattctttcttaaatgctctaaaaaaatgattataccctccaaatccaccaagctcatatacctcatgaatacttttcccctgctctatataatggcggcataaatcaagtttgctctttacaatgtatgaatgaggtgtctcacctgtcaattttttaaactctcttactatatgataacggcttatataaaattcattttccaagcgctccaacgagatatcttctgtcaaatgttctctgatataaataaaaatatcatccattacaacgtgttttttcttcttcttcttgatctgtacatcatcctgaacagatgagcgaagtgcaagtacaagaatcatagttaataggcttttctcgtataatgagtgggcaaatttaggcggctcattattcatcgaatagagcttttttgatatattctttataagcatagccgattcagtctcagaatgaacaatcttaacttgatacggaacaaaatcaaacgcttcatcaagtcttgtttcttcatctgacaatttccttaaaagttctccacctatataaagaacataaacttcaagaggatacttatttttacgatattcaagctttactttattacctggcttaataaatatcaaatcctccatagtacatacaatattatcgtcctcctggtgcatataccctatcccaccagctataaatacaattgtatagctctccttttgcccaaagcttcgctgggcactatccaatattttcaaatattccattttgtagccttgctttttcatatgtctattttgtacactttcctattatattttttgttcatttcgtcaaaatatacaatatatcaatttttcgtagtttgcaagcaatatttgtatatggatatcagcataaccccaatataataagattgtagctactaaaacaatataaatgtttggaggtaaattatcatgaaagaaacaagacctttttccatgaaggacaaaattggttacactcttggcgatttgggatgttgctgtactgagcagttccgtgccatgtatcttgctattttttatacactggtattaaaagttaatccagtacacgtaggaatccttatgcttgttacaaagttttgggatgctataaatgaccctttaattggtgcacttgttgatagccacaaaaacaaaggaaaaggaaaatttattccttggattaaattctttgcttttccaactgcagtactctgtatattaggatttgttaacgtaagcaatttcgcttatggtgcacgtattgcttatatgttcattacatatattgtttacgaaattatgtacacatgtgtcaacgttccatttggtagtctttcaagtgtaatgactgatgatgttaaccaacgtactgacctttctcgtttcagaagtcttggcggtacaatttttatgacagttatcgttattgctggaccattattcttatataaagataaccagccagtacctagccatttccttattatgtcagcaatctgtgcagttattggattaatctgtcttatgtttacatctcattggtgtaaagagcgtattattacagaaccagttgttgagaaaaaagaaaagtttaactacttccaggtaattaaagatattactaaaaacaaagcattactcggagttatgttatcaagctttatcggtattgttggagcaggtatggttaacggattaaatacttatttattccgagattattttggaaatgttgccatcatggcagtttcaggtatgttaagtgtactctggtcacttattgcattcgtaggcacaaaatttgttgctaagaaatttggaaagaaagaatggatcatgtacagtgcaactttctcagttgttgtttatgctattttattcttcttcccacttgaaaatcctttgctctttattatcatcaacggaatctgctatcttggagtaagtggtttccaagtattagtttgggcacttgtaaatgatgcaattgattatcaagaacttcagacaggaaaacgtaatgaaggaattgtatattcggcatatacattcttccgtaaacttgctaatgctgtatcaggaagtatgagtagttttgcacttgcaattgctggattccaggttaatgaagctgtccagaatgaagcattctcaggacatctttggaaaacatatacaggtttatatgttgtaggatatttattagctgttctggtattaaaatttatctaccctcttacaaaagagaaaacagctgaaatgttacaggatttagctgacaagcgaaatgctactactgcagaataaaattagaaatggaggtattttaaattgacaaaacaagtagaaatcacaaaccgtgatggacacatcttacgcggaatagttaacattccagaagatggcacaagatttcctgctattgtaaatgtacatggctttacagggaataaaagcggttacaaaagtatttatacgcacacagccagattattagctgaacatggatttgccagtgtccgttttgatttatacggaaatggtgaaagtgatggtgaattcgaggacatgacctttacaggtatcctacacgatatcgaggatattataaactggactaaaacacaagattttgccaatccagataagattatcttatctggtcagagtatgggaggatacgcagctgctactgccgctcctattgttaatccttatgctctcatacttatgtgtccaggtgctggaatgtggtttggatgtaaggatcgtgctgaagccatggaagctaaggggatcaccaaggccgatattgaaggactcactttcccaacatcttttaatcatgatttatttaattatgagccattctcgtcagcagaaggatacaacggaccagtcctccttataagaggaactgcagatgatttggtagatgatgcaacatgccatagatatgagtcactttacaatggaaaatgcaattataaaacaattgaaggcgctaaccacaattttgccagtgcttttgcaagagcagaattagacaaattaatgttagagtttttaacaccacttaaatagtatattcaatttgaaaggaagtatgaacaatgaaattattagagtctataaaagttggaaatattgagtttaaaaaccgtattatgttcccaccacttacaacaggatatgaggaaaaagatggttcaattggagaacaaagttttcgtttttacgagcgtctcgcaaaaggcggtgtcggatatatagtaattggagatgttgcaccacttccaacattctctcctacaccaaagctttattcacctgagcaggttcaaagcttcaaaagacttgctgacgcatgtcatgaaaatggcgcaaaacttggaattcagttattccatcctgactacaatgttaaagctttaaacgatttgtttcatcagggcaaaatgcaggaagcaagagctaaacttcaccatgatatgcagcactttgtaaatgaagttactgcagaagaacttgatgaaataataaagcatatggaaaactgtgctatcttagcacacgaagctggtgttgattgtattgaagtacatggagaccgtcttgttggttctctttgctctcctattttaaatcatagaactgatgaatatggcggtgacctggctaatcgtacacgttttgcattaacacttgtaaaaagattaaaaacaatcgtacctgacatggttatcgactacaagcttcctatagttactcctcttggagaaaatagttttagaggaaaaggtggtcttccacttgatgaagcttgcatttttgctaaagaattagaagcttgcggtgttgacacattacatgttgcacaggctaaccatactggaaatatgggtgatacaatccctgccatgggaacacagccatacggatttatggtttcttattctaaaaaaatcaaagagcttgtatctattcctgtatctgtagtaggccgtatcgttacaccagaagctgccgaagcagttattgcaaatggttctgctgatattattggattaggtcgttctcttctcacagaccctgactttgcaaacaaatgtgcagatggacattgctgtaatgtcagaacatgtatgatgtgtaataaaggatgtacagataatattcagaatcgtgctttcttaagttgtgtacttaatgctgaaaatggttacgaaggatctcgtcagattactcctgcagcatcaacaaagaatatagcaattattggtgctggtattgctggacttgaagctgcacgtgtttccgcattaagaggacatcatgtaactatatttgagaaatcacttcagattggtggtcagttacttattgctagtgtacctccaagaaaagaagaaatgatgagaagcattaattattatacaaatgtacttcctgaattggatgtaacattcaggcttggtcaggaattcacatcccaagattataattcattcgatgaagtaattgtggcaacaggagcaaacaatgcaataatccctgttcctggcaaagatcttccaactgtagcaagtgcatgggatgtacttgccaagaaagaaatcgtattcggtaatgtttctgtaatcggtggtggtcttgtaggtgttgaaaccgctgaatatctggcttcacgcggatgtaaggttacaattattgaaatgatggatcagattgcaaaagaagaaagtaacactattttacctactctaatgagggaattagagcattataatgttcaaatagtaacatctgcaaaattatcagaaattaaagatgattctgtagttgttgaaaaaacagtagacgacaatacatcaacagaagaaattgcttcagactttgttgtaatggctgttggtgcaagaaagaaccttccagagctttctgattgtcctcttccacttcactatattggtgattgtgctggagaacgtccaagtaatattgagcatgctattaaatcagcatatgatgtagcatgtgaaatataaattattaattaccctattaccacaaaggggctgtcgcactaagaaattagtgcgatgcccctttttttatgttaaggtggtatataatctaaaaaaaataaatcccaggcttcgaaaatcctgggatttatggtaaaatattagtatgctattacataataaattacaaaaagattatacgttaaatcagagtggatatcaactaaaacttccactcaaattagaaacaattattcctaagaatgattctgtgcggttactcagtcagtttgtagaggagatggatttgactgatctatataagagatatcaatttcatgtttcttttagaaggacattctgcacctgaccatgcaacacttgcacgattcaggagcattcattttgccccttgttctaagcgtattctcgcagaagtttcaaatatcctttttgatttaggtgaaatatctggtgaaactatctttattgatggtaccaagattgaggcaaatgccaataaatatactttcgtgtggaaaaaagccgttacaaaaaatcaggcaaaactgttaattaagttagctgattttgtagctgaatgtgaacaactctatgacataaaaatagtttatggaaatgtagtaaaaatcaaacatttaaagagactacgcaaaaagctgtatgctctcaaaaatgctgaacataacttaaaattcaaatataagaacataactgcggatgctggttatgagagcgaggaaaactatctgtttcttgaagctaataatcag

SEQ ID NO: 426 - DNA, 9894 bp, unidentified
  source 1..9894: mol_type = unassigned DNA
tcaatataaaatatatttttcatcttcatacctatactgcattctattggtagaagctattgtttgaagtacttcgtcaatggtgtttcctattattttaaaactaccatagaatcgtttgttccgcaaagaatcagccacttgtattttcacatcatagctacgcatcaatttcttcgcaatatcttccaacaattcttcatcaaaaaacaattcattcctagaccaggcatttgaatattctacatgggtcttcgatttctttattataccagttcgtttattcaaaaccattttttctcggggagtcagatacaaagcgggcatctttttcagttcattttgcaaagccacctttccttccatcagatttacagtaacctcctcgtcttctggataatttttaaaattaaacttcgttccaagcaccttcaaattaagttcccttgtttcaacaacaaaaggaatcttctcatttttagtaacttcaaaatacccttctccttccaaagacaaatttctatcatctacaccaaatccctgcgaataaacaatcttagaacctgcattcaaccataccaatgtgccgtccggcaaatataatttagtacgtgctcctaatggagcctctactaccatatctgcaaaattatgtttgacagcctcctttccttgccaataagtagccaaaggcaacaacaaaagtaaaactacagcggctacgcgatatatcactttccaagaaaaacgtcgaagtcttttattccttccagcctcagcaacccgttgcttaaataaatcaaatgcttcattcttattaaagaaggtcttatcgctcaatacgcctgaagagaaccaaatttccaactgatcacgtacataaatacgattagtttctgactccatactccaccgctttaactcagaaaaggatttttcatccaattcattggataaatacgatgctatcagcttatctatatcgttatatttttcttctgtatgcataattacaagtacgtttattagtaagacaaaatagaaaagaaagagggtagtctaaaatgtatttttttcaattttcccaaaacatatacaatatcagcagtttcagatagtctcccatatgtaattgaatggatgctaaagcatttttaatatgatacttaactgtattcaccgatattttcagttcatctgctatttcttcatattttttttgttcaaaacggcttttcttaaaaaccgcacggcattcttttggaagttcctcaatacatttcaataatttttcttccaactcttgctcaagtaaagtacctaaaggatgattatcctccacaaaaacactatctaaaaattccatattttctggaagcataaaagaagagaaatgaagttctttgcgatgcctttgtgaattcaattcattcaagcagcgattacgcactgcacgcatcaaataggcacgtaaggaaaaggttatttcaatatcagtacgatgctcccacaaatagaagatagtatcatccactatttcttctgctaaagcaacgtcatccaacagttgatatgcaaaacgacaaagaagaatgtaatggcaatcgtatatatatctaaatgcctgttcatctcctaatctcagtttttcaataatatatttttccatagtaattaaagtgacaaagggtaaattcttaattattaatactttctatcaagaaaaccatattgttcgctctatattggttgattataagattaaagcaaaagtaatattttataataacacagaccatcgattacagaaaaagattaatctattccaaataaggtttatcagacttataaacaaaaaactccatggatgaagcccgaatccttatcaaagccccagatttaccttcagataaaatcaaatgtatatacaaaaatcatctgcattagttttataaaacaatcatctatgtatttttccagtatatgcataagacaaaataaagagaatagagggtagtcccaaaatgcacttttttatttctaagattattgccttccagaacaaataaagctcatctttcaaagaaaaatgcacaatacatacataaaacaaagaaaaaagtctcctttttgcatattctttccgaaataatccctaattttgcgccactcttagaataattatacagaaaatgaagaaaaaagccaatcggttagacgccatcaagatgattatctcaagcaaagacgtcagttctcaggaagaactgttgcaagctttgagcaaggaaggctttgaactgacacaagccaccttgtcacgcgacttgaaacagctgaaagtagcgaaagcagcgaacatgaacggtaaatacgtatatgtgctgcccaacaacatcatgtataaacgttcgaacgaccagagtgcaagtgagatgttgatgacaagcggattcgtttcacttcaattttcgggcaatattgccgtcatccgtacccggcccggatatgccagcagcatggcctacgacatcgacaaccgggagtgccccgccattctgggtaccattgccggagatgacaccatcatgctggtggtgcacgaagcggcatcacacgacgaggtacgcagcttcctatcgcaaatcataccgaacattaaatgacagataacaacaaaaaacaagaaattaaataagaaatggattcgaaacaaattgatgtgatggtggctgacgcctcacatgaagtttacgtggacaagattttggataccatccgggaagctgccaaggtacgcggaacgggcatcgcagaacgcacacacgaatacgtagctactaagatgaaagaaggaaaggccatcatagccttatgtggagacgattttgccggtttcacctacatagagagctggggcaacaagcaatatgtagcaacctccggcctgatagtacaccccaaataccggggactggggttggcaaaacgtatcaagaccgcctctttccgcctggcacgcctacgctggcccaatgccaaagttttcagtctcaccagtggagctgccgtcatgaaaatgaataccgagctaggatatgtgcccgtcaccttcaacgaactgaccgatgacgaatccttctggaaaggttgcgaaggctgtatcaaccatgatatattggtagccaagaaccgtaaattctgcatctgcacagcaatgctttacgacccgaagctgcacgaagaagataaaatataaaaatataaggatatggaaaagaagaaaaaagtggtagtcgcattcagcggcggtttggatacctcattcacggtcatgtatcttgccaaagaaaaaggatacgaagtatatgcagcttgtgccaataccggcggtttcagccccgaacagttgaagactaacgaggagaatgcctacaagctgggtgctaaagaatacgtcaccattgacgtaacgcaggagtactacgaaaaaagcctgagatacatggtattcggaaacgtactgcgtaacggcacctatcctatctctgtaagttccgaacgtatcttccaagcattggccatagcacgttacgccaacgaaatcggtgccgatgccattgcccacggttctacgggtgcaggcaacgaccagattcgtttcgacatgactttcctcgtcatggctccgggcgtggaaatcatcacgctgacacgcgatatggcactgagccgtcaggaagagattgattatctgaacgaacacggctttgccgccgacttcaccaaactgaaatactcctataacgtaggtttgtggggcacttccatctgtggtggcgagattctggattccgcgcagggattgcccgaaagcgcctatctgaaacactgcaccaaagagggcagcgaacagttgcgcctcacttttgaaaaaggtgagctgaaagccgtgaacgacgagacattcgacgaccccatcaaagccatccagaaggtagaagaaattggtgcggcatacggtatcggccgcgacatgcacgtaggcgacacgattatcggcatcaaaggtcgcgtaggtttcgaagctgccgcacctatgctgattatcggcgcacacaagttcctcgagaagtacactttgagcaaatggcagcaatactggaaggaccaggtagccaactggtacggtatgttcctgcacgaaagccaatatctggaaccggtaatgcgcgacatcgaagccatgctggaatcctcgcaacgcaacgtaaacggtacggctatcctcgaacttcacccgctctgcttctctaccgtaggtgtagaaagcaaagacgaccttgtgaaaaacaagttcggcgaatacggtgagatgcagaaaggatggacagcagaagatgccaagggcttcatcaaagtaacgtctacggcactgcgcgcttattactcaaaccataaagacgagaaaatctaaatgacggacaagaagcaaaaactgacacgtccccggactggaaggatgctttcaggcgtatgtgcaggactggcaaactttttcggactcgatgtctcattggtgcgtatcgtttatacattcgccacgatctttactgcatttgcaggcatacccatatacattataatgctaattgttataccacaagaaccaaatagatattatcgaaatgattaaagtaggaatcataggcggagccggatacacggcaggcgaactgatacgtctgctgctcaaccatccggaagcagaaattgcatttatcaacagctcaagcaatgccggcaacaaaattacggacgtgcacgaaggactgtacggcgaaacagacttggtatttaccgaccagctcccgctggaagaaatcgacgtactctttttctgtacggcacatggtgacacgaagaagttcctcgaaagccacaacgtgcccgaggaactgagaatcatcgacctctccatggactaccgcatagcctctcccgaacacgacttcatctacggtttgccagagctgaaccgccgtgccacctgcaaagcgaagcacgttgccaatccaggctgctttgccacctgcatacagctgggtctgctgccgcttgccaaacatctgatgctgaacgatgatatcatggtgaacgccattaccggaagtaccggcgccggtgtgaaaccgggtgccacgagccacttcagctggcgcaacaacaacatgagtgtctacaaagctttcgagcaccagcatgtgcctgaaatcaagcaatcgctcaaacagctgcagaacagctttgatgcggacattgacttcatcccctaccgtggtgacttcccgcgcggcatcttcaccaccattgtggtgaagaccaaagtggccttggaagaaatcgtccgcatgtacgaagaatactacgccaaagattcctttacccacatcgtggagaagaatatcgacctgaagcaagtggtaaacaccaacaaatgcctcatccatctggagaagcacggcgacaagctgcttatcatttcctgcatcgataacctcctgaaaggtgccagcggacaagccgttcacaatatgaatttaatgtttaacctggaagagaccgtaggattacggttgaaaccttctgcattctaaaaaaaatgaatttattcgacgtataccctctctttgacatcaacatcgtcaaaggaaaaggctgccatgtatgggacgagaacggtaccgaatacctcgacctctacggtggccatgcagtcatctcaatcggacatgcacatccacattatgtagagatggtgagtaaccaagttgctacgttaggattctactcaaactcagtaattaacaagctgcaacagcaagtggcagaacgcttgggaaaagtctgtggctatgacgactactcattcttcctcatcaacagcggtgccgaagccaatgaaaacgccttgaaactcgcctctttctacaatggccgtacccgtgtgatatccttctcaaaagcattccacggacgtacctcactggcggtggaagtaacgaacaatcctaaaatcatcgctcccatcaacaactgcgggcacgtcacctacctcccgttgaacgacatcgaagccatgaaggccgaattgtccaaaggagatgtctgcgcagtgattatcgaaggcatacaaggtgtaggcggcatccaactgccgacagacgaattcatgcaggctctccgccagacttgtacggaacacaacacggtcttgattctcgatgaaatccaaagcggctacggacgcagcggcaagttctttgcccatcagtacaacggcatcaaagccgacatcgtcaccgtggcaaaaggcatcggcaatggtttcccgatggcaggcgtactcatcagcccaatgtttacaccggtatacgggcaacttggaaccactttcggtggaaaccacctggcttgcagtgccgcccttgccgtactggacgtcatagagcaagaaaaactgatagaaaatgcagcgcaagtcggtgacttcctgatgacagaactgagaaagttcccgcaaatcaaggatgttcgcggacgaggactgatgataggactggaatttgaagcccccatcaaggtactgcgcctaagactgctgaaagagcaacatgtattcaccggcgtaagcggtacgaatgtgctccgcctgctgccgcctctgtgcctcagcatggacgaagcaaaggaattcttgaaacgcttcaagaaagttctttaatttatctacctttgccaacagacaactcttttaacaacaagaaaatatgaaaatagcaattatcggtgccggaaatatgggaggctccatcgcccgcgggctggcaaaaggaacaatcatccctgccggtgacatcattgtctccaaccccacccaggacaagctggacaaactgaaggcagaattccccgctttgcaagtgactaacgacaatcaggaagcagtgaccggtgcagatatgataatctttgccgtgaagccatggctgatgaaacttgtggtaaaggaattgaaactgagaggcacacagattcttatctccgttgcagccggtattcccttcgaagaactgacacactatgtagcagacaaggaaatgaccatgttccgccttattcccaatacagccatcagcgaaatggaaagtatgacactcatcgccagccgcaatgccaccaaggagcaggagcagctgatgctggacattttcaaccagatgggacttgccatgctcattcccgaggaaaagattgcggcaaccaccgccatgacttcctgtggcatcgcctatgtgctgaagtacatccaggcagctatgcaagccggcattgaaatgggtatctaccccaaagacggcatgcgcatggtggcacagtccgtgaagggagcagccgagctgattctgaacagtaacacacaccccagtgttgagattgacaaggtgtgtactcccggaggaattaccatcaagggaatcaacgaactggaacacgaaggattcacctccactgtgattaaagctatcaaagcgagtatttaatgtgccaatatgccaatgccctgcggcgtaacggtgtatttcaataacaacccatttaaaacaaatataattatggacgaacaaatcagacaaatagccgaacgcctgcgcggactgcgtgacgtattggaactgactgccgacgatatcgcccgcgactgtgacatctctgcagaagagtaccgccttgccgaaaccggagaattcgacatctcggtcagcatgctgcagaagatagcacggcactacggcatatcactggacgcactgatgtttgggcaagagcccaaaatgagctcctacttcctgacacgtgcaggaaaaggaaccagtatagaacgtaccaaggcatataaataccaatcactggcagccggtttcatcaaccgcacggcagacccgttcatcgtgaccgtagaaccgaaaccggacagcgagccgatacattacaacagccatgccggtcaggagttcaacctcgtactggaaggccgtatgatggtcagcatcgacggcaaagacttaatcttaaatgaaggagacagtctgtacttcaactccaaactgccgcacggcatgaaggcgcttgacggaaagacagtaaaattcctggcagtaatcatgtaataaagttatggtagaaagatttttatctcaaacatccttcacctcacaggaggacttcatcaagaacctgaagataaacgtaccggagaatttcaacttcggctatgacgtagtggatgcctgggcagccgagcagcccgacaaacccgcactgttgtggaccaatgaccagggcgaatgccggcagtttacctttgccgacatgaaacggtacacagacatgacggcttcctatttccaaagcctcggcatcgggcacggagacatggtgatgctgatactgaaacgccgttatgaattctggttcagcattgtggcactgcacaaactcggtgcagtggtgattcccgccacccacctgctgacgaagaaagacatcgtataccgctgcaacgccgcagacattaaaatgatagtctgtgccggcgaaagcgtcatcaccgaccatatcacggcagctatgccagagtctccttctgtgaaacgcctcgtaagcgtcgggccggaagctcccgaaggattcgaagacttccacaaaggtatcgaggccgccgctcctttcgtgaaaccggaacatccgaacacgaacgatgacatctccctgatgtacttcaccagcggtactaccggagagcccaaaatggtggcccacgacttcacctatccgttgggacatatcgtcaccggcagcttctggcacaacctgaaagagagcagcctacacctcaccattgccgacaccggttggggaaaagccgtgtggggcaagctctacggacaatggattgccggcgccaacgtatttgtatacgaccacgagaaattcactcccgcagccatactggagaagatacaagattatcacgtcacgtcgctttgtgcaccgcccaccatcttccggttcctcattcacgaagaccttacgaagtacgacctatccagcctggaatactgcaccatcgccggagaagccttgaaccccgctgtattcgagaccttcaagaaactgacgggcatcaagctgatggagggcttcggacagaccgaaacgacccttaccgttgccaccatgccgtggatggaaccgaaacccggcagcatgggattgcccaatccgcaatacgatgtagacctgatagaccacgaaggacgttccgtggaagccggtgaacagggacagattgtaatccgtaccgacaaaggcaaaccgctgggattgttcaaggaatactaccgtgatgccaaccgcacccacgaggcatggaacaacggcatttactacacgggagatgtagcctggaaggacgaagacggctacctctggttcgtgggccgcgccgacgacgtcatcaaaagtagcggctaccgcatcggcccgttcgaagtggaaagtgcattgatgacccacccagccgtagtagaatgtgccattaccggtgtgcctgatgaaatccgcggccaagtggtaaaagctacgattgtgttggcaaaagagtacaaggcacgcgccggagaagagcttgtcaaggagttgcagaaccatgtgaagaaagtgacggctccctacaaatacccgcgtgtcatcgaatttgttgatgagctccccaaaaccatcagcgggaaaatccgccgtgtggaaatccgggagaacgaccggaaataa

SEQ ID NO: 427 - DNA, 12430 bp, unidentified
  source 1..12430: mol_type = unassigned DNA
atggcaaaacgcgtatttttgatcgtgctggacagctttggcgttggcgcagagccggatgcgccgcagttcggcgatgccggtacaaacacgctggccgctatcgccggtcatcccaatttcaagggagaaaatctggcaaagcttggccttttcaatctggacggtgtgacctgcggtaagccggaggcaacgcccgttgccagctttgcccgcctgcgcgaggcaagtgccggcaaggatacgaccatcggccattgggagatcgcgggtctgctcagcgctgagccgctgcccaccttcccggacggcttcccgcaggaattgcttgatgcattcacggccaaaaccgggtatcaggtcctctgcaacaagccctattccggcaccgatgtcatccgcgactacggcgaggagcatctccggaccggggcgctcatcgtttacacctccgccgacagtgtgttccagatcgctgcgaacgaagcccttgtccctgtggaaaagctctatgagatctgtgccgaggcgcgggagctgctcaccgggaagtacggcgtcggccgtgtcattgcccgaccgtttgtgggggactgcgccgccaactttacccgcacaccgcgccgccatgactacagtctggtgccgccgcgcgatacaatgctggacgctatcctcgctgccggaaagcagaccatcggtgtgggtaagatccacgacatttttgcaggcaagggcattggggaaaccatccgcaccgccggcaacaccgagggacttcaggtgacgctggagctggccgaccgcgattttgagggccttgccttcgtcaacctcgttgactttgacatgctgtatggccaccgccgtgacattgccggctatgccgctgccgctgcggagttcaatgactggctgccgacctttatggtcaaaatgcgccccggcgatgtgcttatggtcaccgctgaccacggctgcgaccccagctacaccaagaccaccgaccacacccgtgagcatgtgccgttccttgtgtatggcgatgagatccgccccggtgtgaacctgcatacacgctacagctttgcgaccatcgccgacacggtctgcaaggcgctgggcgttgcgtactgcccggcgggctgcggcgtctatgatgaaattgcgaagtaacgtgggcgtacttcttctttacctgctggcggcggtgctggtggtttactccctctcgctggtgttcctttccaacttcaacatgggcaaccttatggtctggctgctcaccggctgcgttaccggctacgctgtctttcgcagacccgttaatgcgtggttttctgcaggtatcgggcgcgtggtttttggggtgctggcggtcttggtctgcctttatctggctgttattgcctttgttgctgtcagcgggtatcttcacccgcctacagggaacgagcaggtcgtgatcgtgctgggggcgggcctgcacagggacaagcccagcaagctgctgcaataccgccttgacaaggcctatgcgttcgccgctgcccaccccgacacgctggtcatcaccagcggcgggcagggccgtgatgagtggatccctgagggcgatgccatgcgggactatctgattgcaaagggcttgccgcccgagcgggtcctgtctgagaaccgctccacctccacggaggagaactttgccttttcgcttgcgctgctgcagtcgcggggcttttctcaggcgacccccatcgtctatgtttccaatgaattccactgctaccgcgccgggcagtatgccgcaatggctggctttaccaatgtgtctgagcttgccgctgcaacaccgctgcgcagtgtgctgccctgctatatgcgggaggcactggcgctgctttattactgggtattcaaaacctcatcctccgggccgatgcatgcaatggtcggtctgctggatctgaataagaaattcttttacaaataggaggggactgccatgcagatccgctattacaaagagtacagccgttttctgaaccgatttatggagttcaaggtctacggccacgccggacggcccatcgtgattttcccgtgccagagcggccgcttctttgactgggaggaccgcaacatgtgcaacgccgctgcccgctgggtggatgacggccggctgcagatcttcacagtggacagcatcgaccccgagagttgggacaacaccggccccgagcgcccgcgtatcgagatgcaggagcgctggtacaattatatctgcgaggaatttgtgccccgcctgcttgagatcaaccgtgagcagggcgacgacaacaccggcaagatcctgaccggcggtgccagcatgggcggcggccacgccgtcaacttcttcctgcgccgcccggacatcttcaacggcacgatcgcactcagcggcctgtattcctccggcatgttcttcggtgggtatatggacgatctcgtctaccgcaattccccctgcgattacatgcgcaatttccccacgacccacccttacatgaagctgtttgaaaaggccgataagttcatcatgtgctgcggtcagggtgcctgggagggcgacctgctggcctccacccgagagctgcaggccattctcgagagcaagggcatccatcccatcgttgatatctggggcgaggatgtgtcccacgactggtattggtgggagaagcagtgggtctacttcctgcagatgacgctggatgacaagaagtaaggatttgtatatggatttctggcacgatgcagccgcgcaaaagcgctggctgcgccgttttgcgctgttgatcggcctgctgctggtgccggtgtttgtactggccgtcttcgcccgcccctcggcggatgattatatctacgcggcccgcacccatgcggtcatacagcagtacggctttgacctgccgcggctgctcaaggccgcgtgggacaccaatgtctactactatcagaactggcaggggctgtatgtctccggctttacgctggcgtttcagcctgctatcttcggtaaccggttttacggcgtcacattgctctgtgtgctgctgccgctctttttctgcctgtacgggctggcgcgctgtgtagtgctgcgcttatctgcggcgcaaagacggctgccttgggcgctggcgctgctgctgaccttcgcttttatcgagggaatgcccgccccggtcgaggggctgtactggttcaacggcgcgatgaactacctgccgtatttctcgcttgcggtgctgaacgcaggccttgcctttgcgctctgctttgctgcgcagcttacgctgcggcacagggtgctgtacgcagccgcaggctgcctgtgcagtctggtcatcagcggcggccatcaggtggccgggcttttgaatcttcttttgctgctgcttgcggcagtgctctgcgcacggcggcgtaacttctggcagctgcccgcctttgcggcggcaatccttgggctgctgttcaatgtgctggcccccggcacgcgggtgcgcacagcaggcttttccggtgcaggcttcgccgaggctgttatcaaaagctttatccttgccgcgatggagtggatccgctggctggatgtaccgttgctctgcctgctggcgctgctggcgtttccgctgcttcaccttgcccgcagtgccgctctgccggaccgtgtgttccgctacccgttttttggcgcggcagtcacctttgtgctgatgtggggcatgatcttcctgccgtcctacacaatgggcggcatcggcgcgggtcggcttttgaatgtcgtctggatgacctttgtgctggggctggctgctacagagtttcttctgctcggctggcttgagcgtgtgcgcggcctttccctgcatggcgcagagcagttttgtaaacgccatgcccggcgtctgccgcaggcggctgcctgtatgctggtctgcatggcctgcatcggcagccataccgttaaggaggggcaggacaaccactttgccaccagcttggaggctgcctatgaactggcggacggacaggccgcacgctacgccgcggcactggatgcgcgggaggctgttctgaccgatgccgcccagcaggatgtaatgatccgcccgctgaacggcgaggaacgcccctggctcctgttctacaccgatgtggcgcccgggccggacatgtggggcctgacgccctattttgacaagcagtccgtcacgattgctgagccgaacggatgatttcccctgccttggggcaggcaggctgtcaaaaaattattgtaggggcgagcattgctcgcccgtgcccgtttgtctgtaaaaatttttcccggaaaatgcgttgctgcgctaagttggcgggcgaccaatggtcgcccctacatatgaaataggctaagcatgtgattttttgacacatagccccctgccttgtgcaggggttttgcgtggtgtcaattcctattgacaaagtaggaaactgcggtatactattccggtatactactgtaaaagagggcacacgccatgatctaccttgattataccgccaacaccccggcagacccggccgttttgaacgcctttatcgcggcggagcaacgctacattgccaaccccaactccacccacatcgccgggcagcaggcccgggctgagatggaccgtgtgacgagctctattgcgcagcacctcggcgtgcagccggctgagatcatctacacctccggcgcaagcgaggccaacaaccttgctgtcaaaggcattgcacaggccgcacggcatatcggtaagcacatcatctccaccgagctggagcattcctctgtgggggcgtccttgtccgtcctgcagcagcagggctacgagatcgacctgctgcgcatcggccgtgacggtagggtagaccttgaccagctgcgggagctactgcgcgatgatacgattctggtagcagtctgcaccgtggacagtgaattgggcaccgtgcagcccattcgggaaattgcagagctcgtcaaattgtaccccggctgccgcctgcatgtggacgcaacacaggccgtaggcaaaacggacctctggctggacggtgtggacaccatgagctttacggcccataaattttacggcctcaacggcatcggcgcgctgtataagcggcgcgggctggtgatcacaccgcagatctccggcggggccagcactacgatctaccgcagcggcacgcccacgctcgggctggcggtcagtctggatgcggcgctgaccttggcgttggacgcacaggcggcgcgcactgcgcaggtccgcttgctgcatgaccgccttgtggcagcgctgcggcgctacagccttgtgcgcatcaacagccccgaaactgcagtgccgcacatcatcaatgtcagcgttaccggcatcaaggggacgcggttccagcaggctctcagcgagcagggggtctgtgtttcggtcaaatcggcctgttcctcggacgggatgccgtccaaggccgtgtttgccgtcagccgcgaccgccgcaatgcgctgtccagctggcgcatcagcttaagccacctgacgaccgaggaagaaatcgaaggcttcctgcaggtcttcgatacctgctacaaaaccctgacaaacaaggagaattgaccgttggaacgccaattagaagcatatcaaaaaatcgagcgcagcatcatcaaaaaatttcgcaagcagctgtggacaccctttatcgtggccgtcaagcggtatgagctgattcaggcgggggacaagatcgccgtctgtatttccggcggtaaggattctatggtcatggccaagcttttgcaggagctgcagcgccacagcgaggttccgtttgagctggtctatctcgtcatggaccccggctataacgaaatcaaccgccaaaagatcgagagcaacgccgcactgctgcatattcccatcacggtgtttgaaacaaacatctttgatgtggcaaacaacagcgataaatctccctgctacctttgtgcccggatgcgccgtggccatctgtataaaaaagcgcagcagcttggctgcaacaaaatcgcgctcggccatcatttcaatgatgttatcgagacgaccgtcatgagcatgttctacggctcgcagctgcaggccatgccgcccaagctgcacagcacaaatttcccgggtatgacgctgatccggccgctctactgcatccgcgaggaggacatcatcacatggcggcggtacaatgaccttgaatttatccagtgcgcctgccgctttaccgaggcatgcaccatctgcgacaatgggggcggcggctccaagcggcaggaaatcaaggtcctgctgcgccgcctgatgcgtgacaatccgaatattgagaacagcatcttccgcagcatccacgctgttgcgctggacacgatgcccggctacaagaccgagggagaggagcattcctttctggagcggtttgaccgcatcgaggaggagctgaaaaacgcccgggaatgatttggctgctatacacagggggtacctatgaaacggatcctttgcgcccttgcaatactgctgctggcaggctgcgcgtcacggccggctgatgtgatcggcacacctgcgccgacgacaacgcccgcccagacaccagaaactgccccgacctgccagcccggccaaacaaccgaaaccgcagccagtgaatatacggccatccagctgcagcagcaggatacccgaagcggccagctgctggcgcaggacgggcttgccacagacggctattatacgatgtgcatggacggaaaatggggcctgatgaaaagtaacggcaccgtcctgctgccctgtatctccgaccggccgatcgaacgctgcgccaacggctgtctgcgctggcattttctcagcacctcggccccgatggatgatgcggagcgcagcagctatgagacggcgctcgccgcagaaaatgccggtacactctgcaccggtgagcatgacgggcagagctatacatggacctatgacatcaacaccggccgtgtatgcaaaagcgccggcatgatgggcggtgctgccgaactgaacgatggcgatgccctgtatggggattatctgccctgtgtgcggagtgtgtggacatccggaaacggtgacccggactattatacgacagccgagggcggcggaattgtttttgccaattctgacggagaccttctgaacggcattacctatgcgtccgcaggctgcttttatgaccaacctctggccccggtcaagatcggtgacaaatgggcctaccttgaccggaagggaaatttggcaacggaagccgtgtatgacgcagtctacggcggtctggatttttatgaggattacacgccaaagtatgcctcacccctgctgaatgggtatgctgccatctgccgtgacgggaaatggggtgtgctggacgccgccgggaaggagtacatcccctgcgattatgcaggtgccgcttggaatggccatatcctctggctgcagcgggacggacactggcagagcagaacgctgcccggcgtgccggagcattggcaggatgccaaaatgcgctttcaggttggtccgaaggagctaaaggcaacagacgccttttggcgggtcaccgcagccggaggcctgcggctgcgtgtagggccggacacaagctacgaaaaaatcagccttgtgccggaatacaccgccctgcaggaactgggccgcagcgaggatggttgctggatgctgactctctacggcaggtggcacggctgggtcagcatggatcatcttgaaaaaataacaccatgaaacaacgcaggagccatgccgcccaagcatggctcctgcgctttgcttaccattgccgccggtactggcccggtgttgtgccctccacctttttgaagatgcgcgaaaagtaattggcatcgctcatgccgcattcctgtgcgataacctcaatgtttttatcgctgaatcgcaacaggcgctttgcctgcgtgatgcgcagctgcatcaggtaacctgtgaccgtctgaccgaactgctctttaaaaacgcgggtcaggtagaatttgttgatgtaaaactgctccgccaaggcgtccagcgtgatcttttccccatagtgggcgtcaagatagtccttgatttcctgcagattctgccgttttgcaccttctgcgcgcacggcctcggggtgccagctttcctgcatcagcagggtcagcagggccagcagcttttcgcatatctgcatgtcgcgcacataattgtcggaatcggccagcgtatacagggtttccagcagcgcggcataggcagctgcattctcggcgcggaagcttggctgaccgccgcgctcctcgtattttttgtagatggcccccatgttcgggccgtaaaaatgcacccagcgcagctgccacaggtcctcgcccgtataatggcggtacggcttgcggcagtcaagaaatgcgcagtccccggcgcgcagggcgcgagtggtgccatcatattccaaggtgccgctgccgctctccaccatgaagaacaggtaggaggccagccccttacgggtgctggcatgagggctgcgcgcctgcagccggccaacctcctgtaaatgcacaagattcgaccgtgcaaagggggagggtgtataaataatgcgctgggaatgcaccagcttgccgtcaaataacggtgcttccataactgtaccttccttgttttgtgtgggtgagcaatgcccgccccgacatctttacatctcagcactgcaaacccagtataccaaaaaagtcaatataatgctagtcttttgcaagattcgccctgcaaaaaagaaaaatagtgcggtagaataacaaacatacagagaactacgcgcaaaatcaccgcgcaagatacagatgaaagggaaaccgcattatgaaaaaagcactgatcaccggtgttaccggtcaggacggcagctatctggcagagtttttgcttgagaagggctacgatgtccacggcgttatccgccgctcctccgttgattaccgtgagcgcatcgcccatctggagggtcaccccaacttccacctgcactacggcgatctgagcgattcgatgagcatcctctcggtcgtcagcaccgtgcgccctgatgagatctacaatctggccgcccagagccatgtgcaggtcagcttcgatgtgccggagttcacggccgatgtcgatgccaccggcgtgctgcgcgtgctggaggctgtgcgcctctgcggcctgaaggacacctgccgcatctatcaggcctccacctccgagctgtacggcaaggtcgaggaggtcccccagaacgaaaacaccccgttccatccctacagcccctacgctgtcgccaagcagtacggcttctggatcgtcaaggaataccgcgaggcttacaacatgttctgctgctccggtatcctcttcaaccacgagtctgagcgccgcggcgagactttcgtcacccgcaagatcacgctggctgccgcccgcattgcgcagggcaagcaggacaagctctatctcggcaatctgtccagcctgcgcgactggggctatgccaaggattatgtcgagtgcatgtggctgattttgcagaacaagacccccgaggattttgtgatcgctaccggcgagcagcactccgtgcgcgagttctgcgagctggccttccacaatgtcggcatcgagctggaatttgtgggcgagggcatgaacgaaaagggcatcgacaaggctacgggcaaggttgtcatcgaggtcagccccgatttctaccgtcccaccgatgttgtcaacctgtggggtgaccccagcaaggccaagcgcgagctgggctggaaccccaccaagaccacctttgcagagcttgtcaagatcatggtcgatcatgacatgaagaaggtcgccgtagagcgcgccgaggagcatatcaagaccaatctggctgaatatctcgaaaagggcgttatcaaataatttcatcaaaagcatcaaaagaaggtaacaatcatgatggaaaagaatgctaaaatttatgtcgccggccatcgcggcatggtgggcagcgccatcgtgcgcgagctgcagcgtcagggctacaccaatatcatcacccgcacgcataaggagttggacctctgccgtcaggaggatgtcgagcgcttttttgcagaggaaaagcccgagtatgtctttctggcagccgccaaggtcggcggtatcgttgccaatcaggaggcactggctgactttatgtggtttaatatgacgctggagatgaatgtcatccactccgcatggcagaacggctgcaaaaagctggaattcctcggctcctcctgcatttatccccgtatggcgccccagccgatgaaggaaagctgcctgctgaccagcgagctggaaaagaccaacgaggcctacgccctcgccaaaatcagcggcctgaaatactgcgagttcctgaaccgccagtacggcaccgactatatctcggtcatgcccaccaacctctatggccctaacgacaactatcacccgacccacagccatgtggtcccggcgctgatccgccgcttccatgaggccaaggtcaacggtgtggagagtgttacctgctggggtgacggctctccgctgcgtgagttcctgtatgtggacgatctggccaacctctgcgtgttcttgatgaacaactactccggtaacgagactgtcaacgccggcaccggcaaggagctgaccatcaaggagctgaccgagctggttgccaaggtcgtgggctataccggcgagatcaagtgggacacctccaagcccaacggcacgccccgcaagctgttggatgtctccaaggctacgaatcttggctggacctacaggaccgagctggaggacggcctgcgcctgtcctatgaggacttcctacacaacccgatgcgcgccgagcgctgaaaggaaacgctatgaatatcattctgctgtccggcggctccggcaagcgcctgtggccgctgtcgaacgatatccgttccaagcagttcatcaagatcttcaagaccgatgacggctacgagtcgatggtccagcgcgtctaccgccagatcaaagaggtggacactgatgccagcgtgacgatcgccaccagcaagacgcaggtgtcgtccatccacaaccagcttggcaattcggtcggcgtctgcgttgagccctgccgccgcgataccttcccggcaatcgcactggccacggcctatctgcacgatgtaaagggcgtgggccttgatgaggctgtggtcgtctgcccggtggacccgtatgtcaacaatgactattttgccgcgttaaaggatctctccgatcttgcggaaaagggcagcgccaacctctcgctcatgggcattgagccgacctatcccagcgaaaagtacggctacatcatcccggagagcgccgatgctgtcagcccggtcaagacctttaaggaaaagcccgatgccgccacagcggaaaagtacattgcgcagggtgcgctttggaacggcggcgtatttgcctacaagctgcgttatgtgctggacaaagcacatgagctgatcgactttaccgattatcaggaccttttccgtaaatatgagacgctgaagaagatcagcttcgattatgcggtcgttgagaatgaatcgaagattcaggtcatgcgctttgcaggccagtggaaggatatgggcacctggaacaccctgaccgaagccatgcaggagccgagcatcggcaaggccatgctgaatgagacttgtgagaatgtgcatgttctcaatgaactggatgtacctgtgctttgcatggggctaaagggtgttgttgtctctgccagcccggagggcattctggtctccgataaggagcagtccagctatatcaagccctatgtggacagcatccaccagcagattatgtttgctgaaaagtcgtgggggtccttccgcgtgctggatgtcgaggatgaaagcctgaccatcaagatcacgctgaacgccggtcacggcatgaactaccacagccacgagaaccgcgatgaggtctggaccgttatctcaggcaccggccgcgcgattctggacggcagggcgcagcccgtcaaggcaggggatatcctgacgatgaaagccggctgcaagcacacgattctggccgataccgagctgaaggtgatcgaggtgcagcttggcaaggccatcagcgtggaggataagcagaagtatcccatgccgcaggcttga

SEQ ID NO: 428 - DNA, 9667 bp, unidentified
  source 1..9667: mol_type = unassigned DNA
atgtgtggaattattggatttacaggtaaattaaaagcccaggatgtcttattgacaggacttgcaagccttgagtaccgtggatatgacagtgcgggaattgcgtactttaaagataccggaaaaatttcacttcggaaaactgtcggaaaagtaaaagatcttcgtgcaatctgcgatgatgataacaattctacgtgtggaatcggccacacccgctgggcaacccatggtggcgttaccaatgccaatgcacaccctcataaggtcggacaggttgcattgatccacaatggtatcatcgagaactatcatgatctcgccaccaaatacgatctgacggatgaactgatttccgagacggataccgaagttgccgccgcattgatcaataaactctacgaaggagatccaaaagaagctctgcgcaaagcagtagccgaaattgaaggttcctttgccttctgcgttctgttcaaggatcatcctggtgaaatttatgcggtaagaaatgtcagccctatggttgcaacatactgtgatgacggtgcttttattgcatccgatctgactgcttttatcgcatacaacaagcgttatttcatcgtgccggaatatcatattttaactatgactgcggacggcattacgttagaagatttagacggtcattccgtagaaccggaatatatggaagtaaactgggatgttaccgcagcccagaaagatggttatccgcatttcatgatcaaagaaattcatgaacagccggctgccatcacaagaaccattaccccacgtatcaaagatatgcttccggatttttcggaagatgccattgcggattccttctttgaaaatgtaagcgacattacaatcgttgcctgtggtactgcaatgtacgcgggaatggtaggaaaaaccatgatccagaaccgcctgcatattccggttaccgtggcaatcgcatcggagttccgctatgaagaaccggtaatcaatgaaaaatccatggtgatcgttgtatcccagtctggagaaaccattgatactttggaagctcttcgccttgcaaataaatatacaaagaaaacactgtctattgtaaatgtaaaaggctccagcattgcacgtgaaagcagctatgtattatatacacatgccggtccggaaatcgctgttgcaagtacaaaagcatacaccgttcaggttgcttctttttacctgcttgcatgcaaacttgccatgacacagcaaaagatttctgtcgaagaggcacgtacatttgttggaacactgcaggaaattccaaattacatcgaggaagttcttgcacaggctcctgatattgaacagctgaccaaacgcatgatcaatgccaacaacgcgttctttatcggtcgtggactcgattataccctttgcatggaaggtgctttgaaattaaaggaaatttcttatattcatgccgaagcctatgctgccggtgaattaaaacacggaaccattgccctggtctgtgaaggggttcctgtcattgccgctgctacccagaaacatgtatacagcaaagttatttccaatatccgggaagtaaaagcccgtggtgcttatgtcattcttttgtccaaagacaaagaaatcacagatccttctatctgtgatgtacacatcaatcttccggatgtatccgacgaatttacgatttttgaatctgttgtaattttccagctgattgcatattacacatccgttggaaaaggcttaaatccggatcagccacgtaacctggcaaaatctgtaacggtagaataaaaaaaactgtcgcgcgaaaattcgtgcgacagtttttttgacatagagcctttctaaaatttttgaaggcaaaaaaagaaccccagaagctctctaaaagcctctgaggttgcccctgccaaggattctctcacccatgtaccggaatccttgtatcgtcggcgcgacaggatttgaacctgcgacctctgcgtcccgaacgcagcgctctaccaagctgagccacgcgccgtttcaactgcccaattatagtaacacattctccggtgtttgtctagtgaatttttttaatttatggtacaatataaaaaaagaacggagaagaacaatgaaacatactgctttgattacaggtgcatcccgtggaatcggtgcagccctggcatgtcgatttgccgctgaaggctatcatctggctctttgctgccataactcttatgaaacgctgcaggcacttgccacaaaacttgaaacaacctactccatacaggtgctttgcttccgtggtgatgtaggagactatacttttatctgtgacatggtgcaaaaaacactggataccttcggccagattgatgtgttaatcaacaatgccggcatctcttatatcggtctgctcaccgacatggatattaccgactggaaccggatagttgcgacaaacctcacatccgtcttttccacctgcagacaggtcatcccttccatggttcatgccaaatccggacatatcatcaatatttcttctgtatggggaaatgtcggagcttcctgcgaagttgcctattctgcatgcaaaggcgggatcaattcccttacacgcgctttgggcaaagaacttgcccctagcaatatccaggtaaatgccatcgcctgtggggtaatcgatacggatatgaaccgttgtttctccgaggaagaacgctctgcactcatcgaagaaattcctgcaggccggatgggatccccggaagaagttgcttcactggcatattctcttgccacagcaagcagttacctgaatggacagattctcaccttagacggcggatggatttaatttcttatctttttggaaatctttttccatttatttaagaattaaaacgcaatacgcgttttctctgttttttatatcaactttctataaaatcatttgtatgaaaacgaatgataaaaataaatacaaagattttggtgaccgtctgagtctgattatgtataaacaaaatatttccaatatccagctggcaaatgcaatgtttgtttcgccgtccacgatcagcggataccgtactggtcgtcgttctccgaccgttgcggatcttgcagccatcgtgcagattctgaatgtttctgcagattacctcatcggaaccagtgaaattacaaccagacccgataccaccgaaaaaaagagttgagcacgccctgtttccagagcggtgctcaactcttttttataaatcatgttctgccagtaaaattaccgtagaacgttccggaacacgcacacgtgtctgatctccctgtgtctgggcttcaaaatctgccccatcctggtattcacagaaagtatttactacaagtttccaatgataagactccggcaacgaaggcaggcgcatctccaaaggctcccaatacgcattcattccgtaaaagatcatatcatcatccgtatcatcggcatttcttcccgcatacatgattccaattaaatgtgtattatagtccgtataattccggttcggctctccgttatggatacttacggaaggtaacccgcagactgccggctttgtatcccttcgcagaatcggatgctttgcacggaaatggatcataaaacgggcaaaatcatgaatctcctgaaattcttccagtctgttccagtccagccaggaaataatattatcctggcagtatgcgttgttatttccatactgcgtattacaaaattcatcccctgcaaaaaacatagccggtccacggctgcataacaacgcggcaaatgcattcttcacaagcctgcgccgcaggctcataaccgccggatcatccgtctcaccttccaccccgcagttccagctcatgccgttgttatccccgtccgtattgttccatccgtttttctcattatgcttttcattatatgaatacagatcatacaacgtgaacccatcatgacaggtcagaaaattgacggatgcactatatccgcggcttgccggatcatacatgtcggaggatccggtgatacgtgtaattgcacgccctgctacgccactgtcgccctttaaaaagcttctcatatcatcacggtatcttccgttccattcggcccagcggttccaggacgggaaacttccaacctgatacaagccacccgcatcccaggcttctgcgatcaacttcatatcccccagaatagagtcaaatgcaagggcttccagaatcggcggattctccatcggtgcaccattctgatctcttcccagaatcgatgccagatcaaaccggaatccatccacccggtactctactgcccagtgccgcagacagtccgtaataaacctccgtaccaccggatggttgcagtttaagacattgccacagccgctgaaattgtaataatatccatccggtgtaagcatataataaatattgttatcaatccccttaaagcaaaaacatggaccgttttcatttccctctgccgtatggttgaataccacatcaagaatgacttcaattccattttctttcagttcgcggatcagacgctttaattcatcaccctcatgattatgctcctgatgaaatgcataacttgtattcggggcaaaaaaggaaaccgtattatagccccagtaattgtacaactgcacgccatccaccacacgggcactttccatttcatcaaattcaaaaatcggcatgagttctaccgcattgattcccagatctttcagatacggaattttctgtcgcaaaccttcaaatgttcccccaccttttacaccggaggacgcatctttggtaaatcccctgacatgcatctcatagatcaccagatcttcaaatttgtaattcagattccgataccgcccccagtcaaaatcactttgcaccacacgggctttatagacaaaatcctttccgccttccggtttttctccccagtttctctgaccggtaacagctttcgcatatggatcaagaagcgtatgttttctgttaaacagtaaccctctcgcctgatcggcaggaccgtccatctgataggcatactcaaaatcctctgcttttaagccaaaaacaaggatagaatacgtatttccaattttataactttccggaatgcggattcttgcatacggttcctgtgccgccggccggaataacagcaggacacaactcgtggcaccatgggagcttaccgtaaaacttaccccttcctctgtctgatatgcaccattcatctgataaaatcccggacgtacatcaaatccaccgatattatcgagtggatgaatgacttccccgagactttccatttcttcgtctatcggccagcttttctgttttgacggataattccaaaaacttgcattcatgtgctgattcctcttatcattattatttacttgccacataaaattatagtatccccctactcttccctgatgattaccctgccatttgcgtcaaatccgattttactgtacttttccgaatactcattcatatgatcaataatcgtctgttttctgtcgccttttgctatggcaggctgaaaattatttctttctgatgtggaagaaatgctgcatggtatcatatcggctgatatatctgtctgcagtaccccatccacaaaggtaaaggtctgttcatagatcgccgtatctttgtcttttggattcctgttccccccaaagcagaaatttccaagactgtagcagatcatttttccgttgtataattccattccctgcaatacatgaggatgtgtaccgaccagcagatctgctccccagtcaatcacctggtgtgccagcttctgctgataatcattcggataatgatccccctctatcccccagtggcaacaggcaattaccagatccgctccttcttcccgaagttttgcaatcccatcccggatataattggcatgtttttcatcagcggacagctggcttgcggagacaattccgattttgataccatccttcgtggtataggtatccacatgatcattgaatccgaagataatccctgctttatttaacacttccctggtatcatcaagtccctgctgcccataatcaaacgtatgattatttcccagacttgccccctccacagaactgtctgtcataataccaacatactccggttttccttttaagttccacgttttttccacacgctcggtcgcatttgacaacacacattccagattgatcagtgtaaaatcatcctgctcaaaaatacttctgatatttttaaaaaaataatcctgcccgtatttatcatagtattcatgaaaggaacctgcatacccatgcgtctgtgttgccccaagcgtacagtcacctgtcgccgtaatttttaccgtctgtatcaccggttcctgctgcgtttcagttgcagtcccggtttccgtttcttccagcgtacccggttcttccgtcatctgtgtctccgtgattttttccgtagaagagggcaaagccgatgacgttgctgcaggagaagaacatcccgtcagcaaaaatcctgccattaggattggcaatatccattttttcatacgttttcagactcctctttcacaagaatatccaccgtgtgaccgcttgcacccataagatccatccgttcacaggttgccagatgatactgcagaaacgcatcaaactcttcttccgtcagcgcatttaaaaacggacgcatataatttgctgcaccgtctgccgctatgatctgccggcgcctgacctctacctgccggtccaatgcttcaatatcttccagacgaaccatggaatacagaggattggcttttgaagtacagtgataatcctctgtgagcattccctcctgaagcgcctccagaatatgtttttccttaaacgcatacgtgataacggaaaattcattcataatatacgccacgagaatcctgcctccgggtctggtcaccctcaccgcctcccgcagcgcagcaagcttgtccttttcctcatgcaggtgatacatcggcccaaacaacagggttacgtcaaaggaatcatcggaaaattttttcagattcattgcatttccctgatatgcatgcactcctgcacccttctgtttcaggcgtcccagattatgctttaccagttccacggccgtcacatcgaacccttcctgtgccagcggtacgctgtatcgtccggttcccgccccgatatcaaggatatggatttcctcttttgcacgttctttcacaatttcatccagacactgatggatataatgcatgcttgtcacaaattccaccctgccgtgtcggctgtccagacgcttctcttcattaaatttattataataggcttctaagtctgtcatattttaatactaacacattttctttaaaatttcactcacaatcgctgatgcgacatccgctttgctcattatttccagttccctgcagtcatctgccgtaatcagcgtcaccacattggtatctgtaccaaatccggctccggctaccttcaggttattcgccacaatcatatctgcattcttttttgcaagttttgcacgggaattctccagcatatgttccgtctccatggaaaatccacacagaaactgtcccggttttttgtgcgcgcccagatacgaaaggatatcttccgtgcgttccatcgtaagagtggcatccccgtcttttttcttgactttttcatcgaccgggtgatccggacgataatccgccacagctgccgctttgataataatatcctgttgctctgctgtctcctttacggctgctgccatatccgcggcagatacaaccggaacgacctttacaaacggcggcggagtgattgccaccggtcccgtgatcagcgtcacttccgcgccacggcgcatacagttttccgcaattgcatagcccatttttccggtagagtgattcgtaatataacgcaccggatcaatcttctcctgtgtcggtcctgctgtgaccatcactttctttccgaccatgtccttttcgcaggcaagatctttcataatataagaaaacagtgtttccggttccggcattttcccggctccggtatccccgcaggcaagataaccactcgccggatcaatgatatgaaacccataatgctccagctttttgatgttatcctgtacgatcggattttcaaacatattggtattcatggcaggggaaacatacttcgggcattttgccgcaagaatcgttgttgtcagcatatcatctgcgattccgtttgccatcttgccgatcacattagcagaagccggtgctaccataaaaatatctgcacgctttgccagtgccacatgctcgacattgaactggaaattccggtcaaacgtatcgaccagacacttgttgcttgtgagcgtctcaaacgtgataggattaataaaattggttgcattttccgtcatgatcacatgcacatccgcatgctgcttgacgagcgcacttgccagataggcgattttataggcagcgatacttccggtcacaccgagtaccacacattttccttttaacattgtctcttactcctttgcagaaaaatcatatcttctgctattttatcacactttttccctaaaacaattgaatttttgtcatctgttccagtatggaatctttgacagaatcgttcagatatgctggatttaattttctttttgcatatgcaaggtaagaaccatttgtctcttcaatcaaaactgccgtaaaaaaccgctcccagctaaaatatgttttgctttccacatattcccacggcttttccagcacctgatctgcccatttgctttttactacttttgcctttaatatcagccattcaaatgactccggcaaataaagcaccacttgatcttttccaccaatcaactgcatcactctgtcaatttcagaaccaaatgccgcgccgtctgcaattacaagtatgcgttcatttttatgcatatttaaataatggaaaacatttgactttccattcattgtctcacatttcaattgctgttgcctacatacagaattaaaaaactgataaccggaattactgtcttccgttattacaacctctggtttgatatccttctctaaagtctgtgctccatatattctgtaaaactcatgataacacggttttaatgttccgtattttcctgaagtacgaattccatagatttcctccacgctatacggcaaagaaggcaaggattccctggaaacaatgacataataattatctgttttctgaatagtatctgcgaattctactgtcttgataaattcgtttccctcatcaataaatacaatactatcctgcattgctgataactgttctttccacagtgagccttcgagcacataacattttttgtcacacgtcagttccacaggggtcccggatggattgtttacgtattcccgaatcatatctaccaatgtggtttttccagttgcgctgtctccccggatgaccgtcagatttcttcgaatttcaaaatcatattttaagcgctttgttgatacaataattctatgttttcccttcat

SEQ ID NO: 429 - DNA, 25021 bp, unidentified
  source 1..25021: mol_type = unassigned DNA
ttatgccatatccggctgatcccataaaggcagttccacgccgataccttcttttaatgcattgcggtatacggtaccgccccaggcaatgtcctcaacaggcataccgcctaccgaatatacaatgatctcatcatcgctctcccgtcccggatgctttttattaatgatatcagcaatatctacaatatcttcccgctgaatccgtccttcgtgcagataatccgtaaacttggaacctatgatctgtaccatctcataactcggatacggaaattcctctgcccaggcttcatacagtttatagttatccaccactttcttgcagcggttgatcagaaaatcatcatcaaaccgtgcagccgagggcagacagatgagtgcaccttttttgacccagtcttctgcgatatatgggaaatcgatttcttttaccggtgcggtggaagtaacacagatgatgtcactgtcttttacggcctcttccatcgaatcacatacgatgacctgctgaatctgcggacattccttctttacgaactcttcaaatgcatgcagggaacgctgtcctcttcctttcacttttaccgtagtaatcttcgggcagacgcttaaaaaagccagcagacaggttcttcccataacacccggtccgataatggtaaccgtttcggaatcttttcttgccagatattttgccccgactcccggaattgctccggtacggtaacagctgacaagatttgcagacatcagtgccagtggcgccccggtatctttatcgttcaacatcatcatcagaatggaacgcggcagaccggaagctttattctcacagttacttccataccacttcattccggccatctggtattttcctccaagatatgccggcatcgccataaaccggcggtcgtctgcatttttcggcattccctcaaactgcggatcatccgggaaaatgacctgtgcaccgtgggaattatggttgactccggccatcacataatcgcctttgttcaatgtaaccagcagatcttccattgcctccacacactgatccatgttctttactccggccttgatcatatccggttcactcaaatataaaaatttaatcctggtatccatatgcatttcctccttatgttttcagaggtatggaatatcaaagcaaataaacaaaaaagacgccatagtatcacctactatagcgcctttgctacttattcgtgcttataatataccatactatctttttgattgctactcctgtattcttttttatacaacaatcctgctatcttagatcactgcctgaaaccggtcataccgcagttcatgcagatccagtgtggtttcttttcccatggccagttcggataacagttttccgacaatcggtgaaattccaaatccgtgtccggtaaaagcacaggctaacagcagtcccggcacttctttaaccggtccgagtaccggtactccgtccgcacacagatcttcatatccggcccaggtacggacaatctttgcatcggcaagttttggaatgtatttcataattccccggcagatgcacggagcagtgatacttgaagtaatcatatgtccattgtcacggttttctgcctcaaatccggaagcacctccgaatacaaaagatccatgattcgtctgatgtccatagaaatccgcatctgcggtaccaagcatctgtggaaacatctttggctctgcctccgtaaccagtgcctcgatcagctctttgcgcatcgggatgtcaatgccgacactcgctgcaatcgaacggctttcgtatccggatgccagtacaatggtttctccttcatacacatttttttctgttactacacgtctggcttttcctttgatcttctggatctcgagcacatcctcacctgtgataaactctgcgccaagctctctggctctcttgtaaaaaccgagggttgcaacgagcggattggcatgtccgtcggtcggacaccagctggcaaccgtaatctcatcgcttaagtatgggttgatctcacgcacttcttttccatcgatcatccgcacatccagtcccagtgcaacggcacggtccgtcagtccctgtaagatttctttgtgctttgctgtctttccgagacgaaggtttccttctttatggtattccacatccacaccgagttcttcggacagtgtcggccacatgtgttccacggcatacatggcaagcggaagttctctcggatcacgtccggactgtcttacaccgcctccgtttcttgaggatccaccgtttccgatatgatcgcttttttcgagtacgatcacggaaactccttcttttgccagataataagctgttgcgcatccgatgattccaccaccgataattactacttccgcattattcttcatcttcctcgccctcctttgcctctgccgcaaacacgcgcatctcgatcggacgcatcggtgcccgggatgttgccggttccagttctgccggggatacgttcagttctcttgccacgattcctttgaccagctttgcacaggtctgtccctgacagagtcccatgccggttcttaaataccggcgtatctccgtaagtgtgaacattccatcgtgcaccgctttgcgaatttcccctttggttacttcctcgcaccggcagatgatcatatcgtcatccggtcccggtacgaaaggtccgatatctcttgatctatcattaatctcatgcataattttttcctcctctgtgaatcaggcttctgccttacgataaaatctggccttcattgccatatctgccggcaccttaatcgtcagcagattcgtatggtcaaatgccttcgatgtcctgacggataccacttccgcctcacagattttttcaccgctcctgctcattccgtatcccttttctcccttttccggaagtggaaggaattcatatggaagcgtcacggttgcaaatcccggctcatacgtttcatcgactaagaagattgcctgtccggagcaggatgccacgcacataccgcatccgatacaatccacatccggatctaccaccggaagggaggtaatattttctccaatcctgatgcaatgcttcgggcatgcatcctgacatgggttacacggaatattctgtgtacattccatcaccggatgaaccccgactttgtgtgtcacgcccgggaagcgttcgatttcatcatctgcaacatatccttttttcagaagattcatggaaatatcgattccttcttctgtcttctcgataagttttccacgattctttggagcaaacatgccctggcgcagtccgtcaagtgcatcttcctgttcttttacctttgtctttaattcttcctcatccatatatcccaggtaatgggcagctgcgattcctgcgatacgtccctcgatcatggcagagctggcttcctcgatccccgatacatcgcctgctacgaaaatgcccttgatcgaagtttcgccatattcatcacagatcggaacctgtccgccacgctttggattgtcttccatctcgcagcccgccattttcaacagctgcgacataggagaaagtccgactgccaggcagatcgtatccacatcgaaatgcttttcggttcccggaatgaactggaagtggtcatccacttctgcaatcgtaacaccgatcacatactcctcgccctctgcttttacgatggtatgggaaagataaaacggaacaccggttcgtgcaacctttgctgcatgaactccgtacccaccgacacggggtgctgcatcaaccagtgcaaccacatcacagccgcactgcatcagctggaaggatacgaccagaccgacatttccggaaccaagcatcagaattttgtttcccggttttaccccgtgcagattcatcattgtctgtgcggctcctgcgccgatgactcccggaagattccagccctcaaaggtaaccatattttcagcggctcctgtagcaatgattatggaatcccctttgtagtgatgaacctcatctttgatccttaccacaatttctttatccagatacatgccgataacggttgcattcagcacaacttccacaccggcatccgctgcttcctgcaacagctgctgcccgatcacaaaacctctgacttttgccttatgttcctttgatccaaagaatttatggatctgcttaaacagctgtccgcccggcttctcattttcatcaaataccacaactttcagtccccgcttcgctgcctcaactgctgcagacaatccggatggaccggctcctacgataatcagatcataacgcttcatattactcactcccctctactgttcttcaaacggtttatccgatacgccgtactgtgtctggactttcatgccctctgcaagtggtgtcatgcaggtgcggacatttggttttccatccacgaccatcacgcagtcggtgcatcttccgatcgcacagaagattcctctcggtttgtgttcctttttggtataacggtgaaccatcacgcctgcggcttttaatgctgcggcaattggctctccttcgtatccctgtaattctttaccgtcataggtgaatgtaaccagtttccctttctgctgttctccaaggattggatgttctgaaattctgctgctcatataactccttcctttctatgtgtaatcatgtatggtttccgtgaaaatcaaaaagacacctatgatttctcatagacgcctttgtctactgcggtgccccgtaaggggtatcgccttcgtacatcgcttccgcgtgagcggaactctcatgcgatgtgctccttattgcggtgccccgtatggggtatcgcctgcggtacatctccgatgtatcgccctccattatgttttttccaagaaccaattacttttcttaacttgtccttatcataccctctctcccaacacatgtattgtaaaaaacgatacaacaaaaaagaagctgtgcattcatgcaacagcttccttctttgttttcatctccgacaaattatccttcaatcactttttggattgctgcaaacagctcatcgtacgtctcgtatgcaggaatatccggatattcagccttgatggcatcggtacttttaaataagaaaccagccttgctggcctggatcatgccaagatcattgtggctgtctccgcttgcgatggtatcataaccgatggactgtaatgccttgacagttgtgtacttggacttctcacagcgcatcttaaagcctgtgatttctccgttatcggcaacttcaagcgagttgcagaaaattgtcgggtatccgagttttttcataagcgggcctgcaaactgggaaaacgtatcactgatgataatcacctgtgtcatggcacgcagtttatccaaaaattcctttgctccaggaattggatcgatctttgcgattgtctcctggatctcttttaatccaagaccgtgctcctttaaaattccgatacggtatttcataagcttatcataatccggctcatccctagttgttctctttaattccggaataccggtctcttctgcaaatgcgatccagatttccggtaccagtacaccttctaagtccaagcaaacaatttccattttttcttcctccatgtgaaaataaatatactactattccgatttatttccattgtaatgaattcggcagtctctgtctagtaccaaacgtcttttctgtatttgtcaaatttaatgtaaaaacatcttaattcgtaccactaaaggtgtttttaacgtttaattctatacataaattgtactagttttcaaatataatgccctccgcaaaaattttatccaaatatctccatgtaaatgcctctattatgttttataaaattttcttttagtaataaaaatttttacaatattaaattaaaacgctaatttttttttaattttattatttactttttcataaaacatttatataatattaaatagaaactttaatattattaaatccttgttataaaaacaaggtagaaagaggtttatatgataaaactcgaaaaatatcttgtgcagtaatgtcatttgttatgctttttgcaatgtctacatctgtatttgctgctgaaaaaacaacggaagatttctccactccccaaaaatctattgtatgtcaaaccaacttagacgaaatggatttaagcaaatctttcaccttaactgaaagttatactgacaataatggaactccgattacaattacttcaacttttaaaccagctctgcaaactcgcggaagtagcacaacaaccgctagtgctggatcttggacatcaaaagcctcttatggcatagttggaatgagttatgaatttgatttgtcaaaatctggatctcaatggaaaatttctcatggcagaaatttttcatactttggtgctctttgcaaattttctaatccacaattaaaaatttctagagcagtatcaaccaattcttcccctgcagagattgattcctcagtcgttgcaactgtaagtattcctggtggcggcaccgcaggttcctctgtatgtttgttgaatactaaggtcagtaaaagtggtgtagttactacaacttggaattaaattattcatctttcctgtaaagtgcatctatttcagaataatatatttctgactgtagacaaagttctccgaggaactcgcgtttctcggagaactttattactatattttaatcgaatattgtatttcacctgtttcaaaaaatcatacggtcaactaacacccatgtacacctttattgttacaaacctggatatgaaaccttatcaaactattcagttttattacaatcgtagcaaaatggaaaactttattaaggaaagcaaaagtagaatcgattttgctactgtcagcaataattctaaaatagtaaattctaaccacatgagatttcatatatttgtctacaacttattcaattggtttaggcgactggtactatctactaatatgcgaaatcagcaagtagatactatctgtttaaagcagataaagattgctacaaaggccagtccatacagcaagatatatatcacattcaaaccgtgcagtatctgtccttataaaaagaattctacagataactaactggaagaatccaccaatttcctgtaccattgaattaacaactattgaaataccttaatagttcaaaatgactcaatcaaatttcactgggaaagttcactcattttttgtagatgatccaatttatttcaagaaaattcgtttgatgttttgcagaattgagtatttctatatgtttataaataatccagaattaattgatatttctaatccgatatatactttttgagaagttataaatcaaatcgatctgtcataatatttaaaaaaaatgcaaaatagttctcccaagatgtgataaacaaaaactccttaaataacgagagaatacggacattttcttggtctatctaattgactaatccaagcctatgtctgtactctatagggctcaaatatcctaatgattttttatcctttttaattataccaatgaagataattacttaaaataccaataaattctgagatgtttaccccagaccaatcggtgctatagaacatctcatttttaattcttccaactatgccctcgcagacagaattagcaggtgaacaacttttctttgacattgatcatatgaaaccatttttctccatcctatcaatccaacctgactagcggtagtatacacttctgtctgaatttatgattggtttttcttctatagatagtacaatttagctacatcgtcaagcatagaattgacaagtaatgcatctgaagaagtgcttatattccaagtaacaaataaaccatcaaaacaatctacaatacgaggtgataaataaacttttcctgccggaattgcaaactcggttatatctgtcaacctctttttattagatttaggcgcagaaaaatttctgttaattagattatctactgctggagatacttcaccttaataagaattatatttacgagttcgtttgagctttactacaagttgttcttccttcataattctacaaataactttttctgaggcaattatattttcacgcctaagtaaggtattaattcgtctataaccatatcaccctctattctctgtatataattcaatgactctaacacgtaaaagtgtatatttatcttctttttgtttttgataataataatcatttttgataattgtaatttttgtaataatagcagtgagtatctatttttcaagacatcgattatcactgtcttctctccgttggtgagagtactctgatcgatgtctgggtctttttttaacatttatcgttgctttaagaatgtctatttctaattgcatatctcacatttgaaccttctactaatattcccggagtaatatttttgcgattcataagacctaatgtaccttcttttaaataactcttttgccattgataaatactagttctactatacccaatgtcttctgaaacatattttatattttctccgagctcatagtaacgatgaattgcattcaattttacttctaatggaggattgcgaggatgatcaggaggattatcaattacagggtattctttccttgttttgggcgggatatttttctccgcaatccatgtgtacagatttctacgtgttggataacctagaatcctaatagtttcaattacagactctgtttcatgatatatccgtagtgcaatatccttttgttattttgaatacataaaaaagctcctttcggagccctatagtagtccagaatgttgcccgcatcctcacctcccttaaagtaatgctctttgcattcattaaaaatggaatatattcgttgcaaaaatcaatatattctgtagctataacattcgttacatataccatttcactgaaatgagtacatcctcttttattcctttcagaaatttaaatataaaaatcaaccagttatcgtccgtgcttattaactgtatcaatttttcataaagaaatgtctatttcattccaagccaaaagaagaaaacaaagaaacgacattttgccggaactgacttttctattcaaagacttatgtttcaaaatttattatatctctattagaatgcaattaatgttcagtacatcaactcttttcataagtcttctaatttcattttttgtatttctttttgcaacaaacttttttcctttttttgtcgcaagtaatactttataaatcttttaacaacaaaaattatcaacattacaaatatgatctgaaaaattatagccattataatatacaaaacggtcataagcataatatttttccccctattttttaccaaatagcttaaataatgcaatcataactactgcaatgactattaccgcaacgataataaatcccattaaaaatttcattctctctctcctttcccacttatgttttttctatattcttcaattaatatctttgcaacatcatagtcaattttttcatctattaccattctttttattaatgatacgtaaggttcattttctaaatcttcattcactttaattttttgaattaacttatctaaccgtaatctcactgtaggataagttacaccatactgtcttgccatttctttaagagacccagatgccagtataaatttttttataaactccacatcctcattttctagctttgaaaaccacaatggcataacatcattaggcatttattttcaaacctcaattcattttaatctttaataatattaagtataatctacaacaatattaaagtcaagagttcctttctgaaatctattctatatattttcattattatttatatataatcttttaaaaacaacaatcatctacacattatcatagaaagatgaatattactaatggttctgtatattctgttgtgccataaatcgccggtaaaagaacaccccgaccagcgtggtgatgacttccgtcaccggaaatgtaaaccagaaatcattcagtcccagacgggaaaataaatacccgagcggcacaaacagcacaacggtccttacaacggtcagaagtgaacttttaaccgctgcaccaactgcctgaaagaacaccggaaaaatcagtgaagtgaccatcgggataaaactgattccgacaaaatgaaatccgactgtgccgattgcaatcacctgcggatcactcgtaaatacacggagcatctgtccgggaatcagattaaaaaccagcgttccgataaacatcagccccattcctcccacaagtgaagtggacagtgttttcttacagcgatccatccgtcccgatgcataattataactgatcaccggcacaatacaggtctgcagtgcccccagcggaataaagaaaaatgactgccacttgtaataaagtcccagtgccgtaactgcctgatcggaaaaggttgcaagaatcagattcaatccgagaatataaaaggtatatgccgactgcataaggatattcggaattccaagtttataaataaaacagatatcccgcggatacatcgaaagcggtggagacttgcgaaacccttttttcattacaataagagccgctacaatctgtcccacaacagttgcgatggcagctccggcaatcccaagtttcggaagcccgaacagtccaaaaataaataacgggtccagcgcgatattaaccagtgcccccacgatctgtgcgatcatcggtgtcttcatgtccccatttgcctgtaaaatctttgtccagatactttcagtaaacaatccgatgctgaatacgcagacgatccggccgtatacaatcacatcctttatgacttccgcggaatccgtagacatccttgcatatgccggcataaaaaagaaacagactgccgcaaaaagcacccacaatgccagcgtaagcggtgttccgattcctccatattcatttgcttttttctcatcatgcacaccaagataatgtgccattgccgtattgattcccacaccggttcccactgcaatggcgatcataagaagctgcagcggatagataatggagagtgccgtcagcccactctccgaatattttccgacaaataaactgtctacaatgttataaagtgcctggatcagctgggcgagcatgaccggaggtgcaattttcagcagaattctgctgattttttccgttccgaaataattgctgtttgtggtttccataaaataatcccctgtgaaacttcgtattccacaggggattttacgcccgaaaatcatacaagtcaatgtgtttttatgtggatttatcccgccaaatatcatactattggcaccgggcagaattgctctcctggagtttgccatacaactttctactcactacctctttgtttcaaactttgtaatttcccaaatcaccacaaattgcataaacattatgataccagatacgcccattccacatataatgcctatttttccataatcgtatatggcattcacactataactataaaataccccaataaatatagctattatcaaagaaacaaaataatagcatatatttttttcaaacaatatcttccaaagttcttggtctgttatgcccaccctatacaacttgtaaatgatatgtttttcttctttcagttcagattttattttgtaaaatatacatatattggcggccaccaaaaacaatatatcaacaaaaagcaatagaaaagttaaaacctcagatgactgctttgcaacactataagtttcgattttcgatgatagcatgtacgcggattgatcttccataggtaactcattcattctactcattttttcctgtaattcttgcattgcgttgcccgaatctttccattggctaaaattaaacataaccgcagtttcatagatacagtcatttgaatgattcctgattttcataaaatcctgttcatttacaatcaaagttatatcagccagactacggcatgaattcattaatattttatttgactttccttgcaatttcaaatgcattttttcatgattaccaagtccaatagttatctgcttatttgcttgaaaatcatgttcatatccatcatttatatcaaactggaataattgtataaagtaacctggttccacttcatatgtacatccatattttttattaacatcatctgcagatatgatattacaaaagctatttctcaacagccccaaccgtttttcttccgtaattgtaatgtcatatttatctaacgtttgcataatttctttctggcccatattgttgatatcattatactgcacatagaatagatcatacggcgaatacgtaagtgcatttctcgtaaaattttggtatgttactccacaatgtgctgtaaaaaatatcgcagaaataaacagaattgctgcaataaaacttaccattctccatgattttatgtactgtaatacgaatgacaaactaattttccacttaacacttcgaattttcataaagatgcagtcaaaattagccaacattattcctatgccggtaataataattgctgtgctgataaaccatatatatgttttttcgaaattataagcatataacataactataacagcaactattataagcaatattccaaatagcaagaatatattagatcccttttttcctttttcttccttatatcttgcattgaataactcaagaatttctgcgtgtaaaaacctaactatgttcaaaagcaaaataataataactaccaaagcatatacttttcctactgacacataagctccaagatgcagcgtccatttcatagaacgcaaaccaatcaccttgtgaagataaaagaaaaaaaatactgaaagaacacttccagttacaattccagcacaaaagctaacgatgcttattatcagacattctagcaacatgttacaaatcacttcatattgcgtcactccaagagttattaatactgcatactcctgctttctgctcttcaaaaaagcctcataaacatatggcacaaaaagtatcataaatagtgccgttaagacagttggtgcaaaaatattacttgaaatcatcggatcaattttatcagcagacataaaagattcattttcccctatagataaaaatgcttgaaaaaatgctatgataaaaatattacatactaaatataaaatatagtttttacgattataccatatcattttcaacagaatacgaatcttttccatctgtttattcacctcctatccgctttaaaagctcataaatatctttcaaaaaagtgctattactcttgttattcttttctatttccaaaaattgtataccatctttgagcagaattaccttatcacagaaagatgcagcataagaatcatgcgtcaccataaccagtgtaatcttaaattttctatttatatcaactaaatactccattacattttccgttgattttgaatccaaatttcctgtaggctcatcagctaaaataatctgaggagtattgatcaatgccctcgctattgccacacgctgtttctgccctcctgaaatatctgttacactcttccccataatgtctgcgatagataaaacttcagctatttgtttcaatttctcttcactgtcttctattctattctccaaaataagcggcaataaaatattgtccttcacatttaaactttccaaaagattaaaatcctgaaaaatcagtccaatattatttcttctaaataccgccattttagaccttcgcattttagttatttcttcatgatcaatcataatgctgccactatcggctttatcaatcccgcatattaagtttatcagtgttgttttcccacaacccgaggctcccataagagcaaccatttctccgctaccaattgaaatatttaatcctttaagaacttgcagcgagttttctttattaatcatataactctttttaagatttctaatttctaaaatattttgacattcttccatatttttaccatttctaactaaatactctaatcaatctgctgctcacttcatctatagtattcatcttatatattttgtttttaaatataatctttgtattaagttccacttgctgttcataggttttcggctgttttataatttgataatcatgccctgctttactatgattttcccgtacaccatcgcttatatccactattatttctcccaaaataaaaatgtctccccatgggacacatcacttacgtgagaggtgtggggagtcctgttgatattataatatgctatttctataaaaatcgcaaccatcttttaatttattttttctgtctaaatacaatcgttactcttcacttctgttgtgccataaaccgccggtaaaagaacaccccgaccagcgtggtgatgacttccgtcaccggaaatgtaaaccagaaatcattcagtcccagacgggaaaataaatacccgagcggcacaaacagcacaacggtccttacaacggtcagaagtgaacttttaaccgctgcaccaactgcctgaaagaacaccggaaaaatcagtgaagtgaccatcgggataaaactgattccgacaaaatgaaatccgactgtgccgattgcaatcacctgcggatcactcgtaaatacacggagcatctgtccaggaatcagattaaaaaccagcgttccgatgaacatcatccccattcctcccacaagtgaagtggacagtgttttcttacagcgatctatccgttccgaaataattgctgtttgtggtttccataaaataatcccctgtgaaaattcgtatttccacaggggattgtacgcccgaaaatcatacaagtcaatgtgttttttccatccatttacaccaacctgggatgctttttcttttctaaaatttataaatgataagcatacacccgtgcttcatatgcctgcagcatttcttccttctgtttggaataatttccgatcaaaagcttggcatctgccggaatctgctccgttacttctgccggaatagaaacttctttttccgtaaaattacaaagcaccatcagccgctgcgtcccgagcattctggtatagataaataatgcctcatcctccggtgctaacagtttgtaatcaccataaacgataatctcgttttcatgacgaaggcgaatcagttttttgtagtacgaaaagacagaatccggatcgctgatctcctgttttgcattgacctttggataattactgtttaccttaatccacggtgttcctgtggtaaaaccagcatttgcactgtcatcccactgcatcggcgtgcgcgcattgtcgcggctgatccgctttaaatatcccatcatttcttcatgagatactccacaggtttccgtcagctctttgtatgcattcaggctttcaatatcccggtaatcctctaactgatcaaaataagcattacacatgccaagttcttccccctgataaacatatggcgttccctgcatcatatgcagacaggttcccagcattttggccgaaatttcccgatactgttcactgtcatttccaaaccaggaaaccgagcgcggctgatcatgattggataaaaacaaactgttccaggctttgccttccagtccggtctgccatctggataaaatcttcttccataccggaagcggcatcttatggctgtcccatttaccgtaatggttgtctgcctccggtccgcctccggtatgttcgaactggaaaaccatgttcagttcgctgccatctgcattggcatatttttttgcctcttccagcgtcactccggcagcctcccctaccgtgatcagatcataatgggaaagcactttccggttcatttcttttaaatactcatgcacatgcggaccgttcgcacaaccgctgtctgcgtatccggtttctcccggaattccatccggcagtccttccggtttggaaatcaggctgatcacgtccatacggaatccatcaatgcctttttcacaccaccagttcatcatctcaaatacctgatcccgcacttttggattgtcccagttgagatccggctgttttttcgaaaacagatgcaggaaatacatatctgtctgtgggtcatatttccatgccgaaccactgaaacaggatccccagttattcggctcttttccgtcttttccttttctccagatataaaaatcgcggtatggattatccacactctttctgctttccacaaaccatgcatgctcatcggatgtatgattgacaaccagatccatcatgatcttaattcccagctcatgtgcccgtgcaagcatcctgtcataatcttccatggttccgaattcttccatgattgcctgataatcgctgatatcatatccattgtcatcgttcggtgactgataaaccggggacagccagatcacatcaattccaagttctttgaggtactctaatttttctgtaataccattgagatccccgatgccgtctccatttgaatccatgaaactccgcggataaatctgatatacaaccgcttctttccaccatgccttattcaatactgtatcctccttgcctctctcatatttgaatacctgcattatacggcatttttgcgaaattttctttcacattactgcgcaaaaataaaacaattctgccctcatttctacgcttagattatttttgtttcctccagctgttcggtaaacgcttcgttcatccggataatcggtttacgaagtacaagtccgacaaaaagtgcaatcaccaggaagatgccaagttttgccagatctatccagtaatcgttcccataacagcctccaaccgattcccgcagggctgccatactgtgcgtaaacggcagaagcggatacacagcccggaaaaatttcggagcacattcaatcgggaaagttccaccggttcccgcaacctgcataacaagtaaaaccacactgcctgcttttccgatatctccaaatgaaaccgtcagcgtataactgatcgtgacatagactatgcttgaaaaccagcacccaaataaaaacagaaacgtatgcgcacactgaatcccaagataatacagatctcccagtgcaatcagcgtactctgcaacagaccaaggatcagaaatatgatccagcgtccaagataaatttcatgaattttgacatttttcagtcccatcttttttatgctttcctcggaaacggtcacttttaacattgcaaccagcacgattccgccgatccagatagaaagtgtcgaataaaacggtgccatggaagaaccataattatcaatcggataaattttcttcgtattcagttccactggtgccgacaggaaggcactgaccccggacttattatcatagatcatatgttccagatccgcataatccccgttgtcttttgcttttgtgagcttatccgtaatcttttttattttatttgcagatttgcgtaaaagtttaccggaatcatccagacaggtctgtatttctgacagatccgatcctgcggtgtccgttaacgtgtaaacaccctttgtacttgcattgatctgtttcgtcagaccggtaatgtcttttgatgtttcaccgatcgaatctgcaaggttctgcagagttccttttacatccttttcatattctttgctgatctgctgcaggcgtttctgattttcttttacaagggcatccaaagctttcttgtcagagatcaggctggttgtggacttcctcatggaagccgcagtatcggtcagatcatcccgcagttcttcctgtttttcaatagaacggttgatcttttcaatcataggtcctattgaggaatcggtttccggatgtttttccgaaagcttgatcagatgatcccggagtgtcgtaaatgacttgatgtttttatccaccgtctttgctgcttttacaagggtatctgctgtatcctcactgccatttattccatcttccaccgtctgatcccaaagcaggctcatttcagaatataccttttggcctgctttcagtgctttgcccacgctctcggtcgcactgcttattgtcgttttcatatcggtaaacgtctttttggaattttccagaacctgttttccatccgcagactctgttttcagttcttttaaaaaatcagaagacgcagtcagcagggactgggaagaagacgtaatccctgaaaaagtttccagcgtggacgcaatcatatccatgtcatccgatgcatccccaagattgtggatcagattatccaccagccggtctgctccgtttgcctcagccatattagagaccgactgaaacaccgtcattgccgtgtcggatattgtctgtataaatacctgattcacctgtttctggatcgcggttgcacccttgtcggtcacttttggtgcaatcgcattttccttggcgttggaatagtaaataatttccggcttttgaatctgatcggaaaacagactcatcatctgggtactgaatttctccggaacaacaatcgccgcataatattgtccggattttaccccctccattgccttttctttgctggtaaatacccagtccatctgtgtattttcccttagtgcggaaatcacctgttcccctacattaatctcaagaggaatcagacttccggtatatccctcatccacacttgccaccgcgacctttaaatttcccgtattgttatacggatcccagcttgccgcaatattaaaccatgcatacagacacggaacgacaaggacaccgatgacaacaatcattgcgattacatttttgcgaatccgtttcacgtcgtcgatgaaaattttcagaatgtttttcatttgctgttctcctccttcaaaattttcatcagttcctcagaactcatctctcccaaaacagatttctttttcatctcttcatgcagatattccacaatcagcagatacagaatcagtgcaagtaaagaaacgatccacaaaatcagatagaccagtttggattccaggctaaacatcaaaatcagaaatacgagtggtataaccatcatacagataaatccggagcgtaccataaccggataatatttttcaaacgcgagtgttttctctgttaatttctttctccacgcatcatctttcataatcacctgcataatccgctgcagctgtggattatccctgcctttggaatccgtctcacagatcatcagatcggtttctgcaagtctgacatcaaacagatgattcagattcatcagaagcggacggagtacaagcccgataaacaatgcgaccagtaaaaataccagaagttttcccaggccgcttctataagtatgatgatagtatccggcaatacattcccgcattgcgctgatcgaataagaaaacggaagcagcggatgcagtctctggaaaaattccggcatcatttcaatcggatacgttccggaagaacccggaatctgtaaaattaccagaagaaccgccagtgcttttcccatgtgtttaaacgtcgatgccagtgcaaagatcagattcacatagacaaaggaagttaacattccggcaagaataaattttaccggatgcagacactgtactttcagcagaataatatctcccgcacatacgatagctccctgaatcagtcctatgataagaaacagcagaatacgcccgaaatacgcacttgtcggtgtaaaatccggcacttctttgtcccggtctacttcctgttttaaaatagaaaccagtatcagtccacctacccagagtgccaggtttgtataaaacggggtcattcctgttccgtaattttccacttcatacaggacatccgtctttatgtttaccggagaagacataaaattggaaatatctttggcatcaatcttttccagtgacaggatattctgatacatatccgaattctgcagtgtctgcagatccgtgaccgttttctgcagtttctgatccacctgtcccatgacattgcccgtctgtgtaaatactttggagctgctgtgcaatgcagattttaactgatccagcagatctctcatctgttttgtcatggatgttatgctatgtaaggttgttgacagatctccgcttatatctgccagaccttccagtgactgatccagctgcgggtaaatatttttgctgaaatcgatcctgctgtcctgaaaactctcacggttatcctctgcaagcgtttccagtgaacttctcgtatctttggaattctttaacactttccgcatactggtatttgcacttttcaatgaatttaccagtttctgcgcagaaatgctctgcgtctgcagctgtgaaattttctgtccgacagatgctgataactgtgtatcttttccaagattctgatttaacttttccagatctttgagaagcttggcatttttctcattgatccgggtgatcgtatcgagactgtccccaaccgcaagatttgccttatctgcctttatctcaaacttattcagactcttagaagccgaggacgaaacttcatccagaaaaacttccccgccggtcagcccattggagaactgtttataaaattttccaagtgccgtctgacttttttccagcaatgcagaagtttcttttaaagaagaagagctgtcctttgctgcctcatccacctgatctaaagactccttgatttctttgatctgtgcatcggatttatctacttttttctgaaattcttttaccagcttctgataatccgttaaattattctgaacttcggtaatggcagatgtcagttccgactgtgtatcgtccagtcctctggtaatactgtctgcggaagactttacaatttctgatactgccgaagatgccgtggcggaaaatgtgtcgttgatctgctgttgcaccgttgtcgcaccggtatccgtaatcttcggtgcaatggcatttttcttttcattgacataatagtccagcttcgggcgtttcaggtctccggagagaatacttaccagggaactactgaaattctccggaatgacgattgccgcatagtaatctcctgcctgaacaccttcttttgctttctcttcactgacaaactgccagcccagcgacttgttttctttcagtttttcaacaatcgaatcgcctgcattcatcgtgatcacatcggttttggcccctgtatcgcaattggcaattgccaccctgattcccgaagtatttgcatacgggtccatgtttgcggcaatattaaaccatgcatacaaagacggcaggagacatacgccgatcataaccagtgtcgcggcacggttttttaacagacgtcgcacatccctgcggaaaatctgaaatgctgtcttcattcattacctctttctattctcagtttcttaatgaaaaaaggaaaatggctttttcagccattccccttttttattataaagagttctatatgaatgttcaaccgaaacttgaaaattattagaacgtattatttggacgcagatattagaattttctctgttcacagaaaacctatcttcctaaaatcatgtccttatttttcatcattgcataccttatcatgccggcaaacaacaacaagagtccaaccataatcactacagttgccgcaacacaaaaccataacgcgccctgcacaccagaggcaaagatcctgtaatacaatacagacgcacagcctccaatgacaagccctatagcaatgccattccttccatatccgaaaaactcttttgcaagcatctgtttctcctgcttcggtgtcatgccgaccgagcgcagaatgacaaattcccgtctccgctgccacagatcggtcagcaccgtattacagatgttcgtcacaccgattaaaagcactgcaagcaaaaatccatagagtgcaattccatctacaaacaacagcatattgttttcccggttctgcagatcgcggtttcggatttcctccggataaaaatcataggttttttccagtgcctgtgtgagcgttcccggatcggtactggcgtattttacggtaatttttgcaccgccctgcggatcgtgggcatcaagccatgcatcactgacaatgatggttccggagtctgtatagctctgcgacgtatcgacaccaaacggccgcctggttgtgactgctgcgatctgcatctgatcggtcatgtccggtgttttctccatctgttcttcgtggcagaactgtcccctgatccagtcgcctggtttgtaatctgtcaccttccatgtggtttcctttccatcccagtacccggcatacgcattgtaaaatatcgcacaatcttttgccgtttcataggaaagtcccagttctttcaggtaattgcggtacgctgtttctccgactgccagtacctggatcactgcggtcgtctcatgtttaagatccggcgctccatttcgtcggatatgcgtctgtgtatacggtacctctttcgtattcaccatatatgccgccgtccgcaggactgccgcttccgtgacgcttttttcctttgtgctctgcaaaaccgcagaccggtttgcctcccagcttccctgcacatccaccgaaacattggcatgatcgtcaaacatatggttgctttgtcctaccgaaatcgtctgtactcccataaaataggataccagaataaaaagcgccgtacatcctgcgattgcagccgtgatcgtccgcttttttgcccggcggcttttctttgcctgcccgcgcattgccgcaaccggagaactttttgccgcctgttttgccggacggcgcgcggaaagaacaagagtgacagttgagagtaaaataccggcgataagcatctgccatgccacatgaacatgcagatactgtacggtattctgcccgtacaacaacgctttgatagcaaaaattccgcctgtcgaaagcaacagtcccagcacagttcccaggggaattgcggtgcgccctgtcagaaatgcctcgtaatacacactttgccgaatctgccgcggtgtggcaccgaccgaggcaagcatgccgtaactctttcgcttttcctccatggaaatagcaaagctactaccgatgcagcttaccgccgctgccagaatgataacatttgtgaccgcaactgcaagatagagcatgtgatacgccgactggccgatatccatgcgctcaaatcttatcagcccccagttttcataaaaccggtacaaagaccgctccatcagatcattaatctggcggtttgtgatgcgttcatctttgataaacggaaatttctgtacgccgggggtaagtgtaacacccacaatatccgctgtcgtctgtgcccggtcacgcaaccctgctttcgtgtacttgcaataaatatccgtgcgctgcatgtacttttccgggatattatctccctttggattcagatatgtaattacactgtagcccggtgctgtccactcctcaaatccaaagttcggacgctgcacaatgccaaccacctgaaaagatgccgttaatttctttttcagtttttctcccgttcggtaaccactcgactgtgtcagtacattcccgttcttatcctcacgttcggaaatgtccagtgtgatcgtatcccccacacgatattccacaccaccgttcgtcatcatatgccgggaaagcaaaatctcatgatcgtttttgggcatacgtcccttgatcagatgcagggcatttttctgcatggcccgattgtccattgcggtcagatacacatacggtttatcgggatttttactgccggaaagctttgcataccccagcccgacactctggtatgcggtcgcaaccttgcggttatttacaatgtgatccgcctcctcacgcggcacatcgtaaaatacatagtcataatctccgcttaaatcctttgcatattcgatcagtcccgcctgacaggacgaagcaaaggaaaaaactgcggcaaacaacgccgtggcaatgcaggttgtgatccacacggcaatggtctgccgtctgtttttctttcgctcacggattatccgttttttcataatggaagtaaccatgcctatccctcccttatgatttttccatcttcaatgacaatcacacggtcggcggtctttgcgatctcgagattatgcgtgatcatgatgatggtctgtctgtattcctgattcgctctgcgcagcagctcaacgatctcgtcactgttctttttatccagatttccggttggttcatctgccagaacaattgccggacggttgatcagtgcccgcccgatggatacgcgctgctgctgtccgccggagagttcttccggaagatgcgtttttcttccgttaagtcccagctcatcgatcagtttatccagacgctttttatccaccgtctgtccgtcaagttcacacggcagtgtaatgttttcctccacatttaatgtcgggatcaggttgaaaaactgatagatcagaccgatctgcctgcgccggaaaattgccagtttttccgtgctcagcgtgtagatgtcttctccctgtatccagactttcccctccgttggctgatccacgccgcctaacatatgaagcagtgtcgattttccgcttccggaactgccgacaacggccacaaattcgccctgtgcgacggaaagagacagatcattgactgcggtcacacttgtattgcctttgccatagatcttcgtaagatgttctgctcttaaaatttccat

SEQ ID NO: 430 - DNA, 14109 bp, unidentified
  source 1..14109: mol_type = unassigned DNA
ttattctacattcttcaatgcttcatccattggaatttttcttattttcttatattgcaatgcacctattatggaatatgctgcaacacctatcacaaacatttccacaaggacatacgacggtgctttatatgcaagccatcccgggtatgtccccataattgctctccacaggaatcctattgtaaaatcggacagtggaacacttataacaagtgaaataaatacgactatcgccgtagctgcaacatacagcctcattatctcatttcccttataaccgagaatcttgactatcgaaattgcattggaattcttctcaagaataatctttgaaagaagataaaccataagcatataaagtgctacggcaaatacaagccatatataaaacattcttcccattgaatctgtaagctggtcggcaactattgtcatatcattttgtgtaagcttcgtagcaacatatttttcatcaatatcaagttcgttgtcagtaaaatatcccgaataatacgtatcctgtttatcaaaatcatcacggaatctgtctatgtccgtaaataccgccagacttgacggatagacatagcttccggcaattttataagtatattctttatcctcatatttttcttttaaagttattgtatcaccctttttaagcctgtatttatcaaggactccgtcagaaacatatatttcattatcttttaatcccgaaaaatcaatatcaaaatactgcgagtcttcatttaatccatataccgtaaattcatcattcaggccattgtctctttgcatttcaagctttgttatggcatatttttccgcttcattatctttaatttccacaggcatttttaaaatatactgatatttacaaggcatattatcaataattgtctttttatagtcattaagaaccggctgcataacaagtccgaacagcagcattatgcttgaaaatgcaattcctataagcattattatgtaactcgaaatattctggaaaattattcttgtcctgaaacgtgtaaaaaatttccattcaggaagcttaacagcctttctgtttttgcgttttttcaaatcacgccttataaacttcagaggtgacaatttcagcatttttgtgagcatgaaaagattaatcacaaacataagcacacaaggaataattgttgtcataacaaatgcataaggcgaccatattgtcgtgtatacagtaaggctgtaactgttatagtaaatggcagcaactatatctttaaatatcgtatatccaagtatattgccgataatcgcaccgataaacataattatcatcggcagttccatataatgtataacaagctctttacgtgtatatcccgatgcacggagcgtaccgataaccgtagattctttctcaattgtacttattgatgtaaccgcaaaaataaatgccatgataattattacaatatataaaagcaccattaccattgctgtatccgagcccatatcgtcacccgcaaaatgaattgcctgattatcaggctccggtacaaaatcagtcatcaccgcattttttgcaaggaatgttttaatatcgtctgatttatcttttttctctttatctgtcagcgatgtgttgtcatatttccatgcataacaatattttaaattattatcgcttattctgttaaatgcttccggtgtcacaacagcaactgtaaaattttgtgcatcaaacattaaatccgtattgcttctgaataatgcactgtagtcagataaggcaaccagccctgtaatctcatattcttttttatcaagagttactttatcgcccacttttaaatctgcactgtcagcaaattttctgtctattgcaatctctccgtctttttcgggaattcttcctttgtgtacgctcacaccatctatatcttcacgatttttataaattctgtaagtgtgctctccctcttcttcctctttgtaaaaaagactataaacagttatgtcctcttcatcttcaagtttgttttgcaatgtcccggtaatctcatcatttaaaataaaatgtccgtcttcgatattatattctttaaaactatcattgtatgtctttaccatactttttccggcgacgagaaatcccgacaccagaccaatcgtaagtgtcataaataaaaatatcacaagatattttccaaattcgtctttaagctctcttgggagtctttttctaagcggatttttcatatttaacctctactttccatttaccattcaagctgctcggccggaattttattttcattatcatattcttttcttattcttccatcatgcagatgaactactttatccgccatattttttatcgcatcattgtgagttactataattattgtattgccatactgtttatttactttttcaataagttgtaagatttcttttgatgtattgtaatccaatgctcctgtcggctcatcacaaattaaaatatccggattttttacgatagctcttcctattgccgttctttgctgctgtcctccggataactggttaggcagcttatctttatgttcccacaatcccagcgtgttaagaagctcattcaaatcaagcggactgtcgctaagatacgcaccgacctcaatattttcttttaccgtaagattaggaatgaggttatacatctgaaaaacgtatccgagatgctttcttctgtataacgaaagctgtttttctttcatgtcttcaagctttgcaccatcaattattatgttgccgccgtcagcctcatcaattccgcctataatattaagaagcgttgattttcccgaaccagatggacccagaagcacacatatttttcctttttcaaccccggttgtcacatccttgaggacatgattcctgttttccccctctccgtaatacttgttaatcttttcaatctctaaaaacataaatcctccttgttttgcgaagcaaaatccgagtcctatgacgaggagaggatttagcctccttgtttcgcgaagcaaaaacactctgcaattttatatttataacttttgttagttttcactaacccaagttcaaaaatttagtctgtaatcattcacgttatatgccatatgacatttttatgcgatacaacttacctaccgcgaatgtattacagacttaaaatcccgtcagattaacttttcgagactctttaaacttattgctattgttgatgtattatgtaacagtgctgatgttgtaggtggaattatacccgcaacgccaagtacaataagggttgaattgatacccataatcattctgtaattcttatggatacgtttcataagtgcattgcttatatgttttaatgcaaccagttcatagaggtcatttccctcaactgtgacatctgcaatttctcttgcaagctccgctccgtcacttattgctattcctacatctgctgcagaaagtgccggtgaatcgttaattccgtctccaaccatgattactttatgtccaagcgatttttctttttcaacaaattttgccttatcttccggcagaacttctgaataatactcatcaacacctatttttgcagcaacagcttttgctgtacgctcactgtcacctgtcatcattacagctttctttattcccgcttctttaagcttctttataatatctgctgcttcttctcttataggatcctctatacagattactgccgcaagttcattttcgattgccatatacaatcttgaatattcatccggcaggccatcaaataattccttcttatcatcaggtataatgcatttttcatcttcaaatacaaaatgataacttccgattattacttttctgccttctatctgtgatgaaataccatgtgcaactatgtattctacttttgaatgcatttcctcatgcacaagattcttattcctggcagctcccacaacagccttagccattgaatgaggaaaatgttcttcaagacatgctgcaattcttaaaagctcatcttctccaagtccattaaatgaaacaacctgtttaactgtaggttctgccttagtaagtgtgccggtcttatcaaatactattgtatctgcctcagcaatggcttccatatactttccgccttttacagttgcactatatgttcctgcctcattaatagcacttaacactgacaaaggcattgaaagctttaatgcacatgaataatcaaccatgagtattgataacgcctttgtcacatttcttgtaaataaatatgtgagtgcagttcctgcaagtgaataaggtacgagctgatctgcaagatgtgatgctttgctctcaactgatgatttgagcttttctgattcttctatcatatgaacaatattctcatacttgcttccaccattagtagaacgcactgaaattgtaatctcgccctcttcaactactgttccggcatatacaatcgcagattcaccttttcttaccggcattgattcacctgtcattgaagcctgatttaccattgcttccccggaaactacttcgccatcaaaaggaattacattgccgactcttattcttacattatcgcctgcctcaatttcatctgatggaacaagtatttcctgtccgtcttttacaagccatacctttcctatattaagagacatgcttctggcaaggtcgtctacggatttcttatgtgtccactcttcaagaatatcacctatgccaagcagaaacattattgagcctgctgttgctgtatcatttcttaaaatagaaactccaattgctgtcgcatcaagaaccggaacctcaatctttccttttgcgagagttcttatcccctcccagatatacttgaacgaccttactattgtaatgcctgcccttataggaagtggtacgaaaagcttattgccaactctcaaaacaaccctgtttataagcttttccttgtaataattattaagttccctgcctgaattatcaagatatgtctgtggaacatccacatttttataattaaactgctgtaacagtttaatcacatgtgacctgctgccgctgtaacagataactacatcattaactctttcattaactttaacttttgtgacacatttctgtccatcaaagtaatattgcaaaatgtctgcctcacggcaagtcatctcattctgctttaccctgacacgcattcttcctctaatctcatctttaataacaaatttcataagattgtgcctctgtatatttctaaattatgtaatactatttatacaataattattgttcactgcatccacagccacattcagattcttctgacttagcttcctctaactctacatcctctgtagcagattcatcctcgtactcagctgcagctgccttacggtcatcattaatctgaactgctcctgcataaatgtcctcgcaattatcctgtacatttgctgcaatcttcataatacaatctttcattctaaggacagctgctgtgcatcctgtatatactttcttggcatctttacttgaaagaagtttgattcctgctgttccaaataaaacgcctgccgcaaaaagtcctgttttctttccgtcaaattttactgccataattatttcctccttgtgtttacgggttaattaatttcctgttttttccatatttttaacgaaatatatctcgttcaatttagtttacacctgaaaaaaatcagccgcaacaaaaatatccttattgatatttctttatcaataaggatatttcatcaatttttattatatataatcatttttttatatagaaaatcatattatgtttaaacaacatattttagttataattccacaatctatgcatggaggtaaacatgaaaaaatctatatttcaatcaattatcctgctcgcacttataatggtgcttgcctgcttattctatcttacccccgataaaaaaagcaaaaattcccatcccgtatcatcaggaagtgtctcttacataaaacccggaagcggaataggcggtggcgacattaacggaaatgctgtcgccggcaaaaaatcacttcctatttattgtgtaaaacatgatgacagtgaaaaatgcatttctatatcatttgacgctgcctggggtgccgacgatacaatagaaattcttaacactctcgataaatataatgtaaaagcaacatttttcatgaccggcggctgggttgactcttatccagacatggtaaaagaaatctgctcacgaggccatgacctcggaaaccacagccataatcacaaacagatgagcaagctttccgcctctgaacaaaaagacgaaataatgtatgtaacagacaaagtcaaagaacttacaggatatgatgtatttcttttccgtcctccatacggtgactataattcaacgttgattaacactgtatatggatgtaaccattaccctatacaatggaacgttgacagccttgattggcgtgattatggagttgaaaacataataaaaaccgtcaccaatcacaaagctctcggtaacggttctataattcttatgcataacggtgcaaaatatactgccaaagctctcggcaccgtaattgaaacactccagtcacaaggatacaccttcattccaatatcagaaatgataatacgtgataattttcacatggatggaaccggaagacagattgcagattaaccacgctttttcatcccgacattcacagctgccataactagcatgccaactgcattaaatgcaagcacaagtattgctgctgtcattcctattctgtctgcaagaaaaccaactatctgcggcgtaactattccaccaagtgctgctatggcaagaaaaagtgacattcctgccgtagaacctttgataatgctgccgacacttgatactgttgtcggatatattccagcaaagaaaaagccaagtcccgcaattgccacagttattaccggaaggctgtgcgtcgctgtaagcaaaaagaaaaatattgttgtagcaacgcaatatgccagaataagtttatttttatcaacttttgatgataattttgctgtgagcagtcttccaagcattaccataacccatgtaactgatacaagattagtcgcatatgcactgctcattatgttcatactcttaaaatatgttacaaaccagccatttacacagttttcaagtccaagatataagaaaagcagtaatccacagacataaaatacaggacttttgtaaaatggctgtgccatgctgccctcattcttacccttcttagactcaacaggccagttgtaatctatttccatccatacatataagataacagacagtgctgaaccggcaattatagtataagccggtgcacgccatccaaatccgtttcctatataaagcgatgttataaatggtgcaagaaatgctcccgctgcaaatgtcatatgtaaaaggttaagtgccgtcggcttgccgtttgaattatcattgacaacagcattattgataatgctgacagaacctcgtccgattccgacaagaacaaacgctgcatatattaccggcaccggtggaagaagtgttataacaaaaagcattaccggtattaatgcagaaaatattattatagttgcttttcttcctatctttgatgccatcggcggattcacaaagcttgcaataagattacctattgcaaatgcagataaaaatccaccggcaacactgtaattaattcctgcttcttctataatataaggaagaattgcaccaactaaaagtaccatcgcaccatttacaaaaaatgaaaaatagcacggaaaaaacaatctgaattttgatttcatttttacctccaaaaatatgcatacaaaatggcacgaagctaacgattaacttcgtgccatttatgcggatgacaggaattgaacctgcacgtctgttgacaatagaacctaaatctatcgcgtctgccagttccgccacatccgcaagcaatatatatattatcacaaacagatttaaactgtcaagttcatccattcaatcactttatttgtacgcatttcccatttatgattttctgcacatatcttatatgcattttctgcaatatgttccaattcgtcgtgattcgtcagcagtcttttaattttatcagccgcggcatcaatattttcaagattataaaaaataatattctctccatcaataaaattatctttcagatatccgcttgtatccgtaacacagacagcaccgtttaacattgaattaaacactctgtcgtgtgctccctgtttaaaccacggcattacatttactgatatttttgagcggcttatcatgtcaagacattcctgtgacgaaacatttccggcagtaataatattttccgggtgacgacattcaagcatatcccagccggcaccaaatgtatgaacctttattccactgtccgcaagccttgcaatcacttctgccctgaaataaaatcttacagacaaatcaacaaacatcaggttaggcattatctgttttaactcatcgtccgtaaattgaataccctgattctttagttcttcttcggctgcatcttcaacaatcatttcagggttttctataagctttcttacaagtcctctgtagaattcctgataatcactgtcaagatgtgctataaacctgtcaaaagaatttacaggtgtataatttcctgtaaatataacatcaatgtcacgcttatctactggcagaaatttatctgaaagaatatctcttttttcattaagttcagttccgccaagcacaagaaatccgtcatcaggtgcaagctgcacaccaggaaaaaaccttttcatataccttatatggttcttgtcaatacttatctgcatataattttccggacgcagcggcagatatttatgataatacagcggatggtcaacaaccatgttataaacgggaattttcgtttcattccagaagcttccgccttcaaatgattcgtcataaagcccgtcttcgcctgcaataccattaaaattaaatgtgaacgccatgaatttttttgatttatcagccttataaaaatcacagagctgttttgctgacaatccgcttaatacaaggtcaaaccaatatatttcatatccgtgtttttgaaatgtttttgacatctcaatactgaaatattcctgtgtctcaactccgcccttaaataaaatgacgactttatccattttaacagttccttattgcctcaaatatattatcgagtgcggaaacgtcaagatcttctgcaaatccgccatccacttttgatgctgcctcaggatttatcggaagcttagcaaccgccttaatatcatgttgtgcagcaatctcatcaatatggctctttccaaagatttcatgtttcttaccgcagtcaggacattcaaagtaagacatattttcaacaattccaagtacaggaatatccatcatatttgccatattaaccgccttttccactatcattgaaacaagctcctgcggagatgtaacaacaacaattcctgcaacaggaagtgactggaataccgtaagcggaacatcacctgttcccggcggacagtcaacaaacatacagtcaatatctccccattttacattttcccagaattcctttactgcactggctattactggtcctctccatataacaggatctgtctcgttatccatcaaaagattcatagacattaccttgattccgcccttcgtaacttcaggataaataactgttccttcttcatcacactttgccttctctttaagtccgaatgacttaggaattgatggacctgttatatcggcatccatgatagcagttttcagaccgttttttgccgaattaacagcaagaagcgatgttaccatagatttgccgacaccgccttttccgctcacaaccgcaattactttctttactcccgcatagttatctttatttttttgctcctctactctttcggcacagttagagccgcagcttgaacaatcatgtgtacattcttcactcattatatatactccttttcccttctcccaaatgttggatgtttctcccaattataatatattttgggagaaaattaaactaatcgggagaaaaataatttacataaaaataatttattatattattctaaccacttgtaccgttttaattaacggtatcaaccataaaaagctgcaccttaacggtttttacccgtcaaagtgcagctcttttcattacacagattatttctatggcatatttaatcaaatctgtatattttttacatttaacttacatcgataaaatcattttttacctgcaaatacaggtgttgaaaggtatctgtctcctgaatcaggaagcaaaactacaattgtctttcctttgttttcaggtctttttgcaagaatgtcagcagcctttaatgcagctcccgaacttatacctacaagtataccctctgaaaatgcaatgtttctcatttcttcaaaagcatcatcattttcaatttttataatctcatcatatactgatgtatcaagagtttttggaatgaatccggctccgattccctgaattttatgaggaccggctttgccttctgaaagtacagggcttgtggcaggctctactgctacaatttttacatcaggcttcacactctttaaatattcacctacacctgatattgttccgccagtccctactccggcaacaaatatatccaccttgccttctgtctgtttccagatttcaggacctgttgtcttgatatgtacctttggatttgccatgttatcaaactgtgcaagaataactgaacccggaatctgctcatgaagttcctcagctttttcaattgcacccttcatgcctttaaatccatcagtaagtacaatttcagcaccgtatgcttttaaaatattgcgtctttctattgtcatagtctcaggaagagtaagtattgccttatatccttttatagccgcaactgatgcaattccaatacctgtatttcctgaagtcggctctataattgtagctcccggctttaaaagccctttttcctcggcatcttcaatcattgacaaagccactctgtcttttacagaacctgtaggattaaaatattcaagttttgctattacacttacatcactgattccagacttcttcatatatctgtgaagaaataaaagtggtgtatttcctattaaatccgttgcactatgatacatattctccattttcttactctttctccatttcttaaatgtttctgagatattccataactgaatatatcgcattggcaccgtctgccgcagcagttacaacctgtcttaactgctttgtgcggacatcaccggctgcaaacaggccatttactgtcgtctttgtatcttccgatgcctttacataattgctctcgtcgagcacgccgaactcttttaacagttctgtctggggaatcattccgactgctgcaaaaagtccgcttatattaagctttgttttattgtcaagaattataccgtcaatttttttatctccggtgatttcctcaactctggcattcactataatttctacattttctttttgttttaacttctcaagtgttgaagcagaacctctgaaaaattcacgtctgtggacaaggtataccttttcacatatgtcagaaagatacattgcatcatcaagtgcagtatcaccgccgccgattactgcaactctctttcctttatagaaagcaccatcacatacagcacaaaatgacaatcctctgccataatatttttcttcacccggtacgccaagtggtctgtttttacagcctgtggcatatataaccgctttactttcaagcgttatatcttcatcacagcctattatccatatcccgtctttttgccctaaagacaaaacctgtgcttccgtgaattcgacgccgagactttctgcatgctcacggaacttttcaccgaggctgtaaccgtcaattcccggaattcccggataattgtcaactctgctgctctctgctatctgacctgttccaagatattctttttccacaactgcaacattaagattagctcttttggcatagattgctgcggtaatacccgcaggaccgcttcctataataacaacatctaacatataactaattcttcctttgtcgatacatcgccctcaatgtgaaatgaattaagcaccggcttttccggctccattaatgaaagaatcatataacttgccttgctgtcatatgcaagacgtttatcttcttctgaaggtcttgaaggtgattccggatgtgaatgccagttgccaagcggaacaagaccatttgccctcatatccttaactgctgcaagctgctctttcgggtcgagtgaaaaatgctcatttgaatggtcaatatttgtaagaatatatacttttttaatctctttatcaccgccattcttaacgcctgcaataagtccgcatgcctcttccggaacgcatgactttgcatgttctaagataagctcataatctttttttgtcatcgaaatcataatctgctcctttattgaacattattttttcagtagttcattgcactttatttatcagtacattctacctgttcgtagtcgataagttctgttattgtaggatgacttccgcatactgcacaaccatctgtatttgatggaagtttaatcttgtggaattcctgattaattgcatcgtatgtaagaaggtaacctgtaagaagcttgcctacacctgttatgtatttgatagcttccatagcctgaagacttccgattacgcctcccatggcaccgattacaccagcctgcttacatgtaggaactgcatcctttggtggtggattcttgaatacacatctgtagcatggtccttctcccggaacataagtcatgagctgacccttgaatctgataattccggcatgtgaaaatggcttcttagccataacacaggcatcattaataaggaattttgcagggaaattatctgttccgtcaattatgaaatcataatccttgattatgtccatgatattttcacttgtaaggaattctctgtatgtattaactgtaacatcaggattcatggcattgattgtctcttttgcagacttaacctttgccttgccgatatcagctgtctgatgaataatctgtctctgaagattgcttaaatctacatcatcggcatcaacgattcctattgtacctacacctgctgctgcaagatacattgcagccggtgctccgagtccgccggcacctacgataagtaccttcgcattaagaagctttctctggcctttggcacctacttcttttaaaatgatatgtcttgaataacgttcaatctgttcatcagtcaatgccatagcttccacctcccatgaagtaaaggaattctacattatcgccatcctttaatactgtgctgtcctttgctgcactttcaacaaattcttcattaattgaaactgttacatactccggtgtctcaacattttccatttcaataagttccggtaatgtaagtccgtcttttacttctttttctgttcctgatactgtaatcttcatattttcctcatttccgcctgccggctttttattttatttatttgagattttcctcaatccattctacaagctgtggttttcttacagctccgctctgtcttgccttctcgcttcctttgtcaaacaaaagtagtgttggcacagactgtacatcgtaactttctgcaagctctgtatcaaaattaatattaaccttgtatactgcaagttttccttccatatcatcttctacatcaccgataacaggtgtcatctttttgcatggaacacagctgtctgaataaaaatcaaccagaacgggaatatcactttttaataccttgccttcaaattcatccttattaactcttgctgccat

SEQ ID NO: 431 - DNA, 8845 bp, unidentified
  source 1..8845: mol_type = unassigned DNA
tcattttctgctgccgcagatatcaaggaggggacactcgctgcagcgttctccccttgccttgcagtattcacgtccgaacagcacaaggcggtgacagaagtcggaagacttctccggggggagtatttttctcagatcctcttccacctttgcaggctctttatttttggtaagcccaagccttccgcatatccttatacagtgggtatcagtgaccaccgcaggcttatgaaaaacgtcgcccataacaaggtttgcggtctttctgcctatgccagcaagggtagtgagcttttctatagtatcaggtatctcaccaccgaaattatccattatctgtctgcacattgttacgatagagcgagcttttgttttatacagaccgcaggggcgtattatctcctcgatatcagcaacatctgcgttagcaaaatcctcaatggtcttatattttgcaaaaagctctttcgtgacgatattcacccttgcgtctgtacactgtgcagaaagtctgcctgctatcataagctcgtggggctttttatagtcaagggagcatatgccctcggggtagacctgctccagcctttccactatcatttgtgcacgttctttctttgtcatcggtactgctcctttgtttataagtgctttattactttatattgtacacttttttgcaggattcgtcaaccaaaatttcatatcagggacgatattccagcgggtttgtgcgttataccggcataaaaatgcattttgtcatttttgcgggctgaaacagctttggtcacagtgcactgatttgtcgacatttcacggaaaatttacacgaattatgaatttataatcgtgattttacttcacatttcaaaaaaagcctatgatttttatacaatttcaataaaattatgaaattttgcattttactacttgcaaattgcaaaatagtgtgctataataagtaagtgatgtgcggaacgagtaaaaaagccgtgcacaaattataatttataagatgggagttttaataatggctttgaacaatgcgtatcttgaaagcgtttatgagaaggttgagaagagaaatcccggcgaaaaggaattcctccaggcagtatatgaggtactggaaagcctcattcctgttgtagaaaagagacctgaccttgttgaggcaggtataatcgacagaatagttgagccagaaagacagatcattttccgtgttccttgggtagatgacaacggcaaggtacaggtaaacagaggtttcagagttcagttcaactctgctataggaccatacaagggcggtatcagacttcacccttcagtatgtgcatcagtaatcaagttcctcggcttcgagcagatcttcaagaacagccttacaggtcttcctatcggcggcggtaagggtggttcagacttcgatcctaagggcaagtctgacggagaagttatgagattctgccagagcttcatgacagagctttgcaagcatatcggtgctgacacagacgttccagcaggcgatatcggtacaggtgcaagagagatcggctatatgttcggtcagtacaagagaatcagaaacgagttcacaggcgttcttacaggtaagggtctttcatacggcggatcacttgcaagaacagaggctactggttatggtctttgctactacacatctgagatgatcaagtgcatgaagaatgaaacattcgcaggcaagacagttgttatctccggttctggtaacgttgctatctacgctacagagaaggctacagagctgggcggcaaggtagttgcactttctgactctaacggttatgtatacgatccaaacggcatcaacctcgatgttgttaagcagatcaaggaagttgagagaggcagaatcaaggagtatgtaaacagagtacagggtgctgagtaccacgagggatgcagcggcatttggactatcaagtgcgacatcgctctcccatgcgctacacagaacgagatcaacgaagagtcagctaaggctcttgtagctaacggtgtatttgctgttgctgagggtgctaacatgccttcaactccagaggctatcgctgtattccagaatgcaggcgttctctttggaccagctaaggctgctaacgcaggcggtgttgctacatcagctcttgagatgtcacagaacagcgagagactttcttggacattcgaggaagttgacgctaagctcaagaacatcatgacaaacatcttccacaactcatacaatgcagctaaggagtacggtcttgaaggcaacctcgttgcaggtgctaacatcgcaggtttcctgaaggtcgctgacgcaatgaagtggcagggtatcgcttactaatataagcgtaatatcaaagctatatacaaaacggacggtttttatgccgtccgttttgtgttatatttcaaagacgcatggaatgttcccgtaggtctatttgacctgattttcttttattatcctgccacgctcaaaagcacaagcattctcaagcgttgtgcagcttatggcggctagagcttcttcggtgaaaaagccctgatgagaggtgacgataacgttaggaaaagacagaagccttgcggtcacggagctttctaggatatcctcctgtcggttttcaaagacgttctctgtttcttcctcataaacatcaagacccactccgtggaattttctgcttctgataccttttataaggtcttcggtattcacaagcgcacctcgggaggtatttacgaaaacaacattctctttcataagagagatagtttcagtattgataagatgatagcttgcctcggtcagcgggcaatggagcgagataaggtcgctttctctcaggacttcgctaaggggataatatttcacaaaatcaaggtcggagttttgataaacgtcataagctataacacgcataccaaagccgtggcatatcctgcacattgccgcacctatcctgcctgtgcctattataccagcggtcttgccatggaaatcaagtcccataagaccattcaggctgaaattgttctctcttacctttatatagcccttgtgtattcttcttgttactgcaagcgcaagcgccatggcgtgttctgccacggcttccggagaatacccaggcactctaagcactgttatgccgtatttatcggcggcttttatatcaacattattatagcctgcacatcgcataagaagaagctttacaccatgttcatggagccgtctaagcactgagcctgttatcgttgagcttacaaaggcacacacgccctcacagccctcggcaagccttgctgtgtcttccgtcaagtcagcttcaaggtagatgctttctatatcgggatagttttttcgctgcttttcaaatgaatctatatcatactgctttgcgtcatagaatattattttcatgaaaactcctccaaattttaaagtatttcattttacgcttgtattttttgcagctgtttataaaaatatacggtttttgccttaataagataaaattatcaaaggttgacaattgtgcgtaaataggatataatataggtgtcggtatgtaaaaatatactttaaatatactttaaatgcctgttttctacagaaaggatatgatgccaatgtcacaattttcggaacttctcagagaatacataaagaaaaaagatattactataaaagcccttgccgaaaaatgtggtatcgacagaacatatcttcataagatactcaaaggtgaaaggaaagtgccaagcgtagattttgtagaaaatataagcttgcagctcatgctttccacagaggataaaagcaggctcatggagctttataacatttctgagatgggggaagatgtctacaatcgccgtaagcaggtgtcaaagataatacacgatatggcaaacaccaacatggaagagcctgacgctctgactttcaagacagaagttgatattgactctgtgcctgagatatcaatctacaccgacaaacgtgagcttagaaaaaacctgcaggtgcttatatgcagcgatgttcataatggttctgacattcaggtcatcgctcagccaacagagtttcttaccaatctgctgtccattgccgcagaaggcagcgagtctgccataaaccatctgttcttctttgacaacacctcaggtgaaaaaaacaccgcaaaatacaatctggatatttttccgttcatatgtcaccttgcgcaaaagcatgaaaaatatgaggctttttattattatgagggtgcgtcggcatatttcaactccacgaacatcatgccaaacataatgataacgaataattttctgatcagaacagacagcgattattgcgagggcgttatatacagatctaagcctatggtagaattttatatgcggcagtttgaaaagttcaagacaaaatgtgcaaagcttctcgaccacgccgtggatattttggaatatgtttacttttggtacgatgacaacgcaaatttcatcggcgtggattttcagccatgcaccatgctttgtcttacagaggatatatacaacgcccatgcacttttgccagctgacgcaaagaaatttgtaaaagcaaagctcaccatgggcaagaaggctctttctgaacacaaatttgtaaatctgttcagtgaaaagggtcttgcagagtttatgacgacgggagagatttttgagcttccgagaaattcatatacttttcccactcttgcagaacgcaagataatgctacagataatgatatcgctttgtgaaaacggcatggcagactacaggataataaagaacgactattttgcggtgtcgaaaaatctttgtatcaacatttctgacaacacaagtcttaacatcattgccagaaacaactgcttctctgatttttcttatttgaagataagcgaaacgagccttgttcaggctttctgggattattttcagcactttatagattctgacgctgtttgctcacatgaagaaactatcgagatactcaggtcttatttgtaaaaaatgggcgaccaaaagccgcccactgtaatgatattatttaagctgttcacgcattaaagtgagcagctttttttcacgtcttgacacctgcacctgcgacataccaagttgttttgccgtttccatctgagttttattctgaaaatatctcaggtatataagctttctatcctccgcttcaagggaagctatgacctgacggagagagagcctgtcagcaatttctatgtcaggagcatcaacagggatatctatttgtccgtggcggtcgtcttcatctgagctttcagtaagactaacagggggcagggcgacgttcatggctagagtaacggcttcttcgctttctcctgacagctcacaaagctcgcttactgtaggttctctcccctgctgtatggaaaatcgctcacgttctcttacaaggcgcatggaaagctcttttatgcttcgtgacacttttatcgtgccaccgtcacggaaaagcctttttatctcccctaatatcactggcactgcataggtggagaatttcacaccacggtcgctgtcaaaggctttcgcagcttttacaagacctatacagcctgcaccgtagaggtcgtcatactctatgccacggttgcggaagcggtttgcgcacaggtgaacaagccccagattttcttctgcaagaggggtctcgactatgctgctcattttatactctttctttcaaggttttttcaaggataagggtagttccttctccaagcttgctacgcaccttcactttatccataaagctttccatgaccgcaaagccaaggcctgctctttcctcctcaggtgcagtggtgaaaagtggctgcatagcctgctcgatatcagcgataccgcagcccttatcccttatttttatgtagatgtgtctgttctcgaatatccttatttgcatgaatatctcccctagggtgtttcggtatccgtggacaatggcgtttgtgactccctctgacactgcggtcttgacatctgcaagctcgtcgatctgagggtcaagctgagtaaggaaaccgctgactgcaactctagcaaagcgctcattttcagaatagctgggaaaactgactttcatttcattaaggggttttcgtttcaattttatcactctcctttgttttgtcatcggggctttcattctgttcctgagctgctttcttctcttgtatatacggggtcatatccgtgactatctttgtgagtctgtgcatacctgcaagctgcaagacctttcggatataagcaggaggcgacgccactatcacctcgccacccatttctgacattatcctgtatctgcccataacaagtccgatgcctgagctatccataaaagtcacctgagaatagtcgaggataagggtaagagggttatggcttctaatggctttatctatctctcccctgaaatattttgctgtatggtggtcgatatcgccgcatatctctgccacaagagttctggctgacggatagttttttatctccacattcatgctttatcattcctttcatcttttcgttttatccgctgaaaatatattatcacttacagtgggatttttttgtcgcattatcgtatgggtgaaaaaagcaggaacacacttttttgtgtgtccctgcctaggaaaattattatgttctatgcttatgtattaaagtccgttaggattattcttaatgaagttccagctatctgctgtcatttcatcaagaccatattgagcttcccagccaaagaccttctttgcctttgctgtatcagcatagcaggttgcgaggtcgcctgcacgtcttggctttactacatatgggagcttctttccgcaggctttttcaaagctgtgaagaacgtcataaacgcttgagccttttcctgtgccgaggtttacggcttcaacacccttgttttccattacatacttaactgcgcaaaggtgacccttagcaaggtcaacaacgtggatataatctcttacacctgttccgtcaggagtatcgtaatcgtcgccaaacacaccgagcttttcaagctttcctactgctacctgacagatgtaaggaagcagattgtttggtataccgttagggtcttcgccgataagaccgctcttatgtgcgccgatagggttgaagtatctcagaagtgaaactgaccaatcgttgtcggaaacataaacatctctcagtatctgctctatcattacctttgtatagccgtaagggtttgttgctgatgtaggcatatcctccgtatatggagctttgtttacagggccgtaaactgttgcggaagatgagaaaactatcttcttacagccgtattttctcattgccttgataagcatgagagtgcctgtgatgttgttgtggtaatattcaacaggcttctgaacagattcgccaaccgctttaagacctgcaaaatgtataacagcgtctatcttgttttcttcaaatatcttttcgagcgctgcaaggtcaagaagatctgcctcataaaaagcaaagtccttgcctgttatcttctttattctgttaagagcctccggctttgagtttgaaaagttatcaactataactacttcatagcctgcttcaagaagctcaacgcaggtgtggcttccgataaatcctgctccgcctgtaacgagtatttttgccatattctttacctcccaaatatgtcaggttttttcttacacttacattataccatattttcacgtttttgcaataccatttttgtttcaaacacatggatttttgttgcaaagagaataaaaatatgctatcatatctataacagaccatctcacagaaaggaacacacagaatgaacacagaccgtcattcctttaaatcagatcagacggacgcactttcactgtcagtatacaacgtgggctatgaaaaatgtcaggggcttcacagttggggaagcggcgttcgtgaccattatcttatccaccacatcataagtggcaagggcgtatacaaaacaccgcagggagagtatcaccttagcgcaggggacacttttctcatttacccctacactgttataacatacactgccgacaagaacgacccatgggaatactactgggcaggcttcaacggctctgacgctgaatttatccttgatcgtgcaggcttcacaagagagtgtcccgttatctccgcagactttggaagcgagcttaaagacagtcttgaacgcatttatcgtcttagtggaaacagaagctcagaccttgtgaaaatgacaggtcagctttacatcacgctaggcattcttatggaacgctcgggaagtcaaagccgttcggggagcaccgcaaagggatatgtcacaaaggcgaaaaactacattgcacacaactacacccttgggataggggtcgagaatgccaccgatttcgttggcgtgagccgtgccacgctatatcgagctttcatggaatacgaggggatttctcctgcacagtatataactgatttccgtgtgaatgccgcctgccgtttgctggaagaaactgagcttcctgtgtcagctgtggcaaggtcggtagggtataatgacagcctttatttttcaaggatattccacaagacaaagggtgtgtcacctacggaatacagggctgacgctttgtgtacaaaaggtgaaaacaaggcgttttcggttgacaagggtatataa

SEQ ID NO: 432 - DNA, 9580 bp, unidentified
  source 1..9580: mol_type = unassigned DNA
  misc_difference 6709: note = a, c, g, or t
  misc_difference 6710: note = a, c, g, or t
  misc_difference 6711: note = a, c, g, or t
  misc_difference 6712: note = a, c, g, or t
  misc_difference 6713: note = a, c, g, or t
  misc_difference 6714: note = a, c, g, or t
  misc_difference 6715: note = a, c, g, or t
  misc_difference 6716: note = a, c, g, or t
  misc_difference 6717: note = a, c, g, or t
  misc_difference 6718: note = a, c, g, or t
  misc_difference 7539: note = a, c, g, or t
  misc_difference 7540: note = a, c, g, or t
  misc_difference 7541: note = a, c, g, or t
  misc_difference 7542: note = a, c, g, or t
  misc_difference 7543: note = a, c, g, or t
  misc_difference 7544: note = a, c, g, or t
  misc_difference 7545: note = a, c, g, or t
  misc_difference 7546: note = a, c, g, or t
  misc_difference 7547: note = a, c, g, or t
  misc_difference 7548: note = a, c, g, or t
atggcaaaacgagtaagcagcgaagattttgaagccgaggtccttggatccgatctgccggttgtggtagaattttattcggacagctgcattccatgcaaacagttatctccaatccttggtggcttggaagatgattatgaggaccaggtaaaagtagtaaaagtcaatgtaaattttgatgccggactggcacagaaatatgaagtggcagcctccccgacgttgttatttttcaaagatggcagcgaggttgagagaatccgtggtctggtaaaacgaccgaagttggaagaaactgtcaaaaagttattataaaacaggaggacaaagaaatgttagtaaccgtagcaggagagaaaaaggaaatcgaacagggaactaccatcgcgaaactgatcgtcgatgaaaaggtagaaaacccggattatgtaaccgttaccgtaaacgatgactttgtagaaagcgaagatttcgacaaaacagagatcaaagaaaatgatgtcatcgaatttctttacttcatgggaggaggagcattttaatggcatttacgaatgaacagatggagcgctactcacgccatatcattttgcaggaagtcggcgtgaaaggccagaaaaaactgctgaatggcaaagtgctgatcatcggagccggtggacttggtgctccggcagcgatgtatcttgccgcagccggtgtcggaacgatcggtattgtcgatgcggacgaagtcgatctttcgaacttgcagcgtcagatcatccacggcacagcagatgtcggaaaagcgaaagtaaaatccgcaaaagagactatgaatgcgatgaacccggatgttacagtaaatacttaccgtgaatttgtgacatcggagaatattatggatctgatcaaggattatgatttcattatcgatggaaccgataatttccctgcgaaattcctgatcaacgatgcgtgtgttatggcgaaaaaaccattttcccacgccggaatcattcgctttaagggtcagctcatgacctatgtaccgggagaaggaccatgttaccgttgtgtattcaaaaatccacctccaaaggacgcagttccaacctgtaagcaggcaggtgtcatcggcgcaatgggcggtgtgatcggaagccttcaggcaatggaagcaattaaatatctgatcggagtcggcgatcttcttaccggaaaactgttgacttacgatgcgcttaagatggaattccacacgatcaaactgccaaaagcaaacggaacttgtgccgtatgcggcgatcatccgacgattaccgagctgattgattatgagcaggtggaatgtgacggcaaatagaatgtaaatgtttttttcgaaggaggaaaactatgttaacgatgaccaaagacgattatgagaaaattcttgctcattgcaaggaaggacttccgaacgaggcttgtggtctgatcggagggacaaaagacggcggcgaaaagcacattaaaaaagtgtatcttctgactaatatcgacgagagcaatgagcatttttccatggatccgaaagaacagcttgccgcagtgaaagatatgcgtgcgaatggatatcagctgcttggcaattttcattcacatccggaatctccttcccggccatccgaagaggacaagcgtctggcatacgattccaaagtaaattatctgatcttgtctttgatggatctcgaaaatccggtactcaatgcgtttgtcattgacgaggagaaaaatgtatccaaagaagaattgatcatttcttaaaaagggaaggaagagggctgttgcaggcagctttcttcctttccgttactttaaagaagagaacggagtttatacgtatgatctgtatcagtatcaatcacaaaaattccataaccgaaacgcgggaacgttttgccctcagcgacgaggaaaaagaacagttttttcggatggcaggggcgcagaagatcgacggctgtgttcttttgatgacatgtaaccgctgtgaaatatacatttccgggtcacgtgaagtatatcatgtagtggaggaattttttcagaagaaaaagggcatcacgcgagaagaattttggaaatgcgcgatgcgttacgaaaagaaggcagcagtaaaacacctgtatcaagtggtttgcggcctcgaatccgcggtgcttggcgaagtggagatcatccgtcaggtaaaactggcttatgaatccgcaaagacgcgccagatgacggacggtgacctcaatgtcattttccagagtgcattgcagctcgcaaaggagatcgcagaccagtccatgatgacaagactgccggtgtcggtcggtacattgacgacattggatgccctgcagttctgcgcaggaaaagaagaaccacatattctgctcgtcggagccagcggtgatattggatcgatcgtacttcgtgatcttgtggatgcggacgaccgcgttcggatcgtggcgacaagccggaaacacaaacaatatgaacttgcttttcaggataccgagcaggtccgctgggtgcattatgacaaccgttatgagtaccttggctgggcagatgtcgtgatcagtgcgacaagcagcccgcattacattttcttggaagaaaatgtaaaaaaagtgtggcgggaaaaaccgctttgttttatcgatctggcgattccacgcgatgtcgatgaggcgattgaacaactagagggatgtatcgtcaaaaatatggacgatatccaggcgttggcaaagaaaaacaatgaaaagaaactgacggaagcgaaaaagatcgcattgatcatcgaggaccgcgtggaagagatggaaaaaacacttgcgtttcggatgtttcgcgatgcatttccggaaaaaatggaacaactggaagagaaaaaggcttcgtggcttttgtatcagctgcgggagcacttggatctcgaggcatttgaacaagtgataaagagtttggagggcgaatcctgatggcgtatttcccatttatgattcaattggaagataagacctgcctcctcatcggaggggggaatgtcgcggcgcgcaaagcagaaatgatgctggaatttggtgcgcaggtacatctcgtggcaaaacaggtgtgtgacaaaatatggaaaattaaaaataagaacctcacggttgaggagcgaagctatcagccggaagacctcgaaggagcggatattgtcattatggcgacaaatgacagcaaattgaactcagaagtcgcagatatctgcaaggagcgccgaatcttggtcaatgtcgtcgatgtgaaaaaggactgcggattttattttccggcgatcgtgcgccaaaaggatgtggtcgtagccgtttcgaccggtggaaacagcccggcgctggcagcgaagattaaaaaagagatcgggaagaatctgcggaaagattatgggcagattgctgatgaattgggaaaggcgcgcgaagaagtgatgcttaccgaaccggtggaggcaaagcgcaaggagattttattggatatgttagaggagaaattggaaaataatataatcaaactggggacaagaggaagcgaacttgcgcggattcagacggatatggtgctgcgggcattacaggaaaaatacccgatgtaccgctatgagacggtgatcctgacgacgaagggggatcggcagacggatcgtccaatcacggcatttggcgggaaagcggtctttgtcgaggaaattgagcaggcgttgaccgacggtacgattgatattgcagtgcacagcgccaaagatatgccaaatccgtgtggagacggtcttacgatcgcaggaacgctgccacgcgcctgtgtgcaggacgtattgatctatccgaaagggaaagagattacaaaagagacagcatttactgtggggacaggaagtctgcgcagacgctgtcagattcaggcgatgtatccgaaggcagagtgcagggatctgcgtggcaatgtcggaacaagaatcgcaaaattaaaagaaggaaattacgatgcgatcgtgcttgcagccgccggaatcgaacgacagggcttagatcacgatccacagttagtatatgaatatctgccggtaaaggaaatgcttccggcagcaggacaggccatcattgcggtagagacgcgaaggaccggtttcgtaagaaaacttgtcaaagggatcagcgatgagacgagtgcctttgaactcgaagcagagcgggcggtgcttaccgcgctgaatgcgggctgtcatgaaccgatcggggttttgagccgggtttccggggaagagatgagccttgatctgatgattgaaaaagacgaattggtgcaccgcgtacaggcgcaggggcaaaaaaaagactgggaaaaattagtagaaacagtgtgccggaaatttcgccgggcataaggaggacaaaatggtttatttggttggagcaggtccgggagatccgggactgatgacatgccgtggcgcagaggtgctgcgggaatgcgaagcggttgtatatgaccggctcggaacgagcggattgttggaacttgtgccggaagactgcgaaaagatctatgtcggaaagaaaccgggaagccattcgaaaaagcaggaagaaatcaatgagattttaattgataccgccaaacggtttgaccgtgtcgtgcgcctgaagggcggagatccttttgtcttcggacgcggcggcgaggaagtgctggcgcttcaaaaagaaaatatcccgtttcagctggtgccgggtgtgacctcggcggttgctgtgccggagctgctcggaatcccggttactcaccgggagacaagccgcagttttcacgtatttaccgggcacacaaaagccggcgatgagacaagccttgcgcacattcatccgcaggaggggacaagcctgtttctcatggggatttcgcatcttgcggagatcacggacaaattaatccgggaaagaaaagatccgcagacaccggtggcggtaattgccaatggctgtatgccgggcgagcagatcgtgcggggaacccttgctacgattgccggagacgttgcggaagccgggatccggccaccggcgatcattgtcgtcggcgagaccgcaggatatgattttatttcttccgaccgcggtgccttggcggataaaaaagtcggaatcatcggaacctttgctttgcaggagcggatgcgcagacggctattggaaaagggcgcgcgtgtgtatacggtatgcgagatgaaagtggaagaaacggcggaaatccgtgagttagacaaagaattagaaaacatttccaaatattcttggatcgcgtttacaagccagaacagcattcgtcttttctttactcacgttttccgtgaaaagattgatctgcggcagtttgccggtattcggtttgcggtcgtgggaagcgggacaagagatgccctccgcgagtatggatttgaagcggatctcatcccggaacgttatacgacagaagcattggcggagagcctcgtgaaaacgatgaaaccgggagaaaaactgcttttgccgcgagccttgcagggtagcgtgcgcatggttcaggtgctggaagaaaatggaattgacaaaacgattcttccaatttacgatgtgcagggaaaaaagaccgagaattggaaatatctattggactttgatgtgctgacatttgccagcgcatcgggggttgaagcatttatcaaagaacttggtgccgaaaatgcagcgaaatgggagcaggagcgcagaaagaagccgacgaagattggggcaatcggcgcggttactgcagaaagattggaaaaatatggaatacatgcggatgtcataccggagcagtgtgatatcgagcatttgatagaagaaatggcaaaggagcgagaagtatgattcgtttaagacgactgagaaataatgaaaccgtgagaaatatgatacgtgagacgagcgtatcggtgaatgacttggtttatccggtttttatcaaagaaggaacggatgagaaaattccggtggattcgatgccgggcatttatcaatatacaattgatcgttttccggaagaattggatcgcatacagaaggcaggtgtgtcggcaatcctgatcttcggaatcccggaacacaaagatgagtgcggaagtcaggcttatgcggaagatggcattacacagcgcgccatccgtcagatcaaagagtgggcaccggatcttctggtgattgctgatgtctgcctttgtgaatatacgtcgcatggacattgcgggctggttcacgagggtaagattttgaacgacgagacacttccgcttcttgcgaaaatggcggtgtcgcttgccaaggcaggagcagacatgatcgcaccttccgatatgatggacggccatatcaaagtgcttcgggaaagccttgatgagaacggctttacggatacgatcgttatgggatacagcgcaaaatttgcttccggatattattcgccgtttcgcgatgcggcgcattcggcaccggcatttggcgaccgccgtacgtatcagatggatccggcaaacggaagagaggcactccgcgagtgtcaggcagatatcgacgagggagccgacattatcatggtaaaaccggcacttgcgtatctnnnnnnnnnntgcggcaggcgagagatcttacgagactgcctcttgcggtctacaatgtaagcggcgaatattcgatggttaaggcggcagcgcagaatgactggattgatgaaaaacggattgtgatggaaaatatgatcgccatgaaacgggcaggggccgacattattattacgtatcacgcccttgatgtggcaaaatggctggaggaagaacgatgacaagatcagaagaattatttgaaaagtccaaacagagaatcccgggcggtgtcaattcgccggtccgcgcttttcagagtgtcggcgggacacctgcatttattaaaaaagcaaagggttcacatatttttgatgtggatggaaatgaatatattgactacgtttgttcgtggggaccgggaatcctgggccatgcgtatccgtcagtgatcgacgcggtaaagaaggcgtgtgacaatggtctgacatttggtgcaccaacggaaaaagaatatgagattgccgagctgatcgcggaaatgatgccttcgatggaattgtcgcggatggtaaattccggaacggaggcagtaatgagcgcgatccgtgtcgcaagaggctttacgcaccgcgactatatcgtgaagttccgcggctgttaccacggccactcggacggccttcttgtgaaagccggttccggggtacttcagcaggcggtgccggacagcgccggagttccggaaggatatacaaagtacacgttgattgccgagtacaatgatcccgattcggtacaggcattatttgagcagtatggcagccggatcgcggccgtgatcgtagagnnnnnnnnnntagagccggtcgctgccaatatgggcgtggttccgccgaaagccggctttctggaatttttgcgggagatcacaaaagacaatggtgcactcctgatttttgacgaagttatcaccggatttcgtctggcgcagggcggcgcgagcgagtattatggcgtgacgccggatcttacgacacttggcaagatcatcggcggtggtatgccggtcggagcctatggtggacgccgcgagattatggaatgtgtctccccggtcggaacggtctatcaggcaggtacgttatccggcaacccgatcgcaatgacagcgggactggagactttgaaattgttacggaaaaatccggatatttaccggaaactggaagaaaagacaaaattactcgccgacaatgccagaaaaatatttggtgataaagtatgggtaaatcaggtgggttctctgatgagcattttctttacttcgaaggaagtggtagattttgacagtgcgaaaacatcggacactgaggcttatgcagcgtatttcaatgcgatgctgcatgcgggaatttaccttgctccatcgcagtttgaggcaatgtttgtctccgccgcacatacggacgaagagattgagaagacttgcaaagaaatgagggaatattatgacagatagaaaagatttggtgattattggaagtgggccggctggcttgtcggcggcggtttatgcacagcgcgcaatgcttgaccaggttgtgatcgagaaggagccgtttagcggcggtcagattattacgacggagcgcattgacaattatctcggcctctatggaatgggcggttatgagctggcaatgaaattccgtgagcacgctgacgcgctttcggttccgtttttggaaggagaagtgaccgcgattaacgacgatggcgaagtgaaacagattacacttgcgagcggagaaacgatagaaacaaaagcggttctttttgcgacaggggcacgtcataagacactttccgttaagggcgaaaaggaacttgccggtgccggcgtttcgtactgtgcaacttgcgacggtgcctttttccgcggaaagacgacggctgtcgtgggcggcggcgatgtggcgctggaggatgccttgtatctttccaacatttgtgaaaaagtttatctcatccatcgacgtgatggacttcgcggggcgaagatgcttcagcagaagatcaaggaaacggaaaatatcgaatttctcccattttatgaggtacaggagatctgtggcgacggcaaagtggagaaagtgattttaaagcagaatcagacgggcgaaacgagaaatctcgaattgtccggtatctttatcgcaatcggaatggatccgcaaaatgaggctgcccaagggcttgtcgatctcgacgcgacaggctatatcgtggctggcgaggactgccgcacaagccactctggcatctacgcggccggggatatccgtacaaagcagcttcgtcaggtggtgacagcggtagcggatggagcgacggcaatctcgtccatcgagcaggattctaattgttaaaatatggcaaaggaggaagcaaataatgtatattacgagaaaaggacaatacgccttgttttttatgataaatctggcaatacatgcaggcgaaacggttccggtcaaacaggcagcaaaggaatatgatctgtcagaaaaatatcttgagcaggttgcttccaaacttcgtcatgcaggtcttgtcaaggtgatccgcggcaaccgcggcggctattatcttgcgaagccggttgcccaatacacggcagcggagatcattgatgtgatcgaagggcagcagaacgcggtagatattgacatttacaaaatcagcgaaaataataagacgatgaacagcatcgtgcatgacctcgggcagtcggtggacaaagccatcgacggggtccttgaccatatcacgctggcggacatggtgaagcggtaccgcgaggaatcgtcatttgcgtatacaatttag

SEQ ID NO: 433 - DNA, 7966 bp, unidentified
  source 1..7966: mol_type = unassigned DNA
tcagtcctcaaacaggggcttgaggaagggcagaaagtccagcgttgcaaagtaatcgcggggggtctgggcgcggcggatcagccggtgagagccgtcctcgcacagcagcacctcggcgcagtgcagcttgccgttgtagttgtagcccatagcagagccgtgggcaccggtatcgtggatgtaaaggatatccccgatgtcgatcttgggcagcatccggtcaacggcaaacttgtcgttattctcgcacagaccgcccaccacgtcgtacttgtggtcgcagggggcgttctccttgcccagcacggtgatgtggtggtaagcgccgtacatggcggggcgcatcaggtttgcggcgcaggcatccagaccgatgtactccttatagatgtgcttttcgtggatgacggtggacaccagcgcgccgtaggggccggtagtaaagcggcccatctcgctgaagatggctacatcccccatgccggcaggcacaaggatctcttcaaacttctggcgcacaccctcgccgatggccatgatgtcgttctcggtctgctccgggcggtaagggatgcccacgccgccggacaggttgatgtagctgatatgcgcaccggtagcctgctgcacccggacagccagccggaacaggattgctgccagctccgggtagtaggcatccgagatggtgttggaggcaaggaacgcgtggatgccgaactgctttgcgcccttctgcatcagctttttgtagctgtcgatcatctgctgctcggtcatgccgtacttggcatcgccgggcttgtccatgacctgaaagccctcttcgctctcgcccagctggaaggtcccgccggggttatagcggcagaagatctcctgtggcacaccagccacccgctccagaaactccaccatggtggcatcgtccagattgatgtaggcgcccagctcgtaagccttcttcatatcctccacgggggtctggttggaggagaacatgatgtcgtggccggtaaagccgcagacctcgctgagcatcagctcggtcagggaagagcagtccacgccgcagccctcctccttgaggatctgcaggatgacggggttgggcagtgccttgaccgcaaaatattccttgaagcccttgttccagctgaaggctttgttgatgcggcggacattctcccggatgcccttttcgtcgtagatgtggaacggcgtgggcacatcctcgatgatctgctgtgccatcgcctcggtcagaaacggtttcttttccataataacatccctctcgttttgcgcagcccggcattttccggcctgcggtctatcccatgcggcccagtgccgcagttcaagctgttacagtttcaggttctcccgggtgggggtaaaggtggggatcatggctgccagctggcgcaccacgccctcatcgttgtgggcggcagcggcttccagcgcctgcagctgcccgtagaactcggcaagatcaatggtgcgggggcttgccacaaagatcttgttgtgctgggtgcggcgcatcttgtcctgctcctcgtccatcatcagctcttcgtaaagcttctcgccggggcgcagacccacgatcctgatctccatattcacgcccggctcgtagccgtaaaagcggatgagctgcttggcaaggtccataatgcgcaccggctcgcccatatccagcacatagatgttgccgctttccgccagcgcacccgcctgcagcaccagctgggctgcctccgggatggtcataaagtagcgcacgatgttggggtcggtcagggtgaccggcccgccctttttgatctgggcttcaaacagcgggataacgctgccgtggctgcccagcacgttgccgaaccgcactgccacacacttcatatccgtgttgcccgcaaaggtctggataagcatctcgcagatgcgcttggtgcagcccatgacgctggtgggattcacggccttatcggtggaaagctgcacaaagcgctccaccccgtgctcgctggcgctgaccaacaggtttttggtgcccagcacgttgttctttacggcttcggcagggctcacctccatcagcggcacgtgcttgtgcgccgcagcatggaacaccaccgtggggtggtaggtatcaaatacctcgtccagacgctttttatcccggatagagccgataagcaccgtgaccgggatatcgcggccgtacttctgctgcaattccatcagcagctcgtaggcgcagttttcgtagatatcaaagatgagcagcttgccgggcttaaagcgcatgacctgacggcacagctcgctgccgatagagccgccgccgcccgttaccagcaccgttttgccggtaaggtagccggaaattttgtcggtatccagcgtgacctcctcgcgggagaggaagtcggcagggttcagctcgcggaacacctcctgctggggtgcaccgctgcccaccagctgcggatcgctgagcacctgcaccgcgcaatgggtgctgacgcacaggtcgataacgtggctcaggcggctgccctttaaggtggggatggcaatgatgatgctgtggatgccgtagcgtgtgcacagctccgggatgtcctccagcgtgcccttcaccggcacaccgtggatggtctggttcagctttgcagggtcatcgtccaccgccaccacggcgtggccgtattccttgttggatttgcacacgttgatggcccatgcaccggcttcgcccgcgcctacgatcatcaccggacggttggggtctttcgcaggcactctgcgcagctgctcgcccagcgggtggttcaaaaacagtcgccatgccagacggctgccgccgatgaacaaaaagatgagcacggatgccatgcagttggcggaattaaacagcacaccgtggataaagtggcggttcaccacatacaccacagcggtgggcacggcgatcatcccggcaagacggatcagatcccgctcaccggcgtacttccacagcaccgagtacagcccgcccgccagaaagcagacgatatacaccgccacgatccacggcagattttcgtacagcaaagcgcggttgtgcggccaccacacggcatctaccgcaccgtctgcccgcagcagcagggcaaaataaaagctgaatgccacaatggcagcatccatcagcaccagcagcgcacggcgcagcagcacctgcggggtattcttggttttatctttcacttacgatcctcttttttcctctcagcgccaaaggcttttgcccagcgctgctttttcggcagtgttccccggcaggccggaaggatacaactacacgtttgtattatactcacaatccccgcctgtgtccagaaaatttacgtttttatcactttcccctgtttttcccggtctttgcctgccgcagcaccgcccgcacttcctcccaaagccccagcggcagcgccgccagtaaaaacacgatggccgtcaccgtgccgcccgccgtcagcactgccagctgccccgccaattcctgtgccggaaagctcgccagcgcacggcgcacgccccgccctgccgccccggcggcggcagcagccagcagcggtgcacccagccagcgccggaaggcgtgccctgtgccgctggaaagcagcagccgcccggtgttggccgcgcaggtgtagaagctggaaagcaggatcaccgccagaaagccccgcattccgtaccggggcagcagcagcgccaccccgccaatgcgcagcacggcgtcccacacgctgtaccggaaagcggctttctgctccccgatgcccttcatggcaccgtccaccatgctttccaagtacatcagcggcatagccggggcaaggatctccagatagaacccggcctccgggctatggtagagcagctgcgccagcggcctgccccacacccagaacagcgtgcccgccagcgcggagaaataccccgtgagccgcagcatccggtccagcagtgcgttcagccgggcggtctgtccctcgatatgcgcctgtgtgatctccggcatcagcaaaaccgccagactgcccagcagcccaaaggggaaattgagcagcggcagcgccatgccttttaaggtgccgtactgctccagtgcggcggtgcgcccgccggaagccgccagatataccgcaagacaggcgggcaccagcatattctcggccgtgtgcagcgcgctggaaagcgccctgccgccctccaccggccaaaggatgtcccacagccgccgggacacctcccttggcgggcgcggtgctgtgctgccgaagcagcgtgccgcctcccgccggtaaaacaatgccatcagggcggtggatacggcctcgctcagggcggtagccgccagcaccagcgcgcagcgactgccgtccggccagccctgcgtgcgggaaagcgcccacaccaccgcggcaatgcgcaccgtctgctctgccagctggctgagcacgttcggctccacccgccgccgcgccagaaaaaagccgcgcagcaccgccgagatcgccatccacggcagccccagcgccgaggtgcgcagcgcggcagcagcgcggacatcccccagccaccattttgccgcaaggcctgcggtggcaagctgggcgaccatggcaagcccgcccagcgtaagccctgccaacaccagccgcaccagcatcccgcgcgcagcggccttgtcccggctgagctcctcggtcagcagccgggtagccgccaccgagatgcccgccgtggccagcgtaacgaacagtccgtacaccgccagcaccagctggtacagccccatacccgccccgcccaaagcgtttgccagccagatgcgcagccccatgcctgccagccgcagcaccacgtccgagccggtaagcagcgccgcatttttaaagtagttctgccgcaccctgcacctccccctgccccggaacgggcgttcacggttcagcctatgcggcagctttgcaaaacatgagcggcgctatgggttgtttctgcgcactttttatggtatagttaacagtggtcaggcagggcgcaagcccgcgcctgtattttgagcaaggaggaagcgcaccgcccgggtcctgcccctgccgtgcgcgacaaagagaatgagcgaagaatgtacccatgactgctctaattgcagtgcagcctgttcttcccgcgatgccgctccgcagcacgatgcccccaaccctaatagcagtgtgaaaaaggtcatcggcgttgtttccggcaagggcggcgtgggcaagagcatgaccagcgccctgctggcctgtgccatggcccgccgcggctaccactgcggcattctggatgccgatatcaccggcccgtccatccccaagctgttcggcattcacggccgtgccatggcggacgacaagggctgctggcctatccagagccgcatgggcattgatgtgatgagcatcaacctgctggtggagaacgaggaggatcccgttgtgtggcgcggcccggtcatcgccggtgccgtcaagcagttctggaccgatgtggtctggaaggacgtggatttcctgttcgtggatatgcccccgggcaccggtgatgtgcccctgaccgtgttccagagcctgccggtggacggcatcgttgtggtggcaagcccgcaggagctggtaagcatgatcgtggcaaaggccgtgaacatggctgagatgatgaaggtgcccatgctgggcatcgtggagaacatgagctacatcgtctgcccggactgcggcaagcacatcaatgtgtttggcaacagtcatgtggacgaggttgccgcaaagcacaacctgcccgtgctggccaagtgccccatcgaccccaaactggccgagctttccgacgccggcatgatcgagacctacggcggcgaattcttggaaggcgcagcagacgcctgcgaaaagctgctgaaatgatccgaccctctggctgctgcacaaactgctgtgcagcagccttttctatatgttcttgttttagcaagctcgccctctcagtcacctacggtgacagctctcccaaagggagagcccttggcagtccacgctaacttcatctttttgccaaggcctctccccttgggagaggtggatgcgaccagcgggagcagacggagagggcgaggatgctaaccttgtgacacagggctttttgcttagatatgcctgccgcggtgcaaaagacattcttttccgtacggctttggggcggcagcgcactttaaaaaacaaggttcgcggcgcattcctgcttttaattttcgttttgtgaagcagctgttactttttatctgtttttttaaacaaattctgctttttgctattgtaaaacccaccgcaaagctttataatagtaaagtaagcattgcccgcttatgcgggcgtgccatgcaagcatggagaaccggaagcgcccggcatctgcaaggataccccgctgtgcggcgggcaaaggcatttccgctttttcaaatttatagagtaattgggaaaaggagtattctattatgctgacgaatgaatacctgaagcgcgtttacgaaggtctggagaagcgcaatgccaacgagcccgagttcctgcaggccgtgcgcgaggtgctggagagcatccagcccgttgtggaaaagcaccccgagtacgagaaggccggtctgatcgagcgcctggtggagccggagcgcatcatcaccttccgtgtgccctgggtggacgatgccggtaaggtgcaggtgaaccgcggctaccgcgtgcagttcaacagcgccatcggcccctacaagggcggtctgcgcttccatccctctgtcaatcagggcatcctgaagttcctgggcttcgagcagaccttcaagaacagcctgaccaccctgcccatgggcggcggcaagggcggctctgactttgacccccacggcaagagcgacatggaagtgatgcgcttctgccagagctttatgaccgagctgtaccgccacatcggccagttcgtggactgccctgccggtgatatcggtgtcggcggccgcgaggtcggctatatgttcggccagtacaagcgcctgaccaacagcttccagggcggtatgctcaccggcaagggcctgaccttcggcggttctctggctcgtaccgaggctaccggctacggcctgtgctactttaccgctgaggcgctgaagtgtatgcgcaacgacagcttcgagggcaagaccgtggtcatctccggttccggcaacgtggctatctacgcctgcgagaaggctacccagctgggtgccaaggtggttaccatgtccgactccaacggctacgtctacgaccccaacggtatcgatctggcttatgtcaaggatctgaaggaagtgcgccgcggccgtatcaaggagtacgccgagacccacgagggtgtaacctatgtggctgattgcagcaaggtttggactgtcccctgcgacatcgccctgccctgcgctacccagaacgagatcaacaaggagtccgcagaggctctggtgaagggcggctgcaccgtggtctgcgagggcgctaatatgcccagcactcccgaggccatcgaggtctacctgtccaacggcatcctgtacggacccgcaaaggcttccaacgccggcggcgtggccacctccggtctggagatgagccagaactccgagcgcctgagctggagctttgaggaagtggatgccaagctgaagggcatcatggagggcatcttccacgcttcctacgacgcttctgtggctgccggttctgagggcaacctgatggtcggtgcaaactgcgccggcttcctgaaggttgctaccgccatgatggcacagggcatcacctactaa

SEQ ID NO: 434 - DNA, 11344 bp, unidentified
  source 1..11344: mol_type = unassigned DNA
ttacttattgcctccttttttgatttcgccaagatagaaggccttggccagactcatcatctgggtgaccgggcgctttgccgggcagacgaaggagcagctgccgcagttgaagcagtagtcagcgtgcagcttgcccagctcctgcacatcgcgggcggcgtaggcctgattgacctccacgggttccagacccatggggcagtactccacgcagcggccgcagcggatgcaggggttgacctgtgcgggctgtgcagctgccttgctcagcaggatcagaccggaagtggtcttggtggtggggtaggaaaggttctccacagcggggcccatcatggcaccgccggcaaccaccttgcccagttcgcccttcacgcccacatagtccagaatgtcctgataagcggtgcccacgggcacaacaacgttctggggctttgcgcaggcatcgccgtccacggtgatggtacgctggaccaccggcataccggtagccagatacttgcccagcgtggaaacgctggtcacgttcatcacgatggcgcctgcatcggcgggcagaccgccgtggggcacctcgcggccgaggcacttctcaatgaggatcagctctgcgccggtgccgtagacactgggcaggggcttgacctcgatggtgctgtcgtccttggtctttttgcacagcaggtcgatgcactcgggcttgttgttctcaataccaatgatgcacttcgggatgccggtatactgcagcacagccttgatgccgcggatgatatcatcgctgcactccagcatctcctgcgtgtcgctggtcagccacacctcgcactcggaggcgttgatcagtagggtatccaccttctgcttgggctgcagtttcacatcggtggggaagcctgcgccgcccagaccgaccagaccgcactcgcgcacggcggcaaggaagctggccttatcggtgacttccggtgccttgacagccgggtctacggtctgcttgccatcggtcttgatgacaacagaatcgcacatacggccattggacagacggaaagcttccactgcagctaccgtaccggaaacgctggagtggatgtttgcggagacaaagccgcccgcctcaccgatcttggtgccgacgaacacttcatcgccttttttcaccagtgccttggcgggtgcgccaatgtgctggctcataaggatgcgtacctgcgcgggcagagacatcgggacaggtttgcttgcagcagttgccttgtcatgcggcgtatgcgcgccaagcgccgcacgtttcagcttgttcaacatggatttcaaatcccccattctgcttgaattgccatcccctcgcccatgcaggcgcactggtacagggacagcagctgcttaacacacctattgtatcattttggcgcgggaagtcaacgacatcacggctcaaatgatgaattttcctgaactttcttattcgttttcgccaattagttttaactaaccaccgtatttttctttttgttctcccctctctgccgtttgcctttactgcgggaatatgctatactatacctaacatgacaggcggaacgtcccccgctccgctcccgaacttcacaaggaggcaccaaaccatgaaagttctcaaagctctgctcgccgtcctcaccactctggctgtcgccctgaccgctattctgctgttctggcaggataaaagcgctccgcgctatatcaagatctacgaaaacgagcagtaatatttttcttgcaaaaataacaccccggtcaggcggtaaaaccgcccggccggggtgtttttgcgttgtcttgcagaccacacaaaaacgccgccgacttttcgtcagcggcgtttgccaaatatgcttagtaatcggtttcgcagccaagcaggaatttgatgtaggcaaaggtgcgctcccgcccgaggtcccgcaccatgcgcagcagcttttccagcagtgcccgggtctccgggtgcatcaggtagtgatccttgctgcgctggtagtactcccacgcggaagcatcggtgtatttgtcgcccagatagatctggcttgccgctacccggtcgcacaccatctcgcagacgtaccgcagggggatcttcatgccggtcaggccggtcttggtggtgctgtaatcgatccagtattccagatgatgcttgttgcgccccttgtggtgcagccacgccgaggtgtagcccttggctgcgcgctcggcctcgttggggctgtggtcaccctgataatagatgcacccggggatgaactcggtggggctgtacttgctcaggtcgtgggcaaggccctgctcatacagtccgcattcaaagcagtatttcatcaccagcagcttgtgccgggtgatggtctcgaaatgacccttgatgttcatgctgttattccctccactgcaccgtgatgcgtccctctttcagcccgcgcagatcatcgctttcggaaaaatcctcccggtccatagtcagattggggttgtagtaggggtcatgcaggatgttcgccttgccgtgcacctcgtacaggcgctgctgctcggcggcaaagcgccgtgcctttaccgggtctttttcgtccccgccgcggctcttgctctcgtagtgggtcagctgggcgtagggcgtccacgcaatgcgatagcccgcatcccgcacccgcagacagaagtccacatcgttgaaggccaccgcaaaggcttcgtccagcccctttacctcgtcccacacgctggtctttaccagcaggcaggcaccggtaacggcagaaaagtcctgcaccgtggcggtgcggaacagatagccgctgccgccggcctttttgtacttgtggctgtgccccgcgtagccccccagcccggtaataacgcccgcgtgctggatggtctcgtccgggtaccagagcatggcaccgcacactgccgccccgccggggtgggcgcattggcgcagaagttcagtgagccattcgccgttacgcacctccacatcgttgttcagcagcagcagatactcgccggtggcgtatttgcggccaaagttgttgatgccggaaaagttgaagccctttttcgggtaggtgaccacccgcaagccgtcgtagcgctgctgcgcctttttatagtaggcaaaggtggcggggtcggtggagttgttctccactacgatgacctcaaagtgctcccattcggtctttgtccagatgctgtgcaggcacttttccaagtcctcggtgtggtccttattggggatgaggatgctcaccttcggttcgcccacgatgtcccacttcacccggtaggtgctggggaacagaccgtcctccaccgtgccggtgcgcccggtgcgggtcaggtggtctgccagcgcctttttagccgctgccgccacatagggcttggcatcggcaccaccggaggtagaccccgcgtgcacccgccagtagtagagcacctgcggcacatgggcggcaccgccggtcttttccagcagccgcaggaacaggtcatgatcctgactgccgtcgcattccgggcgctcaccgcccagctgctcccacagcgcttttttaaacaccgccagatggcagatgtagttgcagcacagcaggtagtccggggcgtagtccggcttgaagtgcgccaccatggggcggcggatgctcttggcgaacagcgcttcgtcgctgtacagaaaaccgtccggttctccgcactgccgcagctgcaggatggccttgcccatggtatacagagcatggggtgccagaatgtcgtcgtggtctgccagcgccagatattcccctgttgccagctgtgcggcagcgttggtgttggcggcaatgcccttattttcgatctttttgtatacgatccgttgatttttttgctgatattcctttacgatccgctccacgtccccgtgggcggcgtccgaagcatcggcaaggcagagctgcccgttgggcgcggtctgccccacaaaggattccagaaactcccgcaggtatttttcaggggtattatacagcggggtcagcaccgagatggtgggcagaccgcagtctgccgccgttttgcctgccatctctgcacgctgcgcttccagcacctttttggcgggcaggtagcgcgcacgcttgccgaagcagcggcgcttgacaaagcccgcaccgcgcatgaccatggtggacagaccctcgtcctttgtcagctgcacggcatagccgacaagctccttggcgcgtttcaaccgtacgttcatatcagacctcgccgcgctgagtcgccttgtaggcggcgcagactgttgcggtgtccccgttcattttcaggtggccgtggctcagccatgccaccttggtgcacatccgctcgatctgctcgatggagtgggacaccagaatgaccgtggtgccgcccgccatcagctcctgcatccgcttttcgcacttctgctggaacaggaaatcgcccaccgacagcacctcgtccgcaataaggatatcgggcttggtgatggtggcaatggcaaagccgatgcgcgccaccatgccggaggagtagtttttcagcggcacgtccagaaagttttccagctcgctgaattccacgatctcgtcaaatttttcgtccagatacttgggcgaaaagcccagcaccgtgccgttgagatagatgttctcgcgggcggtcaggtccatatcaaagcccgcgcccagctcgatgagcggggcgatggtgccgtttacggtcaccttgcccttgctgggcttgtacacccctgcaatggtcttgagcagggtggatttgcccgagccgttcaagcccacaaggccgtaaaaatcgccgggcataatgtccagactgacgtcctttaaagcgtagaactcgtcgtactgcagccgtccctgcaccatggccagaaagtattccttcaggctctcatgcttttccttggaaaggttgaagcacatggaaacattgtccactttgatgatcggttccattgttcacccctccttaaatgtgcagcacaaagcggtcctgcgttttgcggaacatccacagccccgccaccatggacactacggcgcagatgccgcagacaaggaacatattcccgtccagcgggataccccacatcaccgtgcggcggaagcccgtgatataccagtacatggggttcagcttgatgatctgctgcatattgaacccgccgatggaaaaggtcatctgggtggggtcgtagaagatggcggaaaaatacagcagcgcggtgacgaacacgctccagatgtgcatgatatcccggaagaacacggtagccgccgctaagaacatactgaccccgagactgaagaagaacaaggtcaccagcgggtacagcgcttcaaaaatagtcagatggaagggcgcgccggtaaagatcatgaccagcagcagcgccacaaagctgaacacgcagttcaccatggcaaaacagcatttttccagcgggaagatatacttggggatatacacctttttcagcagcggggcggcgctgagcacgctgctcatgctggtggaggtagcttcgttgaagaagttgaacagcagctgaccgcacatcagaaagacggcaaagttgtcgatgccgctgccccgcatatccatcaggctgctgaacaccgcccagtacacaaggcacatcagcagcgggttcaaaacgctccacaccacgcccagcacgctgcggcgatatttcagcttgaaatcacggcttacaaggttccacagcagatagcggtagcgccagaagccgttccacatccctttgagttttgccacgggcgatcaccacttttcaaaatactcgaacttctgggcggcaaagggctcgtgcagcttgtcctttgcgctggtcttgtgctcgcagccgcagtccggccactgcacgttgacggtggggtcgtcgtaggggatgccgccctcgctggtggggtcgtagacatcggtgcacttgtagcagaactctgccacatcgctcagcaccagaaaaccatgggcaaagccctccgggatatagaacatcttcttgttgtcctcggagagggtcacgcccacccacttgccaaaggtggcgctgtggggacggcagtccacggctacgtcatacacctcacccttggtcacgcgcaccagcttgccctgggtatggttcttctggaagtgcagcccgcgcagcacgccccgggtggagcggctctggttgtcctgcacgaattccttgtcgatgccggcctctgcgaactggtccttctggtaggtctccataaaatagccgcggtcgtcgccgaacacctgcggctcaatgaccaccacgccggggatctcggtctgcgtaaaaataaacttacccatgatattgtacctctcttttttctggaagttttttctttatctggaaaagtctggttttaaacaggcttttacgctttgttatggtgctttgccgttttgcggcgctttttcaggcgggcgtgcagccgcagcaccagcaccgtgaccacggctgcgcctatggtacaccccaccgagatgcccgccagcagccatgcgctgctgcccggctccacgtccttggcagtatccagctttttgccggcactctgttccagcagctcggcaagaccggtgatctcggccttcacccgcacgctggtactctcctgctttgcgccgccgttcagggtatacaccgcatacacggcgggttctgcgcccagcagatactgctccggcagttccaaatccacggtcacatcctgcgcggataagccctcggccagcagcagcttcaccccggggtcgaccaccgtgaccgtaccaaggctctgcccgccgcccgccactgccagctgtgcggtgaccgtgccgccgggcagctgggtgtagtttttgtaggtggcaaaggcgtagtccagcagggtgcgcacatcattatatttgtcggtgctcagctggctttgcatcgtcacacagatcaggcgcaccccgtcctgctccgccagacagacatagctgtaccgggcggtgttggtgtagcccagcttagagcccagcacgctgccgatgtggtagcggctggagccgatgcggatcttatcctgctgggagaagtaacggatcaccggctggatgttggtggactgcatggtgtacatcttgttgcgggtgaacacatcctcaaaccccggctgctgcagcgcccagcgcaaaatctgcgccatatcgtagcagctggtgtagtgatcctcatcgctgatgccgtgggggtttgaaaagtgggtgtgggcaagccccagctcctccacctgtgcattcatggccgccacgccgtccgcgatggtgccgccgccaaaatactctgccagcaggttggcaccatcgttggcgcttgccatctgggtagcgtacagcgcatccaccaaggggacttcctccccttcccgcagggcgatatggctggaatccgtgcccgccagtgagtagacatcctcgtgggtcacggtcagctttacgtcatcccagtccccctgtgccttttcgcaggcaagcccaagggtcatcaccttggtaatggaggccgggtgcagctcttcgtccatattctgctgcgccagcacaaggccggtgtctgcgtccataatgcagtatgcccgggtattggccagcgccgggccggctgctgccgcgccgggcaccagcacagtgcctatcaaaagcagcacagtgcacagtgctgcggtaaattttttcatctggtatactccgcttatcagttttatgccggtaaggcatcatttggagtataccacattttttccccgctgaaaagggatttacgcattcctttgccccagcagcaccggctgcagctgctcaccccgcaaagcagcgtccacggcggcgggcagcagggcaagatctgccttcaggctctggggcttggcaaaggggtcatcctgcccgtagggcacaaaataatagtgcttgcgctggcacagccgcgccatgttttcgccggaagcgccaaggccgtcgttggtggagactgccagcaccaccgggctgcccacccgcagcaggcttttggcagcaagggtcaccggcgtatccgaaagccctgccgccagccgcgccagcgttgcgccggtgcagggggcgaccaccagtgcctgtgccagccgccggggacccagcggctccaccgcctgcaaggtgtccagcaccggctgcccggtaacagcctgcaggcgctgccgccagctttccccggtgccgaaccgggtatcctgctgcgcggcaaagctcataatgggcagcagcgtccagccctgtgccgtcagtgcctgcgccgcacccaaggcgtcctccagcgtacaaaagctgccgcacaccgcaaacgcaagacagccctttttctctgtggtcataccgttccctcccgctcctgcaaaatggcttgcaccgtgcgtgccagcgcctcccctgccgtttccggtgcccagaccgtcggcaggctcagcgcgtgcagcgccgtgtgtcccagccgccgggcggcggcaaagtctgtgccgccgggcttggaagccagatctacgatcagacttttctttggcagcgctgccagcacctgtgccgtcagcaccggcgcggggatggtgttcaccaccgtatcaaaggcggcagcttctgcggcaagctctgtcagcggcaccgcccgcagacccagctcctctgccattgcccgctgcaccgggcggcgtgccgccacggtcacccgcgcacccagtgccgccagacgcaccgccagcgcccgccccaccgggccaaagcccagcaccagcaccgccgcgccccacagggtgcggctgcgccgctccagcaaaatgccgatgcagccctcggcggtggggatggcgttatacacggtcagctccgggcgggcaaaataatccaccagctccacccccgccgcccgggcgatggacaacgcactctccgtcaccttaccgcccagcgccagcgcaccgggctttgccgtgcccagcagctgcgccagcggcagatcagcctgttccagcgggagcggcagcaggatgcagtctgcctgcggcagctgctgcacgccgcccaccgtataccctgcccgcgccagtgcacgccctgccgccgcctgccgggcatcgctgcccaccaccgcaaaccgctttgtctgtctcatgccgtcatctccccttttccgctgtgcgccatcctatgcaggaagatgaaaatgcgtgagggggacaattttgaatgcgctccgcgttgcggggcaccccttccgtcatcgcctgcggcgatgccacactcccccttttgtcacctacggtgacaaaaaggggaatctggcgaacgcagtgagcctgagggggttctttctaagtctaccaacaaaaaactcccccggcgggttgccggaggagcattcatttttctattctaaacacggatacgccgccctgacatggtgcgcagccggtcttacttcaggaactttgccacggcgcgggcgacgatgccgcccagaatgccggacaccagaaattcggctacgccctgcacgccaaccagcagcacaacgaacatgaaggggttggcagcgcccttgacggacaccagattctgcacatagtcgcagccgtagaaggccagcacgatgtagcccatgaagaacagggtgttcagggcgggtgcggtcatggcgctgaggatgtagctccaggtgcgggacttgtccagcttctgcagacccttgaagatcaggccgcagcacagacccatgagcacacgcatacccacgcacaggataaaggtgttcagcgggctgacctgaaacagtgcaccggtcatggcagatgcgccggtgatggcatcatagaagctcacagcgccgaacacgccgcccagcagggcacccacggcggggcccatggtgatggcgcccacggcaatgggaagggtgaggaagctcatgtacagcggacccatgggcacactgcccagaccgacaagcttcatcaccagttcaatggccaccagcagggccacacgagtcagcgtcttagtattggtattgttcataattcagttttcctcctgctgccgttccgccctttttgtcggatacggcgcaaacctgcccgctctgtgcgggttttaggtgaatattcaaatctcttggaagcgcgttattgtgtcagggcgtgttccagagaaaaatgcgttagaatctgtcaccggggaagcgcaccccggcgctgcggcgcgccaccgtgagcacccggctcaccgcgatgctggtgtccagcatccgggcgcacagctcttggtctccggcggtcatggcgcggtaaaaggcctcgaactctgccgcctgccggggacggtccccgttcaggttatagtgctcctccttgccctcgttgggatggaaggtcacgccgccgcagtagttcggggtggatttttgcaggatatagccctttgtgccctgaatgatgcagcgggcaggggctgcgcagtccttggcggcaaggcttaccgccttgaagccgctgtaatccatcatcagcacaccgctggtgtcgatgttgcgctccatgttggcggcatataccgccttattcggctcaccaaacagacccacgatgtagctgacgttgtacacgcccaagtccatcagtgcgccgcccgcgcacagcgggtcgaacaccggcggggtctgcccggcacaaaaggcgtcgtaccggctggaatactggctgaagctgcactgcaccatacgcaccgtgcccacccggggcagcagttcccggagctttgcgtagttgggctggtactgggtggtcatcgcctcaaagaggaacagccgcttgcgctgtgccaacgctgccagttcctcggtctcggcggcggtcaccgccatgggcttttccacaatgacgtgcttgcccgcctccagcgccacccgggcgtagcgggcgtgctgcaaattgggcacggcaatgtagaccacgtctacccattgcagcagctcaaaataattggtggtgtgctgtgggatctgatattgcgcacacagctctgcggcttttgccgccgagcgtggggtgctgcacaccgcctgcacagtaaacggcgtgtgctccacaagccatggcaaaaattcctgcacgatcttacccgtgccaagaatgcccagtttcat

SEQ ID NO: 435 - DNA, 7979 bp, unidentified
  source 1..7979: mol_type = unassigned DNA
tcagccattgtatgcctcctttatcttctcttcaaatttatcaagtcccactctctcgagtgtcatgcggaaacgctctcccggattggcattgtcatcaaagaactggattgccgcatcggtaatgcggaataactgttcctcggatgtcacaagcggaagatacttctcgcccttgtatacgcggtttccaaacagtccaccgaaagatacctcaaatgcaggtgtcgctttccatgcatcggtcggacaggcctttacacagcgtccgcagttgttacatttttcctcattgagaacgatttttccgtccacggtactgattgcatccacgcggcaggtcttctcacagatcccacagttgatgcaggctgcttcctcccattccacaatggatgcacccttgattccgacatcattttcttctgcctttaagcagttgttctggcatccggttacaccaaatttaaacttatgcggaagttctcttgcaaaataacgctcatccagtttttttgcaatatcataactgtcaatatttccactagggcataccgccgatccctgacaggctgtaatcgtacggacacgcggtccacacacgcccggcttacatcccccggttgccagcacttccttaacctcttctacatcgtcaagtttgataaatgggatttccacactctgacgggaagtcagatgtacgtgtccgtctccgtatttttctgcaacctttgcgataatctgtaaattctctgctgtaagatttccacctaccacagccagccgcagggaaaaattatttttttgtttctggcgcataaatccgccttttttcaatgtagcataatcaacagccattactctctcctttaaaccttgtgtatttttctttgtttatccggcggtattttggattgctgctgtaaaatcctgcttcagatcttcgatatcctcaataccgacacttattcttatcatatcatcaaatacggcagcgtcaatcttttcctgctcggttgagtgtgccgccagtgtggattccggatgcacgatcagtgtcttggtatctccgatattggatacgatctgtggaatcgtcagcgcattcatgattgcaaaagcgcgttccttgcttcccacgcgaatggttaaaattgctccaaatcttccatccagcaactgctttgccacgccgttccacggactcgatgcaagtcccggatagtttacgctgattcccggaatggtttccagataagccgcaagctgcattgcgttgtcacacgcccgctccatacgaagccccagtgtctccataccaagcagattatagtatgcagtctgcggcgccatacaggctcccatgttgcggaacaatccgtttctcagttttgcagtaaaggcaaattttgcaaactttttatagtccttcatacccggataccgctccagatcccatttgaatcttcccgcatcggtgatcacaccactgatggcactgctgttgccgttgatgtatttggatgtggaattgattacgatgtctgcgccaagttcgagcggacgaacgagaaacgcggtagctaccgtattgtcgatcatgagcggaagattgtgccgctttgcgatctctgcaagtgccgggatgtcggtcacatccagctttggatttccaatcgtctccgcgaagatgactctcgtcttatccgtgatcttggattcgagatcttccagatcattcgtatctgcaaaaattgttgtaatcccaaacgcttccagatcgtggtaaagatcaatcgttcctccatacaggctggtgcttgtgatgatctcatcaccacttcctacgatattcagaagggcattggtaattgccgccatgccggatgcacaggcaacggatgccacgcctttttccagaaccgtcatgcgttcttcaaatgctgcgatggtcgggttattgattcttgtgtaagaatatccagcagctttgttgtgaaacagcttctcatgctgctctgccgatggctgaaagaaagcactggactggtacaccggggtaagtgtggctccggtcaccggatctccggtttttgtaccatgtagtagttctgtgttgaatcccatttcatttcccctaattcatacttatctaataggtttaatatgttatagttaatataccgcaatcataccctattgtcaaccttttatttccacttatttttccagcaaaaaaatccccactggttaaaaccagcagggattccattctcaataataaaattattattctgtccagtgctcatccttaaatacgatgcggcggtaagtctcaaaatcaacccacttattaaagaagttctcagagatctccctgccctctgcggaaagctccttcttgaacgcatccacatctgcggcacttgttacatgaaccgcaaatccacggccgttgatgacaggcacatcgttgtatgcaaagtcagcaagcggaataatggcagtaaccttctggtcacggatggataccgctacctgctcacgcagaacaaccacatcaaagctgtccggatactgatacgtctcacccttgaccggaatcacatcaccgatcgtgtaagttttatcggaaggctgtaccttaaagacgttcatcgcctcaaggtcatagtaatattcctcgaagatatctccgtttgccttgagatttccgtgggcaaatgcgcattttaagtctttcgtctcatcgagcgttggattttccacaacaccacatgcggaggtcatgttggaaatacggtcgatcaggatcagttctcccaatgtcttatgctttgcaaaagcatcaatgacgatctcttcctgcaataccagatcgcagaccgcaatctcgttcttgcgcaggcggccaaccggaataaattcaccggtgttgacatcaatcttgtactggatattctttaagatacccggaatcgtacgtgtaccgagttttacgagataatctttgccgacggtcagttcctcatcgtccatccagaggattgttgcggtaaatttcttgctgaccggaagcttcgtatcttttgcgagaacacatccgcgggatacatccacttccttgtcaagctggatggtaactggacggcctgcatctgcagtctgtgcatctttatctccgactaaaatgctctttacttttgcatgctcattgcttggcagagtcacgattgtatcaccgaccgatacagcgccactctcgatctgtccctggaaaccacggaacgtgtgatccggacggcagacacgctgtaccggcatgtagaagccttcttcctgcttcttttcgctcacatcgatattctctaagtaagcaagcagtggctcctgcgtgtaccatggcatattgtcggaatgggtggtgacattgtcaccctcggttgcagaaaccggaatgatcttgacacttgctaaatgcagttccttggaaagttcctgaatctggtcaacgatctccttgaaacgctcctcactgtaatcgacaagatccatcttatttacagcaaatacaaagtaacggattcccatcagtgcacagattctggcatgtcttctggtctgtacgagcacgccctgctttgcatctacaaggataacggcaaggtctgcaaaggatgcaccgactgccatgtttcttgtgtactcctcatgtcccggagtatctgccacgataaagcttctcttttcggttgtaaagtaacggtatgccacatcaatggtgataccctgttcacgctctgccatcagtccgtccagaaggagggagtaatcgattgcgccgccgcggcttcctactttggaatccagctccaacgctttctcctgatctgcgtaaagcagtttggaatcgtataaaatatgtccgatcagtgtggactttccatcgtctacactaccgcaggtaataaatttcaataatccgctcattttagaaataaccctccctctttcttcgttccatgctgccggctgcctcgttgtcaatgacacgggtggtccgctcagactctacagcactcaaggtctcgtcaataatctcatctaatgtggtcgcgttggattcgattccaccggtcaatggatagcatcccaaggtacggaaacgcacattcttgtattcaattttctcacccggacgaagtttcagacgatcatcatccaccatgataatctgtccgtcacgctcaatcaccggacgctttgctgcaaaatacagcggcacgatatcgatgttttctctctttatgtactcccagatatccgtctccgtccagttggaaatcgggaacacacgaatactctcacccttgttgatcttggagttataaagtttccacatctccggtctctggttcttcggatcccatgcatgattctcattacggaaagagaaaattctctcttttgcacgggatttttcctcatcacgacgtccgccgccgaatgctgcagtaaatccgtatttattcagcgcctgttttaatgcctgtgtcttcatgatgtcggtgtactggctgccgtaatcaaacggattgatgccacgctttacaccgtcctcgttgatatactcgatcatgttaatccccaatttctttgccgtctcatcacggaactgaatcatttccttgaatttccatgtcgtgttcacatgtaaaaatggaaatggcggcttctccggataaaatgctttcatggcaagatgaagcattaccgaactgtcctttcctatggaataaagcattactggtttttcacactctgccgctacctcacggataatgtagattgcttccgcttcgagtgcatcaagatgagataattgactcatgatcttcctccttaatatttattcgaatcctttttattcacaacaattgtttctattgtaccatctgtttttttaattcgccagtgtaacagatctccttccgtatggacggtcatctggcttcccatgccaccgatgtcggcacccaggtaataggaaattgcctcaaacggacactccttgatacaggaggcgcatccccagcagtccttcggataccggatcacggcttttttgtcttcgccgcgcacgatcaggcttccgggacagacatccagacattttccacacgccctgcatttcatggaatcaatcgcgatgctcataggtttctcctcctttcaccagatctctacggatcatcgtaatctggtccccgttctttttcgagtttacatagcagagccatgcatcactcttctccggataatccagattctccgcgaaactgtgccagcgtgtctccttgcgtgcacgcagatgtgcgatcacagtcaggcacacggtcaagcgttctttcagctcatagataaacatcagctcatgcatatcggctgccgcaagtccttttgcaaggatctgcagtttctttattttttcttccgccatggcaagctgcttttcgttgaactggtaatgggttccgattccgcctgcatactggtccatgactttctgcatggcttcctcgagttcctcaacggtaaatgccgggtcctgctttgtgagaaatgcatcatactcggcaattttattttcaagaaccgcttcttcatcagaagccgccgtatctgccacctgttcttcgtttaatttctgcacgatggaatgggctgcgatctcgccctccaccagtgcgccggttacatatttctgtggacagccgcctgccacatctccggcagcatagagtccgtggatcgttgtctctcgttcggtgtctacccagtaaccgctggcggtatgaccacctacgatatacggctcggttccctcaatttccacgttctgttcgcttggatttttcccggattccacccacttgagcgtctgtcccggtgccatgtttaagtatgcttttaagagcgattcatcctgctctgcggagatgccttcggtgcgaagataacatggtccgcgtccttttacgttttcttcaacagttccgtacacacgctgggaagtagtcagaccgtattttgtctcatacacttctccgtgtgcgttgatctgctttgctccgacaccctgtgcaatcgttccggtcggagcgatcgtatctttacagcgcagggcgataaagcgcatctcaaatgtggtcatctcggctccggcttccattcccatggcatatccggctccggtgttaaacggcggataccacattttatgacgggaaaagcccggattgttcggacggtaaagtcctgctgctcctccggttgcgatcagcactttttttgcgcggatctcgtaggccgtaccgtctgcaatggaaaaaccgacggctccttcgatcttattattgtttaccagataatcggtaatgtttaactggttgatgacggtcacatcgtctaatttgctgacagcatctgcaagaagcggcttgaagttttcgccgttgatcttgatattgcggtttcctcttgccacatactcgccgttttcgtcttttaagatgaccagaccaagctgttccattttggcggtcacacggttgagtccttcggacatggtcaaaagcagatccggacggacgatgccgtcggcatcttttgtggcgtagtccacgtaatcctgcggaacatgacctttggtgatataggcattgagcgcgttgactccggctgccagacagccgctgcgcttgatgttggctttttctgctatgattatggaataatcggattgttcacggatggtcattgccgcgtagcagcctgctgtgccgccgccgatgatgaggacatccgtatggagtattttttttccctcgattttcataagtaatccttccttgtgattaaatgtagaagacctcgccttcctgcatttccttattttctacaagataggtctggttttcatcaaatatgtaaagccggtagattaagacatacactttttcaccgatctctaccggatctttttcaagtgagcgctcggtgacgatcgggatacctcccacatcaacgacaacatccagatgatttcctcggaatatcacatcttttacgattccacgctcggcggcactcatgtgctgtggcggtgcacttctggacatgcggacaaattccggacggataactgcgtgggttgcgccctcgaccggatcaaatccaagcagacgctcataatgctctacgatcgaggaacggccgataaactgtgccacgaacggggtgtccggtgatttataaatttccatcggtgttcccatctgctcgatatgtccatggtttgtgatgataatctcatcggccacctcgacggcttcatcctgatcatgggtgacaaaaatgcttgtaatgccaagctttacaaccatctcgcgaagccagttgcgaagttcagtgcggacttttgcatcgattgccgcaaacggctcatcgagaagaagtacctgcggattcggtgccaatgcgcgggcaaatgccactcgctgacgctgcccgccggacaactggttcggataacgcttttccattccgcttaatccggtcagttccagcagttcggtcacgcgcttcttgatctcttttttcggcaccttggcaagttcaagaccaaaggctacgttgtcgtagacggtcatataacgaaacaatgcatagttctgaaatacaaaaccaatgccacgttttgccgccggcacatcgttgacacgctgcccgttaatatagatatcaccgctgtttggtgtctcaagccctgcaatcatgcgaagcagagtggtctttccgcttccggaaggtccaagcagtgcgactaattttcctttttcaatgccaaagctgacatggtcggaagcccggaagtttccgtaatttttacaaatatctctcatttccacgtacat

SEQ ID NO: 436 - DNA, 18108 bp, unidentified
  source 1..18108: mol_type = unassigned DNA
ttactgatctatattattggcaggcttatagagcctgtcagtgatcttgctctgtatctgtttcggcacaaagcctgtgatatctccgccgaagcttgcgatctcctttacaacgcttgacgaaaggaacatattctctcccgtagtggtgagaaacaccgtttcagcgtcattgtaaagctttttatttgcaagagccatctggaactcatactcaaagtcagacacagccctaagtccctttacgatagcattagctcctgttttttgcagataatccgccagcagaccgttataacaatccaccaccacattatcaaggtgcttcgtggcttcaattatcatttccattctttctgtaggtgtgaaagcagcccttgatttattagcattaaaggacaccagtactatcaccttatcgaaaagctttgaagctctgtcgattatatccagatgacccagcgtaacagggtcaaagcttcccgggcaaacagcgatacgcatcaatagtccacttctttcattggtatcttatagaccgtcaaagcagtcttaccgtatttatatctcttatgaagcttaagtctgccgtagctttctccaagctcaagttccttttcatgctcgcacacaatgatagcaccatcattgagcttgctctccacaagctccaaagccttttcaactatgcccattctgtaaggcgggtcgataaaaactatatcaagcccggctttggcaactttaagatattccagactatccatgcaaagcacacgggattccttattgaaaccgcatgaatccacattatccttgacgatagccacagcctcaggattgctgtccacgaaaacgcagtgactagccccacggctgagagcctctatacccatttgaccgctgcctgcaaaaaggtcaagcaccgagcttgctggtacatcaaactgaataatggaaaaaacagcctcttttaccatatctgtagttggtcttgtatccaacgactccaaagttttaagcttttttcctctgcatgaacctgtaataactctcataaaaaataactccaaaataaaagtatacaatcattatactatattaattaccatttgtctagactattcgccgatatttttttattttttataccacacacaaaaagggacttcacagtggaagtccctttagttattttaattacgtactctaagaaacaagtcctcagttaagattactttctcttagaaactacgatagctgcacctgcgagagcgatacctgcaagagcgatacctgctgttgcgcctgtagctgctgttttgtcagaagctgcatttgaagatgtagcagttgttgtgcctgttgtaccagtctttgaagaagttgttgcggctgtgctgttagcctttgaatcagtcttgctgtcagacttagaatctgtcttggaatcatcctttttgctgtttgaatctgtgccagaagtagcaggagcaacaggaacagcgttagcagcccatatccagccctcgtttgttgagccgtcatcgaacttctgagcctcagcgtttacagtacctgactgagcgatagaaattgtgtaagagccgtcgccgttgatagcagtatcctggcagtcaacgtttgtgtcgaatccacctgcgccacctgcgatacctacgcacttgttagggaagtaagctggctgtgcaaccttatccttttctttgtcatctggatttctgaaatcccaagtgccgtcagcttggaaagatacaccagcattgcctgttgtgtcaccaagaccttcaattgtgaagtcaatagtgatgtactcaccagcgcctgctacagtgtagtcagtgatctctgatgtgaacttgctgttccacttgttgatgatctggaagcagagcttgtctgaatcagacttgccaggagcagcacttacgttaaactcctgtgaaccgatctttaccttaagatccttacaagtaacgacctgaccatttacaagagcctcatcgttatcgttgtactcacatgggatatctgtagcgatgaacagatagttgtaagctgttgaatcagcagcgaaagctgttactgccatagctgttgtagctatagctgctgcagccatgcctgcgaaaatctttgtaagtttcatttctaaaacttcctttcttaaataactttaagtatattgtactttattttccgaaaaatttcaatcggctgatttaacaaatatgataacgttttcttatgcaatcacaacaatttgtactattgatttttagaagtatagcccaatttccgcactttgcaaaacttttttatcttatgtaaaaatactaaaccgtcatttatcaagctttttcttctgcacctttccagtcactttcagcaccatacctctaggagcaaatttagcccctgcataaagtgcctttatagacttctcagggataatgatgagttttctgccgaacattcccacaagagccttttttgcacaaaactgtggtgttatggagcttacgccgaacttgcagtttgcaacgtcattgaactccgtatccacaggacccgggcataccgcacaaacgtgtaccctgctgtttctcgccctcaactcctcatatattgcgctggtaaggctcacaacataagtctttgaagcatagtatgttgccatcatagggccgccgtacataagccctgccgaggaagctatattcattatataacccctgtcagcggcaacaaagtctttcaaaaacagctttgtgagcatatgcaccgctgtaacgttggtgtctatcattttaagctcagtgtccagaggaagctcgtcaaagctgcccactgcaccgaaacctgcgcagttcacaagcactgatatcttctcgttctttgtttcctcataaagccgcagacattcttccctgtcggaaacatcgcaaactatcacccttgtattgtcaccaagctccttcgcaagctctctgagcctttcctcacgtcttgcgctgattataacacgaaagccccttgcagatagatctctcgctatctctctgccaattcccgagcttgcgcctgttaccaaagccgtcttagccatttatatcatcctccacccttttcagggatattatttgatttttgtcatatcagtatatcacattagtatcaccctgtcaagtgtaagaaagatgtaaaatacgcagaaaagcatcgcaaaaaactgaataaaaatgtcaaaatctcttgacatttactttaaagtatggcataatgttaatataattttaagaaatagaataaaattaaactgagaaatcaaagaacaaagaacaaggagataaaaaattatgagttgtaccctttgcatacttgccgcaggtcttggaagtcgcttcaaaggcggcataaaacagcttgaacctttcggaccaaacggcgagataataatggattattctatctatgacgccgttgaggcaggctttgacaaggtcgtattcattataagaaaggatatccgtgatgcctttgataaaatgataggcgaccgtatctcaaaatacgtcaagatagattacgtttatcaggagcttgactgtcttccggagggctattccgtacctgagggacgtgttaagccgtggggtcacggtcacgcagtctgctgttgcaagggcgttataaatgagcctttcgcagtaataaacgctgatgatttttacggtaaggaagcttttgtgaagctccacgattttctctgcaatgaaaactcagatcgcaaaaagcttcatctcggcatggcaggcttcatactgaaaaacactctaagcgacttcggtgcagtgaacagaggtgtctgtgaagttaaagactctatgctcacagacgttgttgaaacctacaatatccgccgtgagaatgacggcaaggtctattcaggcaaggaagaaacagccgagcttgacgagaactgctatgtgtcaatgaatatgtgggcttgccctgacggctttatagataagctcaatggtatgttcacagactttatgaaagaaaataaagccagcctgacagcggagtttctcctccctgcgggtatcgatacaatgataaaaacaggcgttgcagactgcaagcttctggaaactcacgataagtggttcggcgttacatataaagaggataagccaaccgttaaagccgatatcgcaaagcttatagaggctggcgtttatcctgaaaagctttggaaataaaactcaaacaaacaaataatacagaataaattgtcaacaataagtcgggcagaacaaattctcccgacttttttgcgtctgtttgtaaaaagtgaagaaaatccttaattcgactaaaaagcacttgaaaaaggctgtaaaatgtgttatgataatctttgaaacggatctgcatttttgcaggtcaggagagataatataagaggtagtataatggagagccaacacggtagcaatttgaaaaatataagaaaaaaaagagccacagcacagcaaagcatagtgtcattgagctgtcttgtgtgcatagcatttgcggcaatatggggcttccatgcaggaagcggcaacagcagggctgtggaagcaaagaagatgtcagcttcaagctctgtggcagagaacgaaagctccgagatcaatgcagacagctcttctcaggcagaaagcatgatcgatgagagtggcatagatgaaagccttactgacagctcggttacccatgatgacgccgacgacctttccgacgcagttttcataggcgactcacgaacagttggtctgcaaaacaactgcgataaaccaaaagcaacgttcctttgctctgtgggaatgcacatcgacaccgttatgacagaccagaacatcaccctctcaaacggcaatacaggcactgttatcgacgctcttggagaaagacaatatggcagagtgtatataaacctcggcactaacgagcttggctggccttatatagacaccttcaaggattattatacacagcttatcacaaaaattcaggagatacagcctgacgctgttatctatgctgaatctatcctccctgtaacagcttcaagaagcttgcagggcgacgccataaataacacaaatgtagccacattcaatcaggctatctcagaggtggcacagcagacaggtataaattatcttgactgtacctccgctgtagcaggcgcagacggcactcttccggaggaagcctcctcagacggaatacaccttatgagcgaatactgcgacaagtggctcaactatataatcgacaacacataagaaaggaaagaaaaattatgaaaacaaagaagatactctgcactcttatggcagttatgtgcattggcacagcagcacttacaggctgcggttcagactctgacagcagcacagcaaactccgcaaattcagcggcagccgcccagacaaacgaaagcgttgacgtaacagccgttgcggacaagctcaaggacggcatagagttcaaggacgagcttgcagagcttgacgaagcaaagatagaaaagataatcggcatatcagcagacagctatacaaaggctaaggtctatgtaagctcatcaggaggaacagccgaggagatagactgctttgaagccaaagacgcagacagtgcaaaggctatcgcagatacacttacagcaagagttgaaagtcagaaaaaggtttttgaaaactatgtccctgaggaaatgacaaagcttaatgaccctgttcttgtaaccaacggcaattatgtttacctctgtctttcaaacgataacgataaagcaaaagagataataggctaggagtaataaatatatgcttttttcaagtacaacatttctgttcgctttcctgcctattgtactgataacgtattatatcgtcccacgcataacacgcaatctggtgctgtttattttcagccttgtgttttacgcatggggcgaacctgtttatatcgtcctcatgatagcttccactatcgttgcgtatataacaggactattggcagacaaacagcgtaaaaacgcaaaaaaatacactccgctcatcgcaatgataggagcggttgtgtggaacattgggcttcttctgttttttaaatataccgactttttcatcggtgcggcaaacagcattttcggcacgcagataaaaacgctgggacttgccctccctatcggtatctcattctacagcttccagaccctttcatacgttatcgacgtttataagggcgaagtaagaagtcagaagaacttccttgaccttgccacctatgttgcccttttcccacagcttatcgcaggtcctatagtaagatacatcgacgttgcggaacagctcaaaaagcgtaacgagagcatagagcattttgcacagggcgtgtggagattttccataggtcttggcaaaaaagtcattctcgcaaatactatcggcgagcttttcgacactatctcaaactcagcacaatctgaactgagcgttgccgcaagctggctgggcataatagcctataccttccaaatatactttgacttctcaggctattccgatatggcgataggtcttggcaaaatgttcggcttcgactttctcgagaacttcaactacccttacatctccacctctatcacagacttctggagacgctggcatatgtcactttcaagctggttcagagattatgtctatatcccacttggcggtaaccgcaagggcaaagcaagacagtgccttaacatcatgatagtatggtttctcacaggcttctggcacggtgcaaactggaactttatgctatggggtgtgtacttcggtgtgatactcctatgtgaaaagcttttcttgggcaaagccctgaaaaagatacctgcatttttccagcacctctatgcacttctttttatagtcataggctggggaatattctcctacgaagacttcggcaagctcacacagaacttcaaaaatatgttcggcgcagggggacttcctctcataaatcaccaaacagtgttctggctcgcacagtatgcagtaacaatagtgatacttgtgatagcttcaacacagcttccaaaaaagctctgccttaagcttcagatcaagtgtcctgagatatgcggctgtatactccaaccgctgtttgcattaacacttttggcagtttccaccgcctaccttgcaggtaattcattcaatccgttcctgtatttcagattttaaaggaggacggcagatatgaaaaaacaacttaaaaactatattatgatagtgtgctttctgctgttcatattcggctttgcagtggcaagttttatttccgaggaccgtgaattctccgaaaatgagaaccgctatctacagcaagcccctgagttttcgtggaaaaagcttgaaaaaggcgagttcacatcggatatcgaaagctatatgtccgatcagatatttatgaaagaccagcttgtgagtcttaaaacagtcaccgaccgcacgcttctgaaaaactatcagaacggcgtatatttcggcaaggacggctattatctccaagactatcaggaaaacagacctcttatcgagaaaaatataagctgtcttaacgattttgctgacaaccttgataaatccgtcgacgtaagctttcttcttgtgccgaatgcagtttccgttatgtcagacaagctccctgcggtcacacagaccgacgatcagcttgaaagcgaaaagtatataagctctatcctcagcgacaggataaacctctgcttcccatatgagcagctcaaagacgccgcaaagtccacgcaggttttttataagaccgaccaccactggacagccgagggcgcaaaagtgggatttgacgcacttatgacagccatgaatgaagatatcccacaggtatcctacaatatagaaactgtaaaggactttcatggcacactttattcaaaagccccaacagacttctccgctgctgacgaaatgcacttctacacaaaccctgacaacagcgtaaaggtaaattatattgaagaaaacaaacaaacagacaccctttttgacgattcattcaataccaaaaaggataaatactccacattcatgggcggaaactttgccctcacggaaatagaaacaaacggtgaaagcgatgaacacgtccttattataaaggacagctacgcaaacacagttatgccatactttgccgacaagtataagcacatcacaatgatagatatgcgttattaccacatcatggataagacagtcagcgagtatgtaaaagacaatggtataacaaaggtcattttcctttataatatggactttgtgaacaccgataacaacttcatatggcttgaataactcagcaacaattaggggcggccattggtcgcccgctatttttatcacacccatatataacgtcaacgtcaaacccacagaaagaaggacataaaatgacacttaccccctacaaaagaaaagccttttattatgaaacagaccgcatggatataatccaccattcaaattacgtccgttggcttgaggaagcccgtgttgaccttatggaacagcttggctgcccattccacgagatagaggcaagagggatagtttcccctgtcctctctgttgaaacacactataaatatcccgtccgtttcggtgatgagtttgaagtgcgctgtaagctgtcaaagttcaacggctgtgcctacgagcttgactacgaggtctttgaccttaccactcagaaaacagcctgccttgcccacacctcccactgcttcaccagccccgaccttaagcctgtaagactaaaaaaacattatcccgatatctacgagaaattcctgtccgcatatcaggcaagtgaagaataagcaaaaaaaatgtacagctcccgagtttcttctcaggagctgtacttttgtgtaaaaaaaatgacagacgtgacctgtcacgaagaaagcaatccatcaacgccctcacgccacttttcaaagctgcacaaaccaagctttgcccagcggcattccgaacatagtatatcaaatgcctttttatccattttgcttctcagccttgtgagcgcactgcgataattctccactgagtgacattctatctcagaaagtctgcaaacctcgctgtctttctgtgccaccgttccgccacagccgtcaagcaaacaaccgtcctccgtcctgtttgggcagtgctgacatatcatatctccgctgcacacaaaccgcaccgcagtgtcctcgctctccaatctgtctttcacagactgcatattcaccgaaaaaccgtcactgtagccttttccctgaaaaagcggcaggcacagcagatgatgaaatctaagctcaggctctcttgtaagcatagcaacctgtctttgcaagtctgcttacaagctcgatgctgataaggtaagcagcaacaacagagataacgtcctttacaagataaggaacagaaacaagaaggattgacttgccaatagagatattagcaacgatagcgtactggatagcaccgagcaggtggtcgcaagcaagacctgcgataccaagcacgatagcgatgaccttaccgcttatcttgtcagagcagaactttgcgccaagaccgcaaagaagagccataacgataaatccgtagatgaatccacctgtataccctacgataacggagaaaccgcctgaccagcctgcaaacacgggcacgccgatagcgcccagcagaccatagaccagagcagacacagctccgcccttccagccaaggaaatatcctgccagagccacagcaaaagtctggagcgtaacaggaacgtgagtaggaagcggaatagttatctgcgaaagcacagcgattatagccgtcataactccgataccgactatttgttttgttttgtttttagcattgttattcattgtaaacctatcctttactttttatttgacaactaatattgtatcacataccaatcctattgtcaaccaaaaatatttatttcggtatacaattataaggtgtcggtaaacgatacttttatacaaatttaataacaaacagtaaaaacacggcattgcccttccgaactgtacaccgagggcatcgtcccctacaatatttcgggcaacttcctaccaccgcaaaatcgctacgctcggtgctgtcttttacttcgtacttgagcacaactctgttcagctttgccaattcctcactcctcatttctcacttccccttgtgcattttgcccttaaatcctactaaattgatagaattaatatcagttttcacaaaaatgcgaaaaatcatcttaaacctattgacattcctctatgggtgtggtatagtatagatacgctaaaacatactaaacgactaggattaatatgaatttgaaatgaggcgttgaaaatgagtgtaaaaatactgaaactgaaaacagcgtacgattcacgaatgtgtatgtgctgtatgtgttgctgttaaaatcagcataaagttcagtaacaaaaatttttatcggatttaaaaaacatcaatttaatgaaagaggtaatttaaaatgagcgcaataaacgaaagaaatcttaaatttgaaacactccagctccacgttggtcaggaaacagcagactctgtaacagacgcaagagctgttcctatttatcagacatcatcatacgttttccataactcacagcatgccgctgacagatttgctcttaaggacgcaggtaacatctatggcagacttacaaacccaactgaggacgtttttgaaagacgtatcgcagctctcgagggcggcacagcagctcttgcagttgcatcaggcgcagcagcagtaacatacgctattgagaacgtagcccttgcaggcgatcatatcgtagccgcaaagaacatctatggcggcacatataacctgcttgcacacactcttgttgattacggcatcacaacaacatttgtcgatccgcttgatccagctaactttgaaaaggccatcaaggagaacacaaaggctctctatatcgaaactcttggcaaccctaactcagacgtagttgatatcgaagctatcgcaaatattgcacacgcacacaatatcccacttctcgttgacagcacattcgctactccatatctcgtaagacctatcgagtacggcgcagatatcgttatccattctgcaacaaagtttatcggcggtcacggcacaacaatcggcggagttatcgttgaaagcggcaagtttgactggaagaagtcaggcaagttcccacagctcacagaaccaaacccaagctaccacggtgtaagctttgcagacgcagcccctggcgcagcatttgtaactcgtatccgtgcgatccttctccgtgatacaggtgcaacactttcacctatccacgcattcatcttcctgcagggtcttgaaacactgtctctgagagttgagcgtcatgttgagaacgcacttaaggtagttgacttccttaacaagcacccaaaggtagaaaaggtaaatcacccttcagtatcagacgatccaagccagcaggcactttacaagaagtatttccctaacggcggcggttctatcttcacattcgagataaagggcgacgcaaagacagctcagaacttcatcgaccacctgaaactcttctcactccttgcaaacgtagcagacgttaagtcactggttatccacccagcatcaacaacacacgcagagcttaacgaagcagagcttgcagatcagggtatcaagccaaatactatcagactttctatcggcacagagcatatcgacgatatcatctacgatctcagcgaagcattcgacgctatctaataaaaaccttgccattacggtttttacctaaaaatacaaacctcaatatagaaacggctgacaggcgaaaagcttgtcagccgtttttgtacccataaaaaaagcagggcaacaacaagccgccctgctccataaagcaaaaagtcagaaaaaaatccttcgccacaaggcgataccttaattcctcactcctaactcctcactacttctccagctcagagatcttatccactctcctctgatgtctgccaccctcaaactccgtttcaaggaaaacgtccaccagctcgatagccaagcctgcacccagcactctcgcaccaatgcaaagcacgtttgcgtcattatgcgctcttgtatacttagcagagaaataatccgaacagcaagccgctcttattccctttatcttgtttgcgctcattgacattccaataccagttccgcatatgagtattcccatttcgtattcgcccgaagccactttctcgcaaacttcctttgccttgtcaggatagtctactttctctcctgcctgaataccaaaatcagtgtattccgcacccttttcgtccaaatgtgccaatatctccgccttaagctcaggacctgcatggtcacatccaatagcaattttcatattaatttcctcctatttatccctatgtgccttatccttttccgcctttgtagcctgcaaatatgatacctccagcctgtcagccgaaaccattatctcaggctgagcctccaccacaagacacagcgacgaagccctctgcagcctgttcacatagcttgcaagctgaacattttcgttgtcagcgaaatatttcgcctttatctctgccgcacagtcacccacaagcattgtcttttcagtaaactctcccgaaaaaacttcctcctcagggcaaactctgtcagcggatatcctcgtgacaacgccgtttttgcactgaaactcgcctgcgtaaactatcttaggccttgccctcataacagaaattatcctgccctcaaaatctatgcagttgtacgccagcgaaagcagagtggaaactcctgcgctttttaagctctcacagccaaagcacattccctttacagccgccacgcctattctaagcccagtgtaagaccccggaccctttgcaatagccgcacaatcaaggtcagtataagtaagccctgtttcctctagtgcctgcttcaccataggcaatatcacctgggagtgagtgagctttgtgtatacagatttctcccaaagaagcttctctccgtccgtcaccgccaccgaagcgacctttccgcttgtgtcaatagctaatatcttcaaatctatcatctccctcaggtgcagttatgcttatctccctgctgtcctcgtcaatgcgctgaatatctatcctcaaagcgtcctcaggaagctcctcagcaatattctccgaccattccaccgcaagcacagtgtcttcgtccatgtagtcaaaaaagcctgtagtttccagatcgtccgcagaatttatgcggtacatatcaaagtgtacaaggctgagcctgtccccacggtattcgttcaccagtgcgaacgtgggcgaagtcacctcgtcaccaagtcccatgccaatggagatacccctggtaatagtagtctttcctgcaccaagaccgccgctgtaagcgataagatcgccgcctttcagccgtctgcctatctcctcacccaaagcgatagtttccgccgcagatgatgttttgtatacctttgtcaacctatcacctcatttgaccgtcatcttccgtgtagcccacaataaaaaggctgtttttattcataagctgataaatgctctccacctctgtcttgtccgccgctgaattgtagcagttgtaaacatacagcctgccctcctctttaacagcgaaaaccgtgtggataccgctgaaaatattcaacccgatatggtaagaaactatcacaggcttgcccttttcaacagccgcctgagcctcatcaaccttataaaatcttttgtatcccactcccattgccttaaaaagtccgcttattttcctaggattagaccccagcgaaccgtccgccgcaataagagcattcttttcaaaatcataagcaagctttgccatgtcaggctcaaagccctcgtatgtgagataattataagccgcaatgacctcacagcctacccctgcgaacctggtttcgccaagcatcagatcgcacacagggggattttcctgcccgtatttcacaaagccctctatctttatgcccttgttgtgagcataattttccgcagccctgccgctgtccgtttccttataagtgtcctcaaaaagccgccacttcatatcgtcctccgagctgtcgccctgaatatcgctctcatcaccgacctgcgagctttcgtcaacttccacgctgccactatccaccacagggctttccacagtagtggtaaaagccgaatcattgagcctttcactgtccgccctgtttccgcatgaactgagcattatcccgagaaacagaatgaccgcaagaattttcatcacagctcacccttgtccttgaagtagtttagcataagatccaccattctgccataggactgcttgccatcctcaacgccattgagcttcagagatttttccattgccttgtcagatatctcccccactgcctcgctgtcgaaaacagtgtccttagcctcgtcaacgctccgccagtagtcccagtttgcttccatatcagcccacacctcgtcgcagatagagctgtcaaattctatcttcttatcgtcagaagcgtagtcaaaaatcttgtttctaacctcgccaagcgccgccagatagcccgaatagcggtaatcagcattgtccgatctgtcgcacgccataaaggcgataaagttcgcctcatcctcctgaatgtagcctttcgtatgagcaagctcatgacaaatggtgtcaggaagcttcgccttatacatatcctgattgtagttagcctccatagagaatgggaaatagatgcccataaggtccatttggctcataaagaacgagcattttatagctttcggagtgacataaaatcccccgaggtttttaaattcgctcccaagcccacgcatggcctcctgagccgtcttatcaaggtcagcggtcagcacgaattttccctcgttgtcacgctccacctctttgctaagcacatttatctccgtaacaagcttgttgccaagtgcttcaagctccgtcctggtgtgctgttcagtgggtatgccattaagctctgcaaagcttgaacaatgataaagaacaaagcagttaaaggtctgcaccgtcaccacaaaagtgactatccacatataaacaagcccgaaaattttcgcagttttctttctcttgccttttatgactatcacaagcaccagcatagccaccagcgaaagcggaataccgaaaactgctaccgcaataagcagttcgccaaaagagaacggcaacagcgaagtgagcctgccatatgtattttcccaaattggaaaaacgtgagccgtataccagtcgcagaacgccgtacttttccaggcgatcacgttcagcacaacgctgactgccacaaggcaaacgcaggcaatgacctgccaggagagatgttttttcttgccgttctcaggcattttcacactttccgcactctttttcaccgctgtatctgtcactgccgctcacctcggttcgtatattttcacttgctatcaaaacacatttgcttgcccgccgaagtaacaagccaacggtaacaacatggttagaataaccataaaaactatcctatcacatctgtaggggacgacgccctcggcgtcccgttatttctcgtccgttgaattaacggagaatatcacaacaatgtcgcccgaataattcgacatcaagaatatgacaatcacggcattacccctccgaacgggctgtcgcatttctgaatatcacgccactctgcacacacgggcgaacgctgttcgcccctacaatgtttcaggatagtttgctccgccgcaaaatcgctacgctctttgcggggttacatttgctaagggagagggtaggcggtgcagatttttcactccgatattactttgtgataaggcacaacttttgcgtgctttttttcattaaatctgcacatagtcggcttacgccgaatgaggctctgcctcatactccgcttagggctttgccctaagaacccacaagccctctaacgccgggcttgagcctgcgttttagtgctcgctacgctcggttctgaatgatcggctcggttcagctatgccaattcctcattcctcattccttatttaaccccctgctcctcacttaaacggcttagaacaatccgtagatattgccctcattatcgcaatcgatattataagccgcaggcttcttaggcagaccaggcattgtcataatatcgcccgtatatgctaccacaaatcctgcaccggctgaaagccttacatctcttactgttatctcataattctcaggcttgccaagctttgtcggatcgtcagacagtgaatactgcgtcttagccacgcaaacagggatatccccgaatccaaggtcagtgatctcctttatagccttttcagcctgctttgtatagatcacgccgtttgcacggtatatctcctttgcaagtatatcaagcttatccttgatagggagcttctcgtcataaagtggcttgaactcagacggctttgtttcgatagtcttgcaaaccttttccgcaaggtcgataccgccctcagagccttttgcaaaaatctcagcaagtgagaactcaacacccatttcaccgcaaactctctcgataacagccagctcagcctcagtatcagtatggaatctatttatagccaccactacaggcacaccgaacttgtgcatattctcaatatgagttttcaggtttacgatacccttttcgagagcctcaacattttcgttagtaagctcagttttcggaacaccgccattgtatttcaatgcccttacagtagccaccagaactacgcaacttggtttaagaccagcgtatctgcacttgatatcaaagaatttctcagcgccaaggtcagagccgaagccagcctcagtgatagtgtagtcagcaagcttcaaagcaagctttgtggctcttactgagttacagccgtgagcgatattagcgaatggaccgccatggataagagcaggattgttctcaagtgtctgaacaaggttaggtttcaaagcgtctttcagcaaagcagtcatagcaccgcaaccgcctatatccttagcataaacaggctttccgtcagttgtgtaagcaacgagtatcttctcaattctagccttaaggtcagccagatcggaagcgagacaaagaatagccattatctcagaagcgacagttatctggaaagaatcctctctaggaataccattcacctttgagccaagaccgataacgatgtctctcagagctctgtcattcatgtcaaggcaacgcttgaaaagtatccttctctggtcaatgtgaagctcatttccctgctgcatatggttgtcgataagtgcgcagagcaggttgttagccgcagttatagcgtgcatatctcctgtgaagtgcaaattgatgtcttccataggaacgacctgagcgtatccgccgccagccgcaccgcccttgataccaaaaacaggaccaagtgaaggctctctcagagcgagtatagctttcttgcctatcttgttcatagactcagccaatccaacggaaatagtggtcttgccctctcctgcaggcgtagggtttatagcggtaacaagaataagcttaccatctggatcatttttagttttagcataaagcgactcagaaagcttagccttgtagtgaccataaggctcatattcatcttctgagatgccgagcttagcagcgacctccccaattttgagcattttcgcctgctttgcgatttcgatatctgacagcat

SEQ ID NO: 437 - DNA, 16796 bp, unidentified
  source 1..16796: mol_type = unassigned DNA
gtgagaaaaaagaaaaaaatcttaatggttcataatttttatcaaataggtggcggagaacatacggttttcaaaaacgaagtagaactgcttcgagataatggccatgaagtaatagagtatacgcgtagcaacgatgagctgaaatctgataaatggaaattgctctttttgccttttacaacagtgtggtctcttagaacctatatagaaatcagaaaactgataaagaacgaacaaatcgatgttgtacattgccataacacgtttccattgatttcgccatctgtgtattatgctgcaagaagtatgaaagttcctgtggttcagacaatccataatttcagacttctctgcccgaatgggtctttttactgcaaaggcaaggtgtgcgaaaagtgccgcgagaacggaaacttcaaagaagcaataaaaaacaaatgttatcgaaactctacacttggaacaataattgttgcagcaatgttaacggttaacagaaaactaggaatctataaaaaaatatcatatatctttttgaccgaattcaacaaaagtaaattcgataaactcatcgatataaattcaaatcaggtattcgtaaaacctaattttgtaagcagaaaaggggagccaagcaaaggagcacacaagcgagtgttcatttttgcaagtagacttgaagaaaataagggaataaaactccttttggaattgtggaagttgcttcctaaggattattacctgcacatttatggagatggaactctcaaaaatttcgttgaaaaaaatgtgaaagagaatatttccttttacggatttactccacagaaaactatttttgaagatttatcaactgcaacagcacttgtatttccaagtatctggtatgaaggcttcccaatgattcttgcagaggcaatggccattggttgccctgttgtatcgacaaatataggcaatgcaggagatattcttgtcaattcaaaaggtggaacaacatttgaacctgacaagcccgatacatttataaatgctattgaagatgttttgcagaacaacgaaatatatcagaaaaatgcactggcctattacagcgaaacactgtcaaaagataaaaattatgttctccaaaacgatatatatgaacatttgttcggggggggggtaagaacatatatttatgccggaagacttgataaaggaaaaggaatactaaaactgcttaatgaatggatcaatctgccgggcacctatgtacttgaagtttatggagagggtgagtgcgcagccgaggttcgaaagttagcagctaaatgtccgaacattcatttgaatggattctgtccacaaaaagaattattcaattccttaaaatccgcagtcgcattgattacgccctatatatggtatgagggctaccctatgaatattgcagaatgtttctctttgggagtaccggtcgtatcaacaagtattggaaatgctggcgacttagtttcaaaatcaaatgcaggaactctatttgattttgaagtcaagggctcttttaggaaagcgttggatgcagtttatgaacaacgaacgaaattttcgtttaatgcttataactattacttgtgcaaccagacacctgcttcaaactatgaaagactaaataaaatatatgatacattgtaacaaactaaagaatattcctacacgcgtaaatataatcggtgtgccgatttcagtagtgaatatggagagttgtatttcctttttattctccaattgggatgctgtacatggaaattacgtctgtgtttccaatgtgcatacgacagttatggcacatgatgatccacaatattataaggtgcaagcagagtctttgctgtctgtgccagacgggaaaccactttctgtaattggaagaaagaaatttccgcagatgaatcgtgtcaccggaccggatttgatgcgaaggctttttgaagagtcgaaagaaaagaaaattcggcattacttttatggaacaacgcaagaaaatataaatgcgcttcttgagaaaatcaaaaaggagtatccatgggttgaagtagttggatatgagccttccgtgtttcgtccgctcagtgaagaagaggagaatgcgctcatagctcgaataaatcaaaccaatccagatattgtctgggtcgctttgggtgctccacgccaagaagagttttgctataaaatgcaaggaaaaatcaacggcctcatgattggcgttggtggagcatttaatgtcgtctctggcgtaattgatgaagcacctcaatggatgcaggatattagcttggaatggttttatcgcttcatgaaggaacccaaaagattatttagaagatatttggtgactaattctaagtttatatggttatcgctactaaatgaacacacaaaaattcgatgattagaaatttctgtaaatatgaaacaacttaaagtgaaaatccatacacatccaatatatattttctggatgctaaaaataatatttgatatgttttatcagctaaaaatgctgactgttataataacggcttttgccattctattgcttataattgcaataacaaaaagattccctctgaaaccttgtatcagtgatacaatcgttattttgattgcgttgatgtttacgggatcatggcttaaatcaccagaactatatcttgattatttgaaaatcatttcttcgctgcttttatactttttaggcagattctatgtaaaagatattgatacggtttgggagagcttaacatcatcgcttctttttgctctagttataaatcttattgtttgcctcgccggaaaaggaacaatagtatgggggtcagctgtcacatatagaggaatgtattttttcaaaacggattttgctgtcatgctctgctactttctaatcacatggatttataacaaaaagatggaaaaaacagattttattcctcttgctatcgcagtggtactaattgtactttgtaacgcacgaattatttatctatgcactatcgttgccttatttattttctttcagtatagaaaaaataaaaaaatcatttcattcaaaaatgttttgatgcttgggtgtgcgtttttagtttgcatatatgctcttcgctttgtttcaaacaccaaattttttcaggatagaggactactcagcttgcatttcgataaattatcagatttgatgaatgcaagcaatactcagggcagaaatgaaatctggacattgttactaacagcatttaacagacaaaatatttttacgaaaatatttggagcagcaatgaacttcaatcaaatatttggatattcaggattgaacgagcataacacatatgtaaaagttcttataaatacgggatattgcggattggtattgtttgcattgcttttttttattgcaattaaagaaataaatgatacacctgatagaaaacttagctgctatacattatctgttttaatggtgtttttgatagtcggtttttcagttcctaccattctatatacaaactgttcttggataccattatttatgattggtggttgtatatcctccgcacaagaaaattataatgtagaggtagttgaaacgtgaaaagcaatgtaattaaaaatactataatgctctatggtatgtcaatcgccaaaatcgtatttccccttttgacattgccgtatctgacccgtgtgctttctgtagaaagctacggcgtggtttcgtatgtaaaagctgtaatgcagtatatgcagttggttgtagattttggctttatgctgtccggcacaaaggatattgtaaacgcgaagaacgaccacgaaaaattggaaaaagaagttggtgacattctccttgcccgcgttttgttggcggcggcggcttttgttgccctgctgggaatgattgcggtgattcccctgctgcgcgccaacatcggatatacgctgttggcatttgtgacagtgtttttgtcggtgtttttgtttgattatttcttccgaggtatcgaaaaaatgcaggtcatcacgctgcgctttgtcgctatgcgcggcatcgcaacagcattgacttttatttttgtccactcggataaggacattttgtttgttcccttactggatgcagttggttcgctggtggctgttatccttgtgtttgttgaactgaagaaagaaaacattaagattcacttttccagtgtaagcacagcgtggaaaaagctaaaaaattcgtttgtctattttgcttccaacatggcaacaactgcatttggtgcattgaatacgctgctgattggcgcattccttccagcaacggaagttgcatattggagtgtctgtatgcagctaattggcgcggtgcagacgatgtatacccctattacggatggcatttacccagagatgatcaagacaaaaagctggaagtttatcaagcggcttctgatgatttttatgcccattgtgttcgcaggcagcgcgttctcgattgcggtagcaccgtatgtacttcagattgttggtggtgagcagtatgttgcagcgacttctctgttccgcgcattggtgccagtactgattttcagttttccgggaatcgtgctgggctggccgacattgggcgcactggacaaggccgcacaggtgacaaaaacaacaattctgtctgccgttgttcaggtggcaagcctgctattgctgattgcaacggggcattttaccgtgatgtggatcgcggtattccgctgtgtaacggagcttgtccttatggcaagccgcggatggtattgttggaaatatagaaaagagttttactaagccaatatgggaagtaacaggaggatatcgtgacggaagtagaggaaaagaatgcaaaagaaaccgataaagtagaatcggcattacaaagagcgattcatataacaaaattgcttattatatgggcggctcgctcattcttgtattcaggatgcacattttgtgtgtttcttgtttttcattttgtttacggaaaagcttccagcaatgaacttgtcgaagttggagcacttgtatgtggaatagtatggccgacattgtttgaaaacaatcaggtcgataaaattcacggatttttgaaaggatggcttttggtttcattctttattttcgctataaattatatagtagtgtaccgtagtgcatttattggtgttcaattgtcagatagagaggaaacctcatgtgcttttttgcttcttgcatttgggatattatcctggattttatgtgcggcagtttcgatttataaggaggtgcgctccgtatgttgattgaaaaagttatcacaaacttttctgatgtaagcctctgggcaatagcacttgtagttgggtatgtcctaattggtgcgattttgctattaagattggcatggaaaagaaaacataccaagatggagaatgtcactcaaaacacacccattgaacaaagtaaagaaatatacagagagagtcaaaatgacacaaaatctgaaaattcagacgccacaaaatatctacctgtcccacaagaacacgttagcataattgagcaaaaagatttctcacatttttatatcactctcgagcatcatcttaaaactccgtcaaaatttctagataccctaaaagatttgtgggaagagccaaatatttctaccggtatggttgctacacctgaaatgtttttctccagtcaagaattttatggaagttgttatgacaatcttgcatatgtcgaaaagaagcaaaatagcgttgttaaactccgtgagggcacacttataaatttaaacggaaaaatctaccgagttcgaaaaattgagattcaaaataaggccacgtcatcaagcgttcgcttagatttagaaaaactatcggttagcaactattcgctagagaaaagagataaccattatgcaagacttagaaggtcaaatagttgattgcttattaaggagaatcatatgaaacaacttaacgaagaagaagtaaaaatctatcagcttggcattttaaataccgttgctgatttttgcgagaaaaaccaaattcggtattggctcgattctggaacattacttggcgcaattcgccacaaagggtatattccttgggatgatgatattgatattggaatgttgcggccagattttgaccgatttatgaatatttttaatcaagcgaatggtcgctataaatttatttgtcgggagcttggcaatagtttctattacccctatggaaaagtgctggacacggaaactgttttgtatgaaccagatgaaaacggcatgaagatcagtgtgaatattgacgtttttgtctatgacaatgctcctgaaagcaaccaaaaagttgcagaaatgtacaaactaagagattggtatacaaaattaaatgctgttcaaaatggtgttgttggaacgcatggaattataaaagacattgtaaaaacggttggctttgaagttttgaagattttcccgaaaggatacttttccaaaaagattgttgataattcaaagaaatatgctgatacgaatacatcggcagtcggaaacttcacttccgtttccaaaatcgtttgcgagaaggatattttttcttctttcataaaggtttcttttgagggaagagaatacaatgcaccggttggatatgataagtggttgaccgcattttacggcgattatatgcagcttcctcccgaagagaaaagagtatcccatcatatgtataaagcataccagaagtaaaagtgcagtgggtgtgagagaatgtcagactatatattcctattcgatatggattcaactattacacgcaaggaagttttaccggaggtctctaagagaattggaaaactagatgagatgcgccggttaacagaggcaaccatgcgtggcgaaattccatttcggacaagctttttaaaccgtgtaaaaatactgagtgatatttccgtgagcgaagtcaatcaggtcgtttcagaaattccgctgaatccatatatcgctgattttattgagaataatcgagatcgctgttatgttgttaccggaaatttggatgtttggatcagcggcttaatgaaaaagttgaaaatggaaaaccattgttactgctcaaaagcggatgtcaaaaatgaccgaatttctaaagttgtaagcgtggctgataaagaactgatggtacgacaatttgttcagccaatggttgttgtgggcgatggtgacaacgattccggtatggcgcgcatggccgatattgcggttggtttcggtggcgtaagacccattgcgcagtcgcttctcagaaactctgatttcgcattttacgatgataaaagatgtgcagattttctgtggcaactgttgtaaagggggatgaccatgattaaaaagacggatgttaccgttatcatctgctgtgcgggaatgggtacaagacttggcatcggaacaacaaaggctcttgttgacgttggtggtgagccgcttattatccgtcagctcaagcttctggatgcgtttgatgatataagagttgttgttggatttgatgcagagcgcgtcatcaacgtagtaaaagaatatcgtaaggatattatgtttgtctgcaactacgagtatgagcataacggtcctgctgacagcttaaaaaaagctcttcttggcgtccgtaaatatgttatcactttagatggtgacacaattatgaatccagaagatttcaagcgtttcgttgaatttcccaatgaatgtattgcggtgacagaaaacgcgtccggtgaaacaatcagtgcgatggcacaaaacggaatggttgaagttttgtctaaaaagccgggaaatatgcagtggtcaggcattacaaaagtgcaagcggataaattgagaggaacttcttcccatgtgtacgaggtacttacaccatatcttccaatgactgcttttccattgcgcttgaaagaaatcaacacgcctaaagactatgaaaacgcgatggaatggttcgttgctggaatgagtgaggagtaaaacgatgaaagatttggtaattggtgttttaggcggtatgggaacatatgccactatcaaccttttcaagcagtatgcagaggtttttccagcggagaaagaatgggagaggccgcgtattatcattgataacagatgcactatgccaagccgtgtgcgggcatttctttatcatgaaaatgtcgaaagattgattgacgaaatggctaactcgattgatgggcttttgaaaatcgggggggggtcagcaagaatcattcttgcttgcaatacatcgcatcttttcctgcctcaaatttataaaaaagttccggaagcaaaatccgctgttataaatattattcattcctgtgtagagcaaatcagcaaagataatgtaaaacaggttttcctgcttggttctgaagggacgattgaatccaaagtatatcaagaggcactttccgaaaagggaattatctgtaaagttcctcagaaagaacaatatgtgcttttgcgaaattgcattgaggctgtgaagcaaaataagtattcggacgaggtaaaaaagtcattccaagagcttatggatgaatatgatgtcccgattatcttgggctgcacagaactgccgattctttatgaaaaatataaagatggcatcgatataacagtatacgaccctttgctgatcgcattaaaaaagttgaaagaagaatacgaaaatgagtaaaattctaacctttggagtatatgattactttcatttaggacatttgagactgttcaagcagtgtaaagcatatgcagattatttaattgtggcggttcaagacggaaattatatcaaaaaattcaagccggacgcaaaggtgctttatacaaccgaagaacgggtcgaaatgctagaagcattacgaattgttgataaagttgtagtgtacgagtctgtcgattctaaatttttagggacaattgattttgatattcttgcgcttggtgaagatcaccgtggtggacgttttgacgcggtagagcagtggtgtgaagagcacaacaaaagagttgttcgtttaaagagaacaaagggaatttgttcttctgatataaagaaatcgcttgaagcaaagtaagagaggaaaattaaaatgtctgcatttgataacgcaacccttatgatcactggtggtactggttcttttggttctaccgttttgaagcacttcctggattccgatttaaaggaaatccgcatcttctcccgtgacgagaagaagcaggacgatatgcgccatgagcttcaggccaagcacccggagaacgccaaaaaggtgaagttctacatcggtgatgtccgcaacccccagtccatccgtgacgcaatgcccggtgttgactacatcttccacgccgccgccctgaagcaggtcccgtcctgcgagttcttccccatgcaggccgtccagaccaacatcatcggtactgataatgtgttgcacgccgctattgacgctggcgtcaagcgtgtcgtctgcctgtccaccgataaggcagcttatcccatcaacgccatgggcatctccaaggctatgatggaacacgtcatctacgccaacgcccgtgtggctgccgagcggggcggcacgaccatctgctgcactcgttacggcaacgttatgtgcagccgtggctctgtcatcccgctgtttatcgaccagatcaaggctggtaaccccatcactatcaccgaccccaacatgacccgctttctgatgaacctggacgaggctgtggatctggtcttgttcgctttccaacatgcaaatcccggtgatttgttcatccagaagtctgatgcttccaccatcggcgatctggctaaggctgtccagcaattgttcggcgataccggcacgaacatcatcggcacccgtcacggcgagaagctgttcgagactctgatgacccgtgaggagcgtctgcgcagccaggatatgggtcattacttccgtgttgctgctgacaaccgtgacctgaactacgacaagttcgtggtcaagggcgaggtacataccatggcggacgagtcctacaccagccacaataccgagcgtctggatgtggaaggcactgtcaagaagattctgaccaccgagtacgtccagaatgcactgaagggcatcccgaatgtctaaggaaaagctgctgctgattggtgccggcggctttgggcgcatggtggcggagcaggcgatgttccgatatgattgtgctttcatggatgacggacagcctgtgggtgccgagatttgtggtattccggtggttggcggtcttgctgatttgccggagctgcggaaggagtatggcctgttggtggtgggtatcggcaacaatcggttccgggcacaggtgtatgagaaggcgaaagcccttggctttgcttttcccaatatcgttgcgcccagcgcctacatcagtccatacgcaaagctgggctgtggctgcgtggtgctgcaaaatgcctgtgtccagaatggtacgtccgttggcgacggtgttttgctgaatgccggaacagaggtccactgtgatgcagcggtaggggactacgccctaatttacaccaacagcgttgttcgcaccggtgcgactgtgggaaactttactcgcatcggcagtaactgcaccatctgcaataatgcaaccgtgccggatggcgcggacattccggactgcaccgcagtacactaagaggtgagagaatgaacattctagtcacaggtgccaagggcatggtaggaaccgccctgtgcaacaacctgaaaaacatccgggatgggaaaaacaagactcgcccggcattggatattaaagaaatctacgagtatgatctggattccaccccggcggagctggacgagtactgccagaaagcagacttcgtgttcaatctggcaggcgtgaaccgcccggagaacccggaagacttcatgaagggcaacttcggctttgcatctgatctgctgaactgcctgaaaaagcacaacaacaaggcaaccatcatgctgtcctcttccattcaagccacgctggctggtcgcttcggcaacagcgagtacggacgcagcaaaaaggctggcgaggaactgttcttccagtatgctcaggagaccggggcaaaggtggccgtctaccgcttcgtgaatctaatgggacatagccgccccaagtacaacagtgccgtcagcaccttctgctgggcggttgccaatgacgagcctttcaccgtcaacgaccgcagtaccgagttagaactgctgtacatcgatgatctcgtagaaggaatgtttgacctgctggagggcaaggagcaacactgtgaatttgacggtgtggagaccgttctgaaagcagatggtcgctactgctgcgtccccgtgacccacaaggtcacgctgggcgagattgtagacttgctgcaggagttcaaagcacaacccaccaccctgatgatgccgaaaatgccggacggctcttttgccaagaagctgtactccttgtatttgacctatctgcccaccgacaagtttaagtacgccctcaagatgaatgcggacaaccgtggttcctttacagagctggtacacaccgccgattgcgggcaggtgagcatcaacatcagccgtccgggcatcaccaagggacagcactggcacaactccaagtgggagcttttcattgtggtcgcaggtcatggcttgattcaggaacggaacatcaacactggggaaacggtagagtttgaagtttccggggacaagattgaggctgtccatatgattcccggctggacccacaatatcatcaacctgtcggaaacggagaatctggtgacggtgatgacctgcaacgaaatttttaaccccaatcacccggatacattcttcgagccggtgtaagagaaaatactggttgacgttaggagaattttatggaacacaattttacatggaaaaacgatgggcgcacaaaggtcatgattggttgcggtacccgtccagagattatccgactggctgcggttatcaagcgctgccgggaatattttgactgctgcgtggtctattacaatcagaattgggacagaaacctttccaccgttttctgggaggattttgaactgaagaacaccttcggggaatatgggccggacattcttgtgcccgtggtgggcgagaatctgggtgtgacctgtggtaacattctgggacgcagctatgagcttctgtctgagctgcagccggagggctatctggtgctgggcgataccaactcctgcctgtctgccatctctgcgaagcggctgcacattcctctgtttcacatggaggccggcaaccgctgcaaggatgagtgcctgcctgaggagactaatcgccgcatcgtggatgtgatttctgacgtgaatatgtgctattccgagtttgcccggaagtatctggcggacaccggactgcccaaggaacgcacctaccagaccggttctcccatggcggaagtcctgcacatgaatctggagaagatccagaaaagcgacgtgctggagcgtctgggactggagaaggacaagtacattctgctgtctgcccaccgtgaggagaacatcgactcggaaaagaacttcctgagtctgttcactgccatcaatgcgctggcagaaaagtataatatgccgatcctgtactcctgccatccccgcagcaagcatcgtttggagaagagtggcttccagctggaccctcgcgtccgggtcaacgagccgctgggcttcaacgactataacaagctgcaaatgaacgctctggcaatcgtctccgactccggcactctgccagaggagagcagcttctatctgtccatcggtcaccccatcgccgccgtgtgcatccgtaccagtacggaacgtcccgaggcactggaagctggtgactttattctggctggcattaccacccgggaacttctcaacgccaccgatatggcgatcgagatgaagcagaagggtgttctgggcaagccctgccccgactatgtggacgagaccgtgtccatgaaggtggttcgcatcattcaggggtatgtgaatgtggtcaataagatggtgtggagaaaatactaattatccacacaacagtcatgtgaaagcatggctgtgctgctcaaatatgctacctctccgtggtgagcagcaggcaacggattataatccggctaaagcatatattcgttaaatcgctctttggatgaggaaacaattacataatgggaaagtattttggaaccgatggcttccgtggtgaagctggtattgatctgactgccgaccacgcctacaaggttggccgttttctgggctggtattataacgctctgcgcgagcgcaacggcaacaatgagcccgcccgtatcgttatcggcaaggacacccgccgcagctcctatatgttcgagtacagtctggttgcaggtctgaccgcctctggcgcagatgcctacctgctgcacgttaccactacgccctccgtggcttatattgcccgcgtggacgactttgactgcggcatcatgatctctgccagtcacaacccgtattatgataacggcatcaagctgatcgactgctacggtgagaagatgcccgaggagaccctgcttttggtggaagattacatcgacggcaaactccatgtattcgataaggaatggccggagctgccctttgcgcaccgtgaacacatcggctgcacggtggactatgtggcaggccgtaaccgttatatgggctatctgatctctctgggtatctattccttcaagggcgtgaaggttggtctggattgcgccaacggtgcaagctggaatatcgctaagtctgtttttgatgctctgggcgcagatacctacgtcattaacaacaagccgaacggtctgaacatcaacaacaacgctggctctactcatattgagggcctgcagaagttcgtggtggagaacggtctggatgttggctttgcctttgatggtgatgccgaccgctgcctgtgtgtggacgagaagggcaatgtcgtcaccggtgaccatatcctgtacatctacggctgctacatgaaggagcacggcgaactgatgaacaacaccgtggtcaccacggtcatgtccaactttggcctgtataaggcctttgacgagcagggcattggttacgctaagaccgccgtgggcgataagtacgtttacgagtacatggcaaaaaatggctgccgtatcggtggtgagcagagcggtcatatcattttctccaagtacgccagcaccggtgatggtatcctgaccagcctgaagatgatggaagttatgctggcgaagaagatgcctatgagcaagctggctgagcccctgaagatctacccgcaggttctggagaacgttcgtgtcactgataaaaaggccgcacagaacgacccggcggtgcaggaggcagtcaaggccgtagccgaagcgctgggcgataccggtcgtatccttgtccgcgagtccggtacggaacctgttgtccgtgtgatggtagaagcccctgaccatgatacctgccagaagtacgtctctcaggtcgtggaggtcatcaagaacaagggctacggagtttaaaattctgtacaggaattaattacagcagtgcaagcctgatgatagattacttaattcaatcgtaaggataggcagtggcgtctaacggtctatataagcgaaaaaactggtggatttcatgaaagagcagaatggaaaattatcaagggatgaattcatatcatttgttaaagcagtgctgaagaaaaaatcattggaagaaaacaagccactttattttgagtacagagtatctggaaatagcaagcttgcagaatctgcaagaagatttgatgcgtttgcgccagatggatttttcagatatcaagagcctgtgattttcgaatttatagatagcaaatcaaaacagctggaaaaacgaatccaaacaatcgcggatgattatagaaaaaattatgaggcggaaactatcttcattgtaaacgccagaacatctgctgaagaattagaccttacagtatgggatatcaatgagataaacaaatggattaaagagtatccagctgagtatggtcatgtgtgttcatggaatattgaccgtaaaagaactacacaagacaaagaaaagtttcaaatttccgaaaatctgtacagagatgacttatatcaaaaaaacaatgatatttatacaaatgcaatacgtacctgcatcgaagagaaaaagggcgttgcaattgtgctgggtgcgggtgtttcgaaggaacagggagcaaaaacttgggatgaattgctgagagagtttcagacggaaattgaaaggcaacatcttttggatgattccgaggcggtttttcaggaagttggcgggacgagtcttacaacagctcagttatgcaaagatgtctgggcagatgagaaaacctttgcttggcaaatccatcaaagcttatatgataaagcgagagagttggatgtgaataccgagttaggggagattgcgcagctggctcaaaaatgtcggaaagatcaaaatttcaggattttaacctataattacgatgacttccttgaacagtatttagagtggcgtggagtaaagtgttgttccatgttcacaacgaaggttagatactcaaatggtcaggcgagtgcggatttttatggcgtgaatggacaaccaaatcaaagtttacggctctatcatgtgcacggatttttaccaaaagttgcaacaaaaagtcaattggatacactccatataagatcaatctgcctgacagaagctgactataatatgctttataatcagccttatagttggccgattgcaagtcagctttctttcttcagagaaaatatatgtttgtttattggatgcagtttaagtgatcccaatatccgaaggcttttggaaatcacagcgtataatccaccgaagcattatgctattttacctatgatgtacaaaagtaccgatgcatctggtgctgtggtgccaaaacagttcacaacaaaagaccggcttcaaattgaaaatcatttttatcgcatcggaattaacattctgtgggtaagagattacagcgcaattcctgaatggttgcacaagttgaatcgatctattgtttaaatgaagatatattttcattctacaaaatacacctcttgcgaacataaaagacgagtgttatactgaagccatcaaaaaacattggaggtgtcccctatgccccgtcccaaaggaagcaagaacaagcccaagaccgcaaaagcaaccgttgactttgctgcacagattgccgaaaagcaggccgcaaaggaagctgctgccgccgaaattacatccatcactgcgaatatcgatgcgctgaaagccgacctgaaaaccaagaaggcagagctgaaatctatcgacaaggaaatcgccagaatcgaggctaaaaaggtcaaggctgaaaccaaagcagcggaatcggcaaagaaagccgaagcagaggacgtgctgaaaaagctgttggccagtggtgtgagcgcagacgatattctcgcaaagttgaagtga

SEQ ID NO: 438 - DNA, 19079 bp, unidentified
  source 1..19079: mol_type = unassigned DNA
  misc_difference 16669: note = a, c, g, or t
  misc_difference 16670: note = a, c, g, or t
  misc_difference 16671: note = a, c, g, or t
  misc_difference 16672: note = a, c, g, or t
  misc_difference 16673: note = a, c, g, or t
  misc_difference 16674: note = a, c, g, or t
  misc_difference 16675: note = a, c, g, or t
  misc_difference 16676: note = a, c, g, or t
  misc_difference 16677: note = a, c, g, or t
  misc_difference 16678: note = a, c, g, or t
atgaacgtggaaggacagtataatccaaaagatgtagagtgtatttcggtagaaaaccttgaagtgctgccgagtggagcggattggcagagccgacatctggaatctgaaaggcgaaaagcagagattcgtgacagaatccataagcaggcagaacagggccagaaaacggcaaaagactactttcgtccggcgaaaccgacaccgtcgatttacgacagcgacctgaagcgtgtagccgtttatgcccgtgtcagcacttccagcgaagaacagatttcttccattgaaaaccagactctatattacaccaaaaagattgcagaaacggaaaactggaatttgcaggacatttacagcgatgaaggaaaatccggcacatcgctgcggaaacgtgatgcgtttaaacgcatgatgcgagatgccaaagaccagaagatggatttgattatctgtgccagcatttcacgttttgcccggaatttttcggattgcatgacgcagatcgcggccctgaaaaccatgcacccagcacatcccattggcgtgtactttgaaacggaaaacatctacacgctgaatccaagcagtcaatacagtcttgacattcaggctcttttggcagactgggaatcgggcaacaagagccgccggatgatcctttcgtatgaccagcgcattatgacaggccagtacccggtggccgacctgatggggtatcggcataccaaagatggacagttggtaattgagccggaagaagcaaagacggtgcgttttatctttctggcgtttatctatggttataactgcgatcaaattgcggcagtgctgacgcagaagaagcgtagcaccctgcgtggcaagcaggagtggaatggcatgatggtggcaaacatcatgaaaaatgaacgccgctggggtgatctggaagcccggaagagcatcgtggtggactacaagctgggcaaggtcacaaagaataatgggaatcgctgctctgcctatgttccggaacaccatgaagcaatcgtttcgccggaaattgcacgggctgcacatctggtggcatccagcaggaagaagtgcggtgtgcaggatattgtggtgatccagcagggaacattgaaaggctttgttggcatccatccgaattggagcggcatcagtgttgaaagcatccgcagcctttgcctgagcacctatctgccggaagaggtgatgaaactgaacgatatagcagagatgagggctggggcaacactgggaaaggcacttcaatctgaatatatgacggcttcaggtgcttgctttatcaaccagagcagcccggttatgacgatttctaaaaatggaatccgtttcagcaaggcctgccatagccggttggacgactgcgagtatgtggaactgctctatcatccgattctgcaggtcgtgattttgcgaaagagcaatcatggcttttcaacgacgatgcgctggagagatgacaatgacgttcatagtgctttttcagccagatcattttctggactggtcttccaaacattgaactggagaaggaattgccgctatcagtgccgtggtatctgccggggtcagggaaatgcaaaatttctgatttttgaattagatgagtcccggattttgactgggaaaaatcagtatgaacaagaaaattgttcgatgaatctgaaatgccggctatatcggagtaaatgggttcagagcattacagttagtgatgtgatggaatctggccaagtcgtagaaaatcccatgattggtgcaattccaagcagaaatgaagttcaacgtgaactggatgatcttttgatgtcgatgtagggggaacttatagaatggaagaaaaaaacagggcgcaggaactgagcgttcgggaaatctccttgattcgtgagttaacgcagatacgaaaagaacataaaagagaactggagtacgaaaaattcgatggctatgaacttccaccgcgcacccagttttccatgctgaataaacctgcagtgagcataaaatatggtgttatgaaatttaatatggcgtgcattcggctttttgaaggaatcaagtatgtccttccgattttgcaccccaataagaagcggcttgcgttgattatgtgcccggaagaggacagtgcatctgttgaatgggcaagacagaaggacgaaaactgggtgaataaggatattacatcattggaatttgtggaaaatatcttcaggctcatgaactggaatcgggaatgccgttataaagtgcttggacgggtggctaattcagatcagggtctttgtatgttgtttgatttggaagaagcaatcatgttcaccccgaagccacaggaatatacagatccgcttactggtgaaatgaagaaaaagcagatgaaattcttcccggatgcctataagaaccgtatcggaaaatcttataatgactatattgcagaccatcagatgaacatgtttgaagacttcattgggtatcagggctctgcggtattggatgagcctgtgcaggaagagaatacagcgccgaagccaccaatgagacagaaaagcgaaccaccggaaaatacagcgctgccccatttgccggaacaatctgtgaatatgcagcaattgagttatgagtctgacgggagaggaatgccgacatgaattctggacgagttatgaacctgcgagtgacaattccggcggaaagccggagaatgaatgttgggaaagatgttatccgtattcttggaagtccggcctatatctgcgttttgcagaggaaagatcggaagtctattgcaatcacgccgtgtgctgcggagcatcccatgtcctttaaggtcccggacaggctgctgaccgatgggcagtgtcggatgatgattaacggaatacagttcattcaggtgttgctggaagcaaatggtctggcggcaggaaaagaccatcagtttaaaggacggtatgatgccgagaaaaatgcagttatcatttcgcttgaaaaagatgaacaaagtgccctctcgccttaaaagtgtacaacttgacatcacgtccatttgggcgtataatacgtccaaatggacgtgatgaagggagccgatattatgcgtgccggaattttagatggctttcaaacgataattccaacagcagcggctgtcttatcagaaagacgacaaatgttaaggatgacgcaacaagaggttgctaatcgggccaatataactttgcgtcaatatcaaaggctggaatctggggaaagaaacattttgacttcttcttttggcttggcgtgtcgggtaattgaagctcttgatatggatgtttctaaattctatcatggtgactattaccttgaagaattgaaaactattgaaggaaaatgatttggtgacaggggaaaacatcaatttaaatgacggcttgatgccgaaaaaagagcaatataaaaagaattatcccgtggaaacagggaagataatccgtgaaaagtatgaaaatggattgattcggaatgaacatgaatttgaggaggtgctgaataatgtgctatttagtagcaaaagatcgtaatgcacatggttgttttgctctaaaaacgacgcatgggaagcatctggtggaattaaaaagagaattgaacaaagaggttgaatataagggagtacagcttgtaacaatcagcaggccaacagcgtatggtgagtatgcgccttaccactttgtggatactgaacgagtaagaattgaagaaagcggtacaaaaacagatgtgacaagattgatttcggcacgaatggctaccgaatttgaaagggggctttattatggtaaaaacgagtgaaatgtctatggaactgaaacaggaacttgcatttacaaaagaagaactcgcagaactggaagcggcaaagaaaatgccaatcacgtttgatgcggattgccctgaaaccacacctgagcgggcggttaaatttagaagagttaatccgccgcgtaacagaatggatgcccatggagcataatcacaatcaagaaaagaacgtatagagcgcaagtaagccctacaaggctcagatcggttcggaaccgactgaaacccttgtagggcttatttttttgcaaatttttttgttccttgcttgacaaccgcatagggtcaaccaagaaaaactacgataactaaagggttttgacggcttgagttgtccttcaaaagtttatttgttgaaaagactgcaagaagcgggaaatcctgggggttatatgtaggaggcttttggaagctctgttttgacccacaaaaaggagcagcaaataaagattgaaggagagttcaagcctacggtggattgcctttgtgcgacccgccgtaggcttattgctgttttataaagagaaaaatgaggagaatgaaaatatgaaaaattataaaattgccgtagcaggcactggatacgtcggtctttcccttagcgttctgttagcacagcataatcaagtgatggctgttgacattgtgcaagcgaaagtggatatgattaacaatcataaatctccaattcaagatgattatatattgcacgagaagaagcaaagcgtcattagtagagaaagaaatccggagctcaaacaagctctgcaagacttggatgactacctgttcgggtggtgaaattatgcgccatttcccagttagggtacttttttctggaagttcacattaacattacgacttgcaaagcaacagcatgtgtgatatattgttttaatagatgcaattcacttataaggttaataagattaatcaattgtagaaaagttactggataattatctacacattcctatgtgccctgtagtgtgtctgctctctcaagtaattataaaaaattcaactatgctgcgtatagtgcgttctattatttgtttttgttttgtagcgcagcggaaaggcatggtcataaacatgaaagttgtaattctggccggtggtcttggcacgcgaattagtgaggaaagcgtttacaagcccaaaccgatgattgagattggaagcatgccgattttatggcatataatgaaggaatattcctattatggctttcatgatttcgtgatttgtgctggctacaagcagcatatgataaaggaatggtttgcagactacttcctgcataccagtgatattacatttgatttcacccatggcagaaacgagatgattgttcacaaccatcacgctgagccgtggaaagtgacggttgtggataccggactcaatacaatgacgggcggtcgcatcaagcgtatccagccgtacattggcaacgaagcgttcatgatgacctatggcgatggcgtctgcgatgttgatatttctaagttggtagaattccataaagaaaatggtaaaattgcaacgctgactgctgttatgcaggagcaacagaaaggcgtgctggatatcgcagaggataacagcgtatgttccttccgtgaaaagaaagcaagtgacggatctttgatcaacgctggctacatggtgctggaaccgcagatttttgattatctggatggagatacctgtgtgtttgagcaaatgcctctgcagaaattggcagaagaagggcaattgatgagttacacccataaggggttctggcagtgtatggatactgctcgggaaaaacagcttctggaaaaattgctggcgacaggcaacgctccctggaaaaagtgggaggattgatcatatggtacattacgatcctaaattttactgcggtaagcgtgtttttgtgacagggcataccggcttcaagggaagttggctgtgtaaaatgctacttatggcaggagccgaggttacaggctatagcctggagccgcctacacaacccaacctcttttcccttgcaggaatagaagatcagatgcacagcgtcatcggggatgttcgcaattttgatagtttgaaagcggcctttgacgatgcacagccggatattgtgctgcacttggctgcgcagcctattgtgcgtgacagctataaagatcctcgttatacttatgagacaaatgtgatgggaacggtcaatctgttggaatgtgttcgtctggcccagcagcagggcaatgcccctcgctctgtgttgaatgttacaacagataaggtgtatcataataacgaatgggcttggggttatcgagaaaacgagtccctggacggctttgacccctactccaatagcaaaagttgctcagagttggcaacacattcttatatcaacagtttctttgccgacaaggttgtagctatttctacagcgcgcgcgggcaatgtcatcggcggcggcgactttgccaatgaccgcatcatccccgactgtgtgcgcgccatggctgcgggccgtaagatcggcgtgcgcaacccctactcgacccgcccgtaccagcatgtgctggagccgctggcggcctacctgctgatcgcccagcgccagtatgaggacagccgctttgcgggctactataatgtaggccccgatgactgcgactgcgtcaccaccggcacgctggtggatctgttctgccgggcctggggcggagacgccgcctgggagaatcaggccgaggccaatgccccgcacgaggccaacttcctgaaactggactgcagcaagctgaaaacgactttcggctggacgccgcgctggcacatggccgagtgcatggaaaagaccgtcgccttcagcaagatctggcttgccaacggcgacgtcccggcggagatggaaaaggaaatcaacagcttcttaaaggggcagaaatgacaaaggaacagaggagcatagcaagcgcttatgtcatttcggctttggtaggcggagtctatctgatttcctggctgacgcatgtatggggcggccagctgtggcccatcaacagcaacatggtcaactatgccgtggttttggtgctgttcggcattgcgcttttgctgtttggcaatcttttcgcgcgtactctgccgcaggagaggggctttgtgcaagcctgtgatgcgcgcctgaaggaacgcagcgccgcggcagtcatgatcgtcacagcactggtgacagccgtctaccttatatattatgcctgtatcggtgttaataaggaatttgccggtcctacctgcgcagagtcctcactgacggcgccacagcttattccggtgtattacctgcttacggtgctcttttttgtggcgacaatctatctgctgctgacgggcagggactgcccacagtggatgacctggggcggctacggcctttcggcagtgatgtacttcctgggcgtatggatcgtcaatacgtttgagggagacccataccacggcgaggcctatctggaaagcatctataatgtggcggatggtgttccgtatgaggagctgacaaccggcatctacggccactatggcctgtttttcttgctgccgatgaagatcttcggtgcaaaggctgttgttattcaattcctgatcgcactggttggcgttgtgacgggtctggccatgctgtactgcatccatcacctgataaaaaagaactgggtacgcctgttgatggcactggttgtgccggtcattccgtttgcatacagacggacgaattactggcagctgcagcctcaccgtttggtattcccgatgctgttggcagcctatatgctgttctgtttgcggaaaaagcagtcgaaaaaaacggctcggttctggggcggttggcttctgtgcatgctggcagtgctgtggagcaccgagagcggtctgttctgtatcatcggctggtgcgcgggctgcatcgtccgctggtggcaacaggagccatggtacgcccgcggccagtgggaacgctatggtgcgctgctgctgggcgctgtgttggcagtgctgggggccattggcctgacaaatttgtataacctggcctgcggcggagcaccgatcttcaaggtgtttttctacccgctgtacagcagcaattatatggatggctccatcggctacccgctcgagctgggcgtgcgcccatgggtgtttgtgctgctgattatgctggccgtgctggcatggtcgctgtttcagacaaccgctatcggaagaatagccaaaacggagaacattgccccatttacggcctgcctgtcggtactggggctggtatcgttcagttactatgcaaaccgctccgcctggatgaatctggagatctgcctgccggaggcactgctttgtctgtgcttcccgttgcaggcgctgacggacggggaggggctacgcaagaagctgggcggcctgtactgcacggcggcacagtctgtgggactggctgtactgctggtgctctgcgtgcttacggcacagctgcccggcggcgtgatgaatacagtgattctgcaggagcgcggtgcgttcagcacccgcggcatctatgcggaggtggagaatttctctgccaatataccggacaacacctttgcggttggccgcgatgtgggaatcatctaccatgcagcaggctgggacaactacggacattatgtggatgctgcggattacggcgtggcagataccgaaaaattactccctcatattctggcagagttgaaggcccagccgagctttgtcgtggatgacatactgaggatctatctggggcagaatggctacacgcccgacatgctcggataccagctgcagacgaccttcacatcggctggcggtgtgaaaccaacgacctattactattatgaaaaacaataaaaggagagaaaaacctatggcatggaagaatgaggcagaagcccgcgagcagatcaaggcaatggtcgccgagtactatcacgacttcaaggagaaaaagacctcctatcaggagggcgaccgcatcacctacgctgcccgcgtctttgatgagaaggaaatgtgcgccctgaccgacgccacactggacttctggctgacgacgggccgctttgccgatcggttcgaaaaggaatttgccaagtggattggcgttaagttcgcccatctggtcaacagcggttcctccgccaatctgatcgccttcatggcgctgaccgcccccgagctgggtgaccgccagatcaggaagggcgacgagatcatcaccgtggcctgcggcttccccaccaccgtgaccccggccatccagtacggcgcggtgcccgtgtttgtggatgtgaccgtgccccagtacaacatcgacgtcaccaagctcgaggccgccctctcccccaagacgaaggctgtcatgatcgcccacacgctgggcaacccgtttgacctgtccgctgtcaaggcgttctgtgacgcccacaacctgtggctggtcgaggacaactgcgacgcgctgggcacccagtacaccatcaatggcgagacccgctttaccggtacatggggcgacatcggcacatccagtttctacccgccgcaccatatgacaatgggcgagggcggctgcgtttacaccaacaacccgctgctgaaccgcctgatcctctccttccgcgactggggccgcgactgcatctgcccctccggccaggataacttctgcggccaccgctttgacggccagttcggcgagttgcctaagggctacgaccacaagtacgtctacagccactttggctataacctcaaggtcaccgacatgcaggccgctatcggctgtgagcagctgaagaagttccccacctttatcgagcgtcgccgtcataactgggatcgcctgcgtgcggcactggagcctgctgcagataagctgatcctgccggagcccgctgccaacagccgcccgtcttggttcggcttcctgatctccgttaagccggagagcggcctggaccgcaacgccgtgacccgctatgtggagagccacaatgtgcagacccgtctgctgttcagcggcaacctcatcaagcacccttgctttgaccagatgcgtggcacggacgcataccgcgtggcgggtgagctgaccaatactgattttattatgaacaacaccttctgggttggcgtttaccccggtatgaccgatgaaatgattgactatatggcaaaaacaattattgaggcagttaatcagtaaaaacacatcgaagaggaatcatacatgaaacagcaaaaagcaagaccgactttctgcaaaaatttgcaaaaagcaagcaaaccaacgcccatgcaggtatactgcgcggcaacgattctttgcttagcggccttgctttttgctgttttggtaagtcatggtgatattgtaaaccagtacttcttctatgatacgctcgacacgggcatggatttctttcacagtattgaatatgtgaaaggccgtatgccgtatgggcagttcagtacactgtatccgccgcttgcaaatctgttcttttacggattgtatcagctggtgccaaaatccctttctgaagaatggcagcaatcgtttttggattctatcagccagcgcggcagccagcaggatttgcggctgcatcagggaacgatgatgcttttcatcctttttgtggtgctggccgtgctggggattgccgctatgacagagcgcttgacccggaactgcggcggcgagcgtaaattgctgtccctttgcgctgtgttcagctacggtgtgttgtatgggctggagcgcggcaaccttctgctgctttgctggccgttgatggcgttctttattgtaaaccgcaaatccaaaaatcctgttatacgggaactgtcctacatagcgcttgccattgcggccgggttcaagctgtatccggcgtttctgggcatattgcttttgcgcgataaaaactatatggcggccgttcgcacggtaatatacgggattgtctgcctttgcttcccgctgtttttcttcaacgagggtatgtttggtctgacgctttggttccgggtgctgtttgaattcaccggtgacagtggacacccgtggataggcaatggctttgccaacattgtggcggaatttgcacatggaatcgatatgctgctgggcacaagtctggcagatggcagctatgctttgctgggaattctgctggcggcggtgctgctggtatgtgcattgcgtatggaccgtgagtggaagcgcgttctggcgattgtgctggccatggtgatgttccaatcccagtatgattatgtgtggtgcttgtttttactgccgctgtgtgtcttttttgcacaggagaacgaactgaataaggaaaatatcgttccctatttgctgatggtcttgctggttataccactgccgcttttccgtgcggatgaattgacgccgacatttaccatacacaacactttggggcatattatgttgattatgctccttgtatggtgcatagctgaaacagcccgtagaggaaagaaaagtcctgctccgaaagcagttggaaacaatcgcagacagctatgcgcaacggctatattggcggtttgtatgctagcttgtggatttggtggtcaagcactttgggaaaatacgcataactggggctttgactacagctataatggacggattggagacgaaggcgtcctgatgcaagacatacaggacagcagcggcaataccgtaacggttcagtggagcgggcgcggggcttatgtcataatttataatcatgcaccgtttgcacaggagatgacaatcgagtttgaaacgggatacggaatggatttgcagcaagcacataccatgacattcacggtggaagaaaatacgcaagagagtatgctgcgtgaggaaaaaccagaaccgaaaagcgtaaaaattgaacgcgaaggacagaaagtgacctataccgtaagcgtggaccccggacaaaccaaggttgagctgagctatgacggccccatggctgtctacgatgagaacacgcgcaaaaacgggacattttccgttaaaaatctgacagtcaccagtgcgggtaaaccggaagagacagcgtaaggaaaggaaaaatatatgcagaaactgcttgccttgctgggcgcaaaaaataaagaggagtttatggcgctgctgatgcagtttatcaagttcgggctggtaggcgtgagcaacacagctgtgtctatggcggtctactatatctttttatggatcagcccggatttgtatatgctgggcagcattctgggcacaattttaagtattgcaaacgccttcttctggaatgacaagtttgtttttgccggcaatgcaaacgactggcgcagcaagctcaagcgtctgggaaaaacttatgtgagttacggcggaacgtcgattttgtccaatgttctgctctggattgaagtaactttctttgcagtcagcaaatctattgcaccgattgtaaacctgttggtgacaattccattgaattttatcatcaataagctgtggacatttaaggaaagtaagaaagatgcgactttcagtttggaaaggtaaaaaatgataaaacgcttgaatagtacggataaaagatattatatatttatgattctgactattgcagttgcagcattttatgctgcgctgatgtgtaacaaaacaatgcctttcgcggagggatggtatacatattatgcgcaacttataaacgaaaaaggtttgctgccttacagagattttgaatatcttttttcgccgctctacatttattttattgcgtttatcacgcgctttttcggatatgatattttgacactgcggtgtgttggcatcctaatgtttgtaataatcgctttaggggtatatttgtttattacagaaattgttggaagaaaaaaggcgtggattgctgcaattacttccgttacagcggttatgtatctacagtcagaagtagttcagattttttatgactacatccgacttatggacatttttgctgtttttaccgttttattcttgattcgcgctgtcaaagcaatgcagcacagcgaaaatcaaggcgtaaaagtaaatctttttctttgtggtcttttcaattccctcttcataaatgtaaaacaaaatgttggattgattttttgggcatttacaatagttctaattatttacttaggcgtgtattttcaacagtccataaaagcaattgtaaagaatttaatgcaatttttattgcctattgtagcagtaacatgtgcaatttatttgttgctggccgtaactgggggattgaaaggatatttgtccatgacgggcggaggcgcaattagcgcaaaaggcggtatgattgcgattctctttaactgggtgcccaataactggaacttattccaaaatgcgatgccagaggccagtgttgttttacttgttgtagtggctttgatggtggcccttgccatagcagaacataaaaacaagatggcacgacatgatgcaaatggcgcatggagtaagattgcggatatacacgggggggggggtacctgctggcgataggattgctattggttatggctgttcgccacaaagacatggcagtggcaatttcggattggaagtcagtaacaccgtatttcttttttgagattgtatttccagcttttttgttgtttggtttttggtttctctataatatcattaaaaaacagcaaaacgcagagacatttttgctgtggtttacactggcaggctcttatgtggcaatatcttggggctgtggaaattccggtggattagcagagggacaggcaacaacaggagtggcatttgttgtcgcatttattctgtatggactaagctatcagtggcttcagatattacaggtggtagcggtagtcgcttgcatcggcttaacgattcaatcttgcaccaaaaagatggtgaatacctataattggtggggagcagatgaagcagatttttgggcaagtgagaacaatataggagatgttccgctgctgagcaaaattcgggcatctacagatacaaaggctgtgtatgaggaaatctgcaaggaaataacagagggagtgcaggaagatgaaaccatctactgcttcccgcaaattcccatattttatagtttatgtgaccgctgggatccgggggtacgctctaaagtagaatggtttgatgtgtctacggatgaagcagtagaagcagacattgatattctaaaagaatcaccacccaaggcaatccttatgtacaatgtgggtgatgatgtctatgaggctcatgaaagcgcatttcgcaaggggcaagcatccggaaccagaaagatgagagactttttgtatgattttgcgtatgctaatgggtatgaatttatcggcaattacactacaggaaataatgaacttacactttggattcagaaagacaatcgtaatgtgaatctgattgatgcgtttgatggtggtgatggcacaattgataacccctataaattacatactgctgaacaattgcgcttgtttagtaagatggtaaatgaggggagaacttttggcggtcaatatatcgaacaaacagcggacatagacctcgccaatcaagattttacgccaatcggtgaatattccggtaacaactatttctgtggcacatacaatgctgccggccatgtgattcgcaatctaaagattgaaacgaatgataatgcagccttatttggacgacttggcggtaaagtatataatctgggaatagaaggtggaaatatcacaggcgcttatatcggtggaattgcaagccatgccgttaaagatacagcagcaataattaactgctatacagatatttctatggatggaatacgtgcaggcggtatcgccgataattttgtaggaactgtcggaaattgctttagcgtagggttgatacatggtacggatagtgcagatgtattgagctttagccaatataaagaggtacaaagcgtttattccgttaaggaaaaaaatagtcaggacttcgatacacaaagtacagatgatgtcagaattacatattgtacggaagaaacaatgaaaaatggaatattggcacaacgattgaatgattctatttattcgataggtacagaactacaaaagagcgatggtactgaagataatgaccaagaaacaacaattgagttggtacggtggaaacagggaacggatggacatccggttttcgatgtgccatcgtaattgaagcagaaaaataagaaaggcagacaatcaaatgaaacagcgtttagcggattatgtggcggactttctggcggcgagcggtgtgacggatgttttctccgttgtaggcggcggcgctatgcacctgaacgatgcgctgggccataacccccggctgcatgtgacttacaaccaccatgagcaggcctgtgccattgcggcggaagcctacgcccggctggaaaataagatcgcggcggtctgtgtgaccaccggccccggcggtaccaacgcactaaccggcgttgtaggcggctggctggactctatccccatgttcattgtctccggtcaggtgcgctatgacaccacggccagatacgctttgcagtacaccggtacgccgctgcgcgccatgggtgaccaagagtacgatattactaaatctgtccagtacatgacgaagttcgctgccatgctggaggaccccaaggacatccgctacctgctggaaaaggcgtggcacctagccacgacggggcgccccggcccggtctggctggacatcccggtcaacttccagggcggctacatcgagactgacgagttgcgcggctacggccccgccgaggatgacgcccagctgcccccgccggtggacgacgccacgatccggacgattctggaaaaaatcaagaacgccaaacgacccgtgttccacgcgggctatggcatccgcctgtccggcgggtatgcggcgttccgctccgtggcggaaaagctcaacatccccatcgtcacctactggaacgccgtggacctcatcgaggatgacaatccgctgtactgcgggcgcgccggcaacatgggtgaccgcccgggcaactgggctatccaaaacgcagacttgattctggccgtaggaacgcgcatttctatccgccaggtcggctacaactggaagacttgggcccgcgcggcagaggtcatcatggtggacattgaccaggccgagctgaaaaagccgaccctgcacgttgaaatgccggtctgggccgacgcgaaggactttttgaccaagctggataaggccgccacggcccccgtgaacgcgggcggcgagtggctggccacctgccagcgctggaaacgcgactaccccgccgtgctgccccgccagtgggaggaaaacggagagaccgccaacgtctacgcctttgtgcgctatttaagcagccgcctgccggagaacagcctgaccgcggtctccaatggtgcctgctgtgtagtcggaaatcaggcgtatgttattcagaagggcagccggatggcaaataatagcgctgttgccagcatgggctacggtcttcctgcagccattggtacatgcatcagcggcgggcgnnnnnnnnnnattccgccgccagacgatttgtcttgaaggtgatggctccatcatgatgaatcttcaggaactgcagaccatcctgacgaacaagctgccgatcaaaatcttcctcatcaacaacaacggttaccactccatccgcctgacgcagaacaacctgtttaaggagcactgcaaggttggcatcggccccgagagcggcgacctgtccttcccggagtttgaaaagcttgcaaaggcgttcggctacccctactacagcgcccacagcaacgccgagatgaagcaggccgtggacacggtgctggcgctggacggtccggtattctgcgagattttcaccgacacgaaacaggtctgggagcccaagagcagcaccaagcgcctgcccgatggtacgctggtcagccccccgttggaggacctggcccccttcctgccgcgtgaggagctggagcagcagatgtttatcccgctgatgccggaagtgtaagggagtgcgtgattcgaaaatggcaagcattcaaagacaaatccgcaccgccatcatcactggccctacgggggcaatcgggatggcgctgtgtgcaaagctgctggcggagggcgtgacggtttacgcggtcacccacccgggcggcgcgcgggcggcgctgctgccgcaggacgcgcggctgcatgtggtgccctgcgacgcggcggagttggccgcgctgccggagctgatcccggaaaaggccgatgcgttcttccactttgcgtgggcgcatacgatcggcccaggccgcaacgacatgccggcgcagatcgagaacatccgctacaccattgcggcctgccgcgccgcggcgcagctgggctgccaggtctttatcggagccggcagccaggctgagtatggccgcgtggagggcatgctgaccgcacaaactccttgcttcccggaaaatggttatggcatggctaagctgtgcgccgggcagatgagccgtgtggagtgccaggcgctgggcatggcccacatctggacgcgcattttgagcgtctacggtccgcacgacggtccggccacgatgatcagcggcaccatccgtaagctgttgcacggcgagaagcccgctctgaccgcgggcatccagcagtgggattatctgtacgccgccgatgcggcagctgcgttctacgcgctggccgtcagcggacaggacggcagagtctacccgctgggcagcggcactgcccgcccgctgaaggactacatcgaggcgctgcgcgatgccatcgacccggcgctgccgctgggtttgggggaggtcccttacggcccgctgcaggtcatgcacctgcaggcggacacatcagccttgcaggcagacaccggttggtatgctgcaaccacatttgaagaaggaatccgtaaaaccattgaatgggcaaggaaagaaacaaaatgagtgagaaaaagacaatttcggtaatgatcccctgctacaacgaggagcagaacgcccgccccatctatgaggctgtgcgcgatgagttggtcaagagctgtccgaactatgactatgaaatcctgtttatcgacaacaagagcgaagatggcacacgcgccattatccggcagatctgcgccgaggacaagcacgtcaaggccatcttcaacgtcaagaacttcggccagttcaacagcccgtactacggcatgatccacacctccggtgactgcacgattacgatgtgcgcagattttcaggatcctgtggagatgattcccaaatttgtagccgaatgggaaaaaggttataaaattgtaattggtcgtaagactcagagcaaggaaaacggctttatgtattggctgcgtggttgctattacaagacgatcaagaaaatgagcagttgtgaacagattgaacagtttaccggattcggtttgtacgataaaagctttattcaaacattgcgagaactgaaggatccgacacccttcatccgcggcatcgtggccgagttgggccccgagcgtaaggaaatcgagtacacccagccacagcgccgtgcaggcaaaacccataacaactggtatagcttatatgatgcagcaatgcttagctttactagctacacaaaggtagggatgcgcctagctacatttgtgggatttatttttgcgggaatgagctttttgtttgggcttttttatttgattgcgaagttgttgttctggtataactttacggctggctatgcgcctatgatgattgcaattttctttatgggcggtattcagttggcttttcttggatttcttggtgaatatgttatggctatgaatacacgcatcatgaaccgtccgctggtcgttgaggaagaaaggctgaattttcagcagaaatccaagtaa

SEQ ID NO: 439 - DNA, 8401 bp, unidentified
  source 1..8401: mol_type = unassigned DNA
ctacttctctattcttatccagaaatcatcctctgccatacgcccctgcgtcttttctattatcataaatgtgtcataaaacggaagtccgatatcctccagcacaagcttcatcttatctcttgttcttggaaaacatcttgactcaagaaattccttatagtcattgtaatcaggattttcattaacgccaaatgcacgaaacatcagcttgtctgtataattctttattctcacaagctgctttgcgtcatcaacatctatcagtgtacagatgtcatccttatacatataaaacattctgacaggaaattctttctccggtattatcagtctgttcacataatcaggataatcattaatcatcttagaaagtaaaacaattggacctgtaatcttagcattttctttttcccatcgttctattgtcggtttcgatgttcctacaagactggcaaattctttctgtgtcagtccaagattctttcgcagattcttaatatcctcagatgtaatataatcttttaatgcaaacattgtgtcacttcctttcagtccttgataaataatgacttttcataacccaagtgtaccatgtacacattttattgtaaacaaaaagtcgttaaaatgatggtttttatttataataatctcatcattttaacgactttattcatataaaacatttcaatttcttaattatccagatttattggtaactttaattctctattagaattatatagcctccagcgcctgtgcaatatccgcaatcagatccttcttatcctcaagaccacatgagatacggataagtcctgctggaattccagcggctttaagctgctcatcattcatctgtctgtgtgttgatgttgcagggttaaggcagcatgttctcgcatctgctacatgagtttcgatagctgcaagctttaaattcttcataaacttctctgcagcctctcttccaccctttaactcaaatgaaactactccgcagccgccatctggcatgtacttcttagctgtctcatagtacttgttagaaggaagtcccggataattaacgaattcaaccttatcctgcttctcaagaaattctgcaacagcctgtccgttttcaacatgtcttggcatacgcacatgaagtgattcaagaccaagatttaatataaatgcattctgtggagactgtatacagcctaaatctctcataagctgcgaagtacattttgttataaatgcgccttctttaccgaacttctcggcatatgtaattccatgatatgattcatcaggtgtgcagagtccagggaatttgtctgcatgtgccatccagtcaaactttccgctgtctacaatagctccaccgactgctgctccatgtccgtccatatatttagttgttgaatgtgttacaatatctgctccccattcaattggtctgcaattaactggtgttgggaatgtattatcaacgataagtggtacaccgtgtgcatgtgctgcatttgcaaacttctcaatatctaatactgtaagtgcaggattggcaattgtctcaccaaatactgctcttgtgttgtccttgaacgctgcattaagttcttcctctgtgcagtcagggtcaacaaatgttgcttcaattcccatcttcttcaaagtaacatcaataaggttaaatgttcctccatatatagaagatgatgctactatatggcttccagcttcgcaaatattaaataaagcgaagaaattagctgcctgtcctgatgaagtaagcattgctgcacttccaccttcaagggctgcaatcttagctgccacataatcattagttggattctgaagtcttgtgtagaaatatccacttgcttcaaggtcaaaaagttttcccatatcctcacttgtatcatacttaaatgtagtagactggattataggaatctgtcttggttcaccatttccaggagtatagcctgcctggacgcattttgtgttaattgaataattatccatatttccctccggctttatatgtttacatgacatgaattatatcacaaactcaaagcatataacagcacattttagaaatcgggctacacatttattaacataatatgttatgatatcaattatgctattatcagtttttaataatattgtataataattaagaggttttattatgaataatcagtcagcgactatgaacacaaaagataatccgcttggatataaaaaagaatccactctgcttgttggttttgcaattccatgcattatttcaatgcttgtgacagcgctttacaatattgtcgaccagatatttatcggtcagggaatcggcatgcttggaaatgctgcgactaatattgcatttccactttcaacaacatgtacagctatatcgcttcttctcggtataggaagcgcgactaatttctcgctgtatcttggtgccggtgaaaagaacgaatctgaaaaatatgccggcaatggtattgtgcttatggcattgtttggaatatttctgttccttgtaaccactatattcttaacacctatgcttaaattctttggtgcaactaaagatgtacttccttatgcaaaggcatatacaagaatcactgcgtttggtttcccattcttaattgcaaacactggtatgagcaagcttattcttgcagacggaagcccgcgatattccatgatatctatgcttgctggtgccatagtaaatactattcttgacccattgtttatctttgtctttaacatgggaatgactggtgctgctcttgcaacaattacaggtcagataatttcattttcaatcagcctgcgttatatgtttcattttaaaacaattaaacttagcagggaaagttttattgtttctgctgcccactgtaagaaaatatttattcttggagcaagtgcctgctttaaccagattgcaatgaccgttgtacagattgttatgaacaatacgctgtcacactacggcgcacagtctgtatatggcggtgacattcctcttgcctgcgccggaattataactaaggttaatatgattttcatgtcatttgttatcggaatatcccagggaacacagcctgttataggttttaactatggtgcaaagaagtacgcccgtgtaagaaagacttatcttcttgcacttggtgcagcttctgccctgtctttaatcgcatttgcatgcttccagatattcccaagacagattatcagcatatttggtaacggaagtgacctgtactttaaattctctgaaagatatttcagaatatatatgtttctgacaattgttaatggcatccagcctgtaacttccaatttctttaactcaattggcaaatcacagcttggtgtatttatgtcgcttacaaggcagattattttcctgctgccacttatcattatatttcctatattcatgggaattgacggtgttatgtatgccggacctatagcagacgctgccgctgctatcgtatgcggatactttactataagagaattaaaagaattaaaaaagctggaaatcgatttaactaaatgttaaaatataagttatgcgtgtattcgtatatttaacggattatttttaaaaggatttttaacatggataattttaatgctcgatatgaaaaagaacttgcctatcaggaaattacctcgaataaatacactctttacggtattctgctatttataggagttgaattactgatatggcttcttaatataattggattttttgaacttgataaccagataatgtctgctgttataggttcatctattgtattatttatccccataatccttatcatgataaaaggagatttatctaagcctgcctacaaatacattgccatgactcagatatgtataattacaggaactataattacatttttatcatatcacgctattcttctgtatgttcttccgcttttatttgctggacattacagaaaacgttctgtgctatggtacacatatgtattaagtgtattaatgctttttgtaagttcgattcttaattattattacggaataatggataccaatctgcttattgccggaacacaccagcgcaaatggtatcttgaccttatagcaaacggaggaagctttacatataatgcaaatgctgtatttataatactaatctttgcatgtataccccgcagtatgatactgcttgtatttacattcatgatacagtatatagttaccgccagcctgcatgatgccgcaagaattgcccagcttacatatcttaaagaaaccgattctttaaccaggcttttcaacaagaataaatacaacgaaatggtatcaatgtattatcctaatgtaaataatattactgttattttctgggatcttaacaacctgaaaattattaatgacacttatggacatgaatatggtgataaagcactttccgcactagcttctgtattatacgcccattcagatgaacaatgccgccgtgtttacagatttggtggtgatgaatttgtcatgataattgataacccacatgacggtgaagctgaactaataatatctgctgttaaagatgaacttgtgaaatgcagttatgatatttcaatagaaatatcaagtgctgtcggtgttgcatccggcaacggaagtgatattattgaaatagtaaaaaatgctgactcagcaatgtacgctgacaaacagctctaccaccatcggtgattgtgaaatactgtatatgcgttgatttatgccgccagcttaactgctggcggttttttctgatttttggggatgggtggtaaatcatggctttatgagaaaaggcttcctataagaaaataaatatatctcatcttataggctgattttccctcttacgctgtctaaaatatggttttgaagttgaatttcctataatgttcatgattatagttactttataggtgcaatttacaagtaacatagtagtcgatgtgatttttgacctataaaggctttagatttacgactactgataggtatcatatgtttttcaatcaacagtcttaatatatcttcttctttttgttgttccaatacaggctaataactccttattcactaattcatttaatagttgtcttgttctatgaccttttaatccaatcttctctgctatttgttccgtactatattcaacacctatatccatatttgttaaaatctgtttgtgtcttgctgataaatctgacctattcatgttttttgaatctgctgatttttctgctaattcttcatcagattccttttccatcttcatcacaagcattatgaatttaataatgtatagggaagtaaaaacttcctcgtgtatcaaccacgaaaaagggtggtacccaaaagtaccaccctacagactataaatctatcctacatactctaaaaccgactattttctgccaagaatcttagacattcctgttgccacaaaaagatatacaaccatattaactactgatttaagaagaagtcctggtgccgaagctaatcctgctgcaaagctgcctgctattattgcaccaaatacaacatatcctaatgtcatgaaaagtaatgtaacaactgcaccaacaattccttttactgaaataaccttacatctgtcaaacttacttttcatattgccaaatattgcacatgctattattggcatgattgtctttattataagtgttggaactgcccatactgcaaatccagttaatatatctgccatcgcagaaccaattcctcctgcgagtgcgccaacaactggtccgaagaaaaatgcacatataagtattacgctgtctcccaaatgtgcatatcccaaaggaataggaatctgtaccaccattgttgcaacacatgtaagtgccataaatactgctgttatacacatctgtgttacagtaatatgaaatccttctttcttaatcccctgctgtactaactgtgtctgttgtgcttccattttatctgcctcctatatcaacatactttaattgcacataagaataacagataaagtgacatgtgtacattgtcattttgagttaaatttatatggtcagatttaaaatctattctccctcttctttcttaatcaattcatccataagttctttataatctgaggcttcaagcggaagttctacttttatgcctttgcatgctgaataataagcactggcacacaacatgagtgaattaatcccctcactgcccttaactgtcagataagactcatcacctttaagcaccgcatttgcaaaattttcaaataactgtgcatatggctcagatgccttctcgaactgtatagtttcctctgtaaatgtcatattctgccttgagttgacttcttcgttcttgatatactcacatacatctctgtgtcttgtaatggtgagcgtgtcgtcttccagaagaattcttgccttcgttcctataatctcaagtcgctcttcgtgacaggcttcgcctgtggatagtataaatgtgcctgtctttccattgtcgtattccataacgatagtagcctcatcatctactataaaatcgttgtattttccaaatggaatcgctgcaaaaagtttctgtggcattccaaacaggtactgatacatatcaagaatatgctgtccctgattgataagtgctccaccgccttcacctgcaaagctgcttctccatgagccagatttatgatagtatgaggttcttaaatatcgtgaattaataagacatactctctttatatctcctaattcaccattatctatcatctgcttaatcctgatgtatttagggtaaagcctctgatgaaatatcattccatatattctgccactttcactggcagccttctgcattgcaagtgcttcacctatatctgccgctgccggcttatcacatagcactgcttttccctttgcaaatgctttcaaagccagttctttatgagttttatgaggagttgctataataactgcatcataacatgattctcctgtctcaaataattcttctgcactcctgaatatccttgcattatcaccatcagtattaacaagtgactcgccccattcaataagttcatctcttcttataaccacagctgataatttcatatgtggaacttctcccgctgttatcattctggcatatttctttccaacacttcctacacctataagtgccacctttaacaattctttctgcataccatgtaccccgtttcattatattaactatgcaccacttctcctgtttccacagccttcttcagtaagatggcggcatacgcatctgcaagggcatcctccatactatatggcgcagacgcatttcctctgctatactctgccgtattcttcatcatcactgcgattgctgtttcatcttctgacagaccacacaatccaaattccggctcatatataattttattattaaatgaaattttcttaatttcacgaatcttctcaaaattaggattagagtttcctgtattaatcacatgggaatccgttatgattctgccagtctgaccttcattattctcatcaagataatatacacattcatcaataagttcgcctcttaccccctgaattttaagcgtattctttctgattggtgacctgtactgctccgaatcaaaatcataccatgccactttcccgctttcgaattcaaatgtggcaacgcatcttttctttcctgcaatcctgccatcagtgaacttatcatatcttgtaagagtctgcgttgtcgggaattcgtatgtcttggctgaaactgtatacttctctcccggcttaacaccaagaaaagctcttataagacttattccatgatattcatgcgccagtgacacatttgcacagctgacatcaccaataattccttcattaataagctttaatgatgctttaatattaggatactccctgtactgttcagcaaccacctgttttttaccacatttgtaataagaatacagtttattaagcgaatccgtatcaagtgccgccggagtctctgataaaacagttattccacggtcaagccattccattgaaacatcacatatagcgtccttcttaacagccacaactgcaaaatccggtttatatgccacgcattcttctatagatgtagttgtatgtatctgatactgaccggcaattaagtccgctttctcctgcgtcctgcaatacatcgcatcaagactgaatatttctggcagagcctttgctacgcgtacataatataaggcccgccagcctgagccgattataataaaatgatattttgccat

SEQ ID NO: 440 - DNA, 9550 bp, unidentified
  source 1..9550: mol_type = unassigned DNA
ttaataaatttctattattgttttctctttcacaacaccgttgtccaatgccgattcaagatatctgtatctcacccctgaagctattttgaagtgttccaagatcttatccagacgttgattaataaaagtacctgtaaagcaatatttctttaataatggattaacaatacggaactctacgtcaaaacgcttgctcaaagttcttaaagcatcttcaagaggagtatctcgataaatgatccttccacttttccaagcaatatcagattcaacaaaagtagttgtacacaaaagtttctcatccaataaattataaatcaccttctgtccgggttgcatactataagtaacctccctgcctttctgctgacaatggaattttactctacctgtcaccaaagtagcagctacaaacttatcatccggataagcatccacgttaaattcagtacctaaaacctctaattcaatcccctttcctacatcgactaagaatttccgtccattatccttttgtactgaaaaataagcttctccgagcaattcaacctttcgatattctccttcaaaagacactggatattttagataagaagcagaattcagccatacccaagtaccatccggtaactccacttttgtcatcatccccggattagaccgaatttcgacataacgatcataatttttatcttgattaaatacaaaatagaagaaagataagaataaaggaataaataacacagctgctgctcttatcccccattcccaccagtttattttcttcctttttgacaatctcttatccagcttcaccaatgcctgtttaggatctatctgcttcacggtatctattatatctgttacgtggtgtatgtaacaaatctgtttagctatttttctgttctcttcagagagggaaatccaattttctacctcttctttttctttctctcctagtgtaccggaaaaataaaggagtaaaagagcctcatctatattttcatgtaattccatcatcttttatgttcattttattaagaagacggaatacttcaattagcccctaaacaaaaatgcaacttttttaattaaaagctgcatttttattttaagactcaaaaacgaatcggctatccttagagaaaataagggaatatgattgtaatcaacggtaaatagtcttttagttctacacgtaaaagtctcaatgcttgctggatacgatactccactaattttatggaaacgtttaattctttcgcaatctctttatatgttttatcttgataacggctcatctcaaaagttatacgataggagtccggcaatcgcatcacggccttttctattttcgccatcaattcctccactacataaaaatcaggatcttcaaaacttgtctgcatttctttagcaaacatatgctcataacaacgtctttttgtctgattcttacttattaaatccaagcatctgtttctgaccgccataaacaaataacttcgcaaagaagtttctatgatctggaattctctgttttcccatagccatgtcatgatatccaaaacaacttcttcagcatcttctataggaatatagtacttcccgaaggcacatagtatggaataatacttcaaaaataaagtatcaaaagcctttctatctccttttctaaaaagagaataaagctcaatatcttcatctatcatacgatttgtctccttattcactttacaaatttatatatttaaaaatccctaaacaaacaattgcatcttttttaatagacaataaaaaaagtcagcacaaaatgaagcaataaagaaacaactttgttacatatacccacatatatcctgattatatcactatccctttctaaagtattttcacttttatgcaaaaaaactttggttttatgcatcttttctccaaaataatgcatacttttgcgccattcttagaataattatacaatgaagaagaaagcaaatcggttagacgccatcaaaatgattatctcaagcaaggaggtcggttcgcaggaagaactgctgcaagagttgaaccgcgaaggcttcgaactgacacaggccaccctctcccgcgacttgaaacaactgaaagtagccaaagctgccagtatgaacgggaagtacgtatacgtgctgccgaacaacattatgtataaacgctccaccgatcagagtgccggcgaaatgttgcgaagtaacggattcatttccttgcaattttcaggcaacatcgccgttatccgcacccgcccgggttacgccagcagtatggcttacgatatcgacaacaatgaattcagcgaaatactgggaaccattgccggcgatgatactatcatgttggtgttgcgtgaaggagttgcgacaagcaagattcgccagcttttgtcactcatcattccgaacattgaataactatacatatttatatatataaagaaatggacactcaacaaatagatgttatggtagccgacgcctcacatgaggtatacgttgacactattttggaaactatcagaaatgctgccgccgtgcgaggaacgggaatcgcagaacgcacacacgaatacgtagcgacaaagatgaaagaaggtaaagcaatcattgctctctgtggtgacacattcgccggattcacctatatcgaatcatggggaaacaagcaatacgtggctacctccggtctgatcgtacatcccgatttccgtggtttggggctggcaaaacgcatcaaacaggcttccttccaactggcacgcctccgttggccgaaagctaagattttcagcttgacctccggagcagctgttatgaaaatgaacaccgaactgggatacgtccctgtcaccttcaacgaactgacagacgacgaatctttctggaaaggatgcgaaggatgtatcaaccatgacatcctgaaagctaaaaaccgtaagttctgcatctgcacagctatgctgtacgacccgacagatccacggaacattaaaaaagaacaagaaagaaataacatttaaaagatacagcactatggaagaaaagaagaaaaaagtagtggtggcattcagcggcggactggacacatcgttcaccgtcatgtacctcgccaaagaaaaaggttatgaagtatatgcagcttgtgccaatacgggtggtttcagcgaagaacaactgaaaacaaacgaagaaaatgcctataaactgggagcggtaaaatacgtaacgctggacgttactcaggaatactacgaaaagagtctgaaatacatggttttcggaaatgtgctgcgtaacggtacttatcctatttcggtcagctccgaacgtatcttccaggcattggctatcgcacgttatgccaacgaaatcggtgcggatgccattgcccacggttctaccggagcaggtaatgaccagattcgtttcgacatgactttcctcgtactggcgccgaacgtagaaatcatcacactgacccgtgatatggcattgagtcgtcaggaagaaattgactacttgaacaaacatggtttcaacgcggacttcaccaaactgaaatattcatataacgtaggtctgtggggtacctctatttgtggtggtgaaatcctcgactccgcacaaggactgcccgaaacagcttacctgaaacacgtagaaaaggaaggcagcgaacaactccgcctgactttcgaaaaaggagaactgaaagctgtcaacgatgagaaattcgatgacccgatcaaagcgatccagaaggtagaagagatcggcgccgcttacggtatcggccgtgacatgcatgtgggcgacacaattatcggtatcaaaggccgcgtaggtttcgaagccgccgccccgatgctgattatcggtgctcaccgtttccttgagaaatacacattgagcaaatggcagcagtactggaaagaccaggtagccaactggtacggtatgttcctccacgaaagccaatatctggaaccggttatgcgtgatatcgaagcgatgttgcaggaaagccagcgcaacgtaaacggtacagcgattctcgaactccgcccgctttctttctctaccgtaggtgtagaatcggaagacgacctcgtgaaaacgaaattcggagaatatggtgaaatgcaaaaaggttggactgccgaggatgcaaaaggctttatcaaggtaacttccactccgttacgtgtttactataacaaccataaagacgaagagatatgattaaagcaggaatcattggtggcgcaggatatacggcaggcgaactaatccgcctgttactcaaccatccggaaactgaaatcgtatttatcaacagcagcagtaatgccggaaacagaattaccgacgttcacgaaggcctgtatggcgaaacggatttaacgttcaccgaccagttacctctggacgaaatcgacgttcttttcttctgtaccgcccacggagatacaaagaaattcatggaaagtcacaacataccggaaaacctgaagattatcgacctctccatggactaccgtatcaaaagtgacgaccacgactttatctacggtctgccggaactgaaccgtcgtgccacttgtacggcgaagcacgtagccaaccccggctgttttgcaacctgcatccagcttggtttgcttccgcttgccaagaatctgatgctgactgatgatgtaatggtaaatgctattacaggaagtacgggagccggggtgaaaccgggtgctaccagtcatttcagttggagaaacaacaatatgagtgtgtacaaagcattcgaccaccaacacgttccggaaatcaagcaatcgctgaaacagttgcaaaacagcttcgattcggacatcgactttattccgtaccgtggagatttcgctcgtggtatcttcgcgacgctggtagtcaagaccaaagtagcgctggaagaaatcgttcgtatgtatgaggaatattatgcaaaagactcctttgtacacatcgtagacaagaatattgacttgaaacaagtcgttaatactaataagtgcctgatacatctggaaaaacatggtgataagctattgattatctcttgtatcgacaatttgctgaaaggcgccagtggacaagccgttcataatatgaacctgatgttcaatctggaagaaaccgtaggactacgtttgaagccttcagctttttaaaaacagaagaattatgaatttattcgacgtatatcctttatacaatatcaacattgtcaaaggtgatggctgtaaagtatgggataaaaacggaacggaatatctggacctctacggaggccatgccgttatctccatcggacatgcacatccccactatgtagcgatgatcagtaatcaggtggctaaacttggtttctactcaaactccgttatcaataagctccaacaagaggtagccgaacgactaggaaagatttccggttacgaagactacagcctgtttctgattaacagtggtgccgaagcaaacgagaatgctctgaaacttgcttctttccacaacggacgtactaagattgtatctttcaataaagcattccacggacggacgtctcttgcagtagaagcgactcacaatccttctattatcgctcctatcaacaataacggtcatgtcacctatctcccactcaacgatgtggaagcgatgaaacaggaattgtctaaaggagacacatgcgctgttatcattgaaggaatacaaggtgtaggcggtatcaagataccaaccaccgaatttatgcaggaactccgcaaagcttgcagcgaaacaggaacgatcctgattctcgatgaaattcagagcggatacgggcgtagcggtaaattcttcgctcatcaatataatgacattaagccggatatcatcactgtagccaaaggaatcggtaacggctttccaatggcaggtgtcttaatcagcccgatgtttaaaccggtatatggccagttgggaactacttttggaggaaatcacctggcatgttcggcagctctcgctgtgatggatgtcattgaacaggaaaatctggtagaaaatgctaaggcagtaggtgattacttactggaagagctgaaaaaattcccgcaaatcaaagaagtgcgcggacgcggactaatgatcggcctcgaatttgaagaaccgatcaaggaactacgcagccgtctcatctatgacgagcatgtatttaccggagcaagcggcacgaatgtacttcgcctgttacctcctctctgtctcagcatggaggaagcgaaagagttcctcgcccggttcaaaaaagtactctaaccgctcatttgattaataaacagccaacgataaaagcagcctttattagaaatttatttcttattctggctgctttttgttttttcgtaattaactgttacctttgtctgtaacaactcattaaaaacaagcgtatatgaaaatagccattatcggtgcaggaaacatgggcggttcaatagcccgtggcctggcaaaaggaagtctgatagacgattcggatatcattgtatccaatcccagtgccggaaaactagagaaactgaaaaaagaatttccgggtatctccaccaccaacaataatctggaagcagccacaggagcagacattgtcatccttgccgtcaaaccgtggtttatggaatcggtgatgcgcgagttgaaattaaaaagcaaacagatactcatctccgtagctgccggcatcagttttgaagaactggctcattatgtcgtagcaccggaaatgcccatgttccgtctgattccgaacaccgctatcagcgaactggaaagcatgacgcttgttgccgcgcgcaacacgaatgatgaacaagacaacttcatcctccggttatttagcgagatgggaacagtgatgcttatccccgaagataaaatagcggcagccaccgcattggcatcctgcggtatcgcttacgtactgaaatacattcaggcagccatgcaagccggaatcgaaatgggactccgccctaaagatgccatgcagatgatagcccaatccttaaaaggagcggccgcactgattcagaacaacgacacccaccccagcgtagaaatcgacaaagtaaccactccgggcggaatcaccatcaagggtatcaatgaattagaacacaacggcttcacctctgctattatcaaagccatgaaagcttccaaataacaccatagaattattaatcataaaatactaaccatttgtatgaatgaacaaattaaacagatagcagaacgcctccgcggattacgtgatgtattggaactgaccgcagaggatatcgcccgcgatagtgacatttctgctgaagaataccggcttgcggaaacaggagattacgacatctctgtcagcatgttacaaaaaatagcccgtacgtataatgtagccctcgacgctctgatgtttggcgaagaacctaaaatgagcagctactttgtgactcgtgccggcaaaggtatcagcattgaacgtaccaaagcttataaataccagtcactggcttcaggattcatgaaccgtaccgccgatccgttcatcgttaccgttgaaccgaaagcaatcgacgagccgatccattataacaaacataatggacaggaattcaaccttgtcatcgaaggacgtatgcttatcaacatcgaaggcaaagaaatcatcctcaatcaaggagacagtatttattttaactctaaacttccacatggcatgaaagcgctcgatggcaaaacggtacgttttctggcagtaattatgtaacaacatcatggtagaaagatttttatcacagacctctttcagctcacaagaggacttcaacaagaatttgaaaataaacgtcccggagaacttcaacttcggttatgacgtagtagatgcctgggcagccgaacaacctgacaagaacgctttactttggacaaatgacaaaggcgaaagtcgccaattctcatttgccgacatgaaacgatctacggacatgaccgcttcttacttccagagcctgggtatcggccgtggcgacatggtgatgctgattctgaaacgccgttatgagttctggtatagcaccatcgctcttcacaaactaggagcaactgtcattccggctactcacttgctgaccaagaaggatattatctatcgctgcaatgctgccgacatcaaaatgatcgtagctgccggcgaaggaatcatcctgcaacatatcaaagaggctcttcccgaatgtcccacggttgaaaagttagtcagtgtcggtccggaaatcccggaaggcttcgaagatttccatcagggtatcgaaaatgctgctccgtttgtacgtccgcgccatgcgaatactaatgatgacatctctctgatgtattttacttccggcactaccggcgaacctaagatggtggcacatgactttacttatccgttaggtcatatcgttaccggtagtttttggcacaacttggatgaaaatagccttcacctcaccattgccgataccggctggggaaaagcagtatggggaaaactctacggacagtggattgccggagccaatatcttcgtctacgaccacgagaagtttaccccggcagctattctggaaaaaatccaggaatatcatgtcacctctctctgtgcacctcctaccatcttccggttcttgattcacgaagacctgacaaagtacgacttgtcttcacttaaatattgcaccattgccggagaggcattgaaccctgccgtatttgaaactttcaagaagctgacgggtatcaaactgatggaaggtttcggacaaacagaaacaaccctcaccatcgccaccatgccttggatggaaccgaaaccgggaagcatggggctgccgaatcctcaatatgatgtagacttgatcaaccatgaaggtcgctctgttgaagcgggtgaacaaggacaaattgtaatccgcaccagcaaaggtaaacctctcggacttttcaaagaatactaccgggatgcggaacgtactcatgaagcttggcacgatggtatttattacaccggcgatgttgcctggaaagatgaagacggatacctgtggtttgtcggtcgtgcagacgacgttatcaagagttccggttaccgcatcggcccattcgaagtggaaagtgcgttgatgactcatccggctgttgtggaatgtgccattaccggagtacccgacgagattcgcggtcaggtagtaaaagctacgattgttctatccaaagactataaagcacgtgccggagaagaactgattaaggaattgcagaaccacgtgaagaaagtgactgctccttataaatatccgcgtgtgatcgagtttgtagaagagcttcctaagacaatcagcggtaagatccgccgggtggagattcgcgaaaacgataagaagtaa

SEQ ID NO: 441 - DNA, 15986 bp, unidentified
  source 1..15986: mol_type = unassigned DNA
tcagatcgccacatcctgccactgtccgccgatcagttcgcgggtggatttgaacccggcctttttcagcagttcgaatgcttccgcacgtccgtcgttcaccaggtcgggatagtggcagtctgagtttaccatcaccggaatatccagctcatgtaagcggtgcagatagtcggtatgcgggtagacctcctgtttcttcacgaggtttttcgtgttgacttcgaccatcaggcccttttcggcgatcaggtgcagacagtcgttgaacggtttttgataccagtccgcttgcaggtcgaagccttcgcatttgtgcccgttcatgtatatcttgtccatgtgcccgacgatgtcgattccgcctgcctcgatcattcgccgtgtggaactgaaatagtgggcgaccagcttgcggatatctccgtcgtagtaggcgtcgacagacttctggtattcccggaaaggaccgtcgatacacaccatattctcttccgcaagcggctgtgcgatcggaagaaagtggatggaaccgatacggtaatcgagcggcagattgcggaagtaggggatggacgcgttgtagctttcgtctaagaaatcgatttccagtcctacgtatatttccaaccggtcactgtatttctttttcagtcgttctatttctgtcaggtattcgggcatgtcgtctttagacatgttccagaatgtttcgaacggcagtggtgaatgggatgaaaaaccgtaggcgcggaacccgtgcgcaacagcgaatttaatgaagtcttccggcgtgctccgaccgtcacagaatgtacaatggctatggtagttactgagttgcataaatttttacttgtaaaggggcaaagataatttttttatcccgaaagacaacctgtttgataaaaaaaggcttgattgctgcctaagggttagcggcagaatcaagccttgaaaaacacgtgaataatgaaaaatcgtatgttttattttattacgttcagttcttttccaactttgataaatgcagcgattgctttatccagatgttccgtttcgtggcctgcggacaactgtacgcggatgcgggcctggtctttcggcactaccgggtagtagaagccggtaacataaatgccttcttcctgcatcttggctgcgaaatcctgggataatttagcatcatacagcataacggcgcagattgcggactgagtcggcttgatgtcgaaaccggctgctaacatcttttcacggaagtagctgacgttgttcatcagtttcgtatgcaaagcatcgctttctttcagcatcttgaacatttccaggctggcacctacgatagcgggagcgacagagttggagaacagataaggacgggagcgctgacgcagcatgtcgatgatttctttctttccggttgtgaatccgcccatggcgccaccgaatgctttacctaacgtacctgtgaagatatcgactcttccgtatacattatattgttcagccacaccgtgtcctgtcgggcctactacaccggcagagtgggattcgtcaaccattaccaatgcgtcgtatttttctgccagttcgcagattttgtccatcggggccacgtttccgtccatagagaacacaccgtctgttgcgatgatgcggtgacgttgtgcctgggcttcttgcaggcaacgttccaggtcggccatgtctgcattggcataacggtagcgttttgccttgcaaagacgtacgccgtcaataatggaggcatggtttaaagcatcggagatgatcgcatcttcttcagtgaacaacggttcgaacagaccgccgttggcatcgaaacatgcagcgtacaggatcgtatcttcggttttgaaatagtcggagatagcggcttccagttgtttgtgcagatcctgtgtcccacagatgaaacgtacggatgacatgccgtatccgtgtgtgtccatagcttctttggcagccttgatcagacgttggttgtcagacaggcccagatagttgtttgcgcagaagttcaaaacgtcgcttcctgcgtttactttgatgtcggctctttgaggagtggtgatgatacgctcgttcttatacaatccggcagctttgatgtttgccaattcctgagtaaggaaatctttcagtttaccgtacataactttgttttttgttagtatttttaattaagttgacaattatatctctattatcgcagacaagtggcaaaatattattcttgaaaccatttttttctttgtctctgatttgtctgccgatgcggcaaaggtcatattttttttgaatatataggctaaaaaatacaagaaattcataccggaatgtttttattctctatacctttgccatcgaaaaaacttaaaagaacatcaaacgcaatgaagaatgtattagtaattggttctaccggtcagattggatcagagttaaccatgaagttgagaggtatctacggtggaaacattgtagcaggttacatccccggacaggagcctaaaggcgaactgctggaatcagggccttctgcaattgtcgacattacaaacgaacagcagattgctgagactgtgtccaaatataaggtagatacgatttataacttggctgcactgctgtcagccgttgcagaagcaaaaccgcagcttgcctggaaaatcggtatgggcggtttgtttaacgtattggaagttgcgcgtgaaatgcattgtgctgtattcactccgagttcaatcggtgtgtttggcaataacacgccgaaagacaagactccgcaggatacgatccgtaacccgcgtactatgtatggcgtcacgaaggtttcaggcgaattgttgagtgactactataatatccgtttcggtgtcgatactcgttccgtacgttttccgggacttatctcctatgtgacacctccgggtggtggtacgaccgactacgcagttgatatctattattcggctgccaaaggtgagaagttcgtatgtccaatcaagcagggtacattcatggatatgatgtatatgccggacggtctgcgtgcagctattgaaattatggaagccgattcgacgaagttcgttcatcgtaactctttcaacattgcatccatgagctttgatcctgaaattatctacaacaacatcaaaaagtatgttcctgacttccagatggaatatgatgtggatccgttacgtcaggctatcgcagaatcatggcctaactctttggatgacacatgtgcccgtgaggaatggggctggaaaccggaatatgatctggattccatgactcaggatatgttggctaaattgaaagaacgtttcaataagtaagaattaattttccgatcattagcagatcggtaggaaagaagcgactgcccggtgtcggacagtcgcttttttgtttggatcgtttttatccagtattgtaggctgtttcaatcataatgtgtctgttgtttgtgcagggaatgactaagtcaaaagtgtatgaaaaattatgttgtaaaacatgaaatggttaaatcaggttaagagaaagcttttttttgtggaaatattatgctgcataacataaactctctatatttgcactgtgtttttcatggtattagatttaaggttaacaatgaagattggctgtccgtgatggatagcctttttttgtttatacccggttgatgttgtttcctccgagaagcgatcattttatccgaattgcccgttcttatggtattcttgattatatttgtatatctgaaaagattcattgtaataaaaatatctttatatggaaatgtacaaagcaaatgacaaccggtatgccgatatggcttataggcgttgtgggcggagcggattgctattgccggtcatctctctgggattgtggcataatttcggcagtgtagatgtgttcagtaactttattcagattgcgtatgctgctttcgacaatgggattacacattttgatcttgccaataattacggtcctgtgtatggatcggcagaggaaaatttcggccgtatcctgaagaaaggtctggggcaatatcgggatgaacttgttatttccacaaaagccggatatgagatgtggcctggtccgtatggcaactggggaagtcgcaagtatctgatggcaagccttgaccagagtttgaagcggatgggattggaatatgtggatattttctattcgcatcgtccggacccacagacgccggtcgaagaaacgatgggagcattggctgacatcgtccgccagggaaaagccctgtatgtcgggatatcgaattacactgccggacagacggaaaaagcacttgccgtattgaaagaacatcgtgtgccttgcttgatccatcaagcgcgttattcgatgctggatcgcaggatcgaaccggacttgttgcctctgttgaagcaggaaggagtagggatgatcgccttctcgccattggcacagggcatgttgacggataagtatctgaacggtattcccgataattcgcgtgcggccaaatctacaggccatcttcaacgtgaacaggtgacggaagaaaaaataaataaagtaagacaactgaatgaccttgccaaacaacgcggacagacgttagcggaaatggcgattgcctggctgttgaaagacgaccgggtgacgagcgtcctggtgggagccagttcggttgcacagttgatagataacctgaaggcgttacaaaatacagccttttcagcggaagaaatacaaatgatagaaaatatattacagtaatatacactgataaatcatcatttattaatccaaacaattaatgaaaccattcttatatcaggttgcatcccttttttattctgaatacggggcggaagtgagccgtctggcctttgttttcccgaatcgccgtaccgggctgttcttccagaaatacttgtcggaagtatctgagaagcctcttttctcgccgacgatcctgacgatcaacgatctgtttgtacagttgagcggaaagcaggctgccgatcggatcagcatgctgtttaaactatatgatatttatttgagacatagcggttcttccgaaacgttcgacgagttcttgtattggggggaaatgctgctgaatgatttcgacgatatcgataaatacatggcagacgcccgcatgctcttcacaaatgtgacggacttgcgtgagatagagaatgattttagtttccttagccccgaacagattgcggctatccggactttctggtcttctttctatccgaaaggagatacgcccaaccaggagcaatttctggcggtctggcagattttatatgccctatataccgatttgcgggaagcgcttgccaccgaaggcaaaggatatgaaggtatgattttccgggaagttgtcgaacagatggagaaagacgaatgttgcgacctgccctatacaaaggttgtatttgtcggactgaatgccctctcggtggctgaagaacgtttcctttccgggttgcaaaaacggggaatagctgatttttactgggattacgcctctccgaaagtgacggacccagataataaagcctcttacttcgtggagcgcaatttgcggcaattcccgtcgcaattaattgaaaatggacaattgactattgacaatgaagatgacgacaaaaagaagatcgaggtgatcggcatcccttccggaatcggacaggcaaagcaagtgtgcagcattctgaacgagctttgcaaggaagacgaaatgagtgcggaagaagcgttgcggacggctgtgattctgccggatgaacatttgttgattccggttctgaatgccattcccgaacagatcaaacggatcaatgtgacgatgggatatccgttggccggtacaccggtcgcatctttgatggaatatattctggctttgcaaaagaatattcgttatgtggaccggaggccggtgttctatttccgggatgtcttgccaatcctgaaccatcggtatatctcgactacttctccggaggtggtttctaatctagtaaaagatatttcagaaaacaacaagatttacatatcgtatgacgatctgaataagacgccattgttgtccatcctctttactccggtgactgcggtggaaactttctccgattatttgattaacgtgttgcaggaactgaataaagctgttgaaggtggaaagttgaaagttgaaagtgtaaatagtgacacggagccactttcaactttcaactctcaactctcaactattaacgacatcgaacaggagtttatcttccattatttcgctacggttaaccggatgaaggaagtcatgcgggaggcgaatgtagagatgaaaatcgacacctatttccgtttgctgaaacgtgtgacggacacaattacgattcctttccatggtgaacctctttccggtttgcagatcatgggtgttttggagactcgtgcgcttgactttgaccggttgattatcctttcgatgaatgaaggaattttcccgttgaggaaagcggctaattcatttattccttataatcttcgtcgtggattcggtttgccgacatacgaacatcaggacagtgtttgggcgtatcatttctatcgtttgatttatcgtgccagccatgtcagtctgctttatgatacaagaagcaacggattgcagacaggcgaggttagccgtttcgtgcatcagttgcattatcattatgaggagccgatacagaataagctggttgtttacaatgtctcttcttccaagactcctgccttgcaggtagctaagacggaggaagtcatgaaccgtctggctgatttccggagtggcgggacgcgagcgatatcggcgagtgcagtcaatacctatctggattgtccgcttaaattctatttctccgttgtcgagggaatacgtgaagaagaggaggtaagcgagacgatcgaaagtaatgtttttggaagtatcctgcataaggtgatggaagaattgtatcagccattctgtggaaagatggtgacggctgatctgctgaaagcgatccgaaaagatacgcctatgttgacgggagcggttgcccgtgcctttgccgaaattttctttaaaacggacattgttcgtccactcaccggacaaaacttcctgatcggcgagatgattcgcaaatatgtggagaaagtgctggaacgtgacgcaaaacagactcctttccgttatatcgaatcggaaaagaagataaaatgcctttttccattgacggataaaagcaatatccagttgaaaggatttatcgaccgtatagacgaggtacgcgatgtcgtccgcattattgactataagagtgggggcgggacgacgcagtttacctctgtagaagctcttttcgacaaagcagatacggatcgttccaaagcggttatgcaggtctttatgtatgcatggatgtataacaggtcagttcagctttcaacagctattcagccgggtatctattatatgaggaccctcttttcttcctctttcgatcctggaatttaccatcgtacagaccggttcaaaacagaacaggttttggacttcgccaactatcgcacggattttgaagacagcctgcgaaattgcttggatgaaatcttcgacacagaaaccccattcgtgcaaaccccgaacggcaaagcctgcatgtattgtccgtttaaggatatttgcgggaaatagtatttttacagatttcccatatattcatccacaatttcattcaggaagcggttgaatggaagaagctttcgaaaacaatcgatggtttcttccatccagtccggctggctgaaaaaactgtcgggcttaatacctataacgctgaagtctttgtgccttaatatatgaccgtaaggagaatcggaggggaaaccggccgggaaaccggccgggatacgttttagcatgtccccttcgagtgacgggtacagagctttgaaggaaggctcttcgatgatggaaacaaattcatctatgttattgtatatttcacgtcgaaggactttcaatatttccggtttgggataccagataccaccggacagtacgcagtattccggttcaagatgaaagtagtaagctccccggatactatgacgtcctccttgagcaatacaggctgacatataagtcttgtaaggcgacttgtcgaggctgaagcggatgtcgcgattaatacggaacagacatttccgggcatccaatccccgtatatcaggatcaaatacgctgattcgttcgattaactcttgtacttcgttgataaaagcacagcgaagtttgtcatatcgttctctattttcatggaaccagacggtattattgtttcgtcgtaaatcgtctaagaatcggataatttctgcattcatattaggatattctttttttattgtatttcgtatctccattgtttcggagtcatctgtttcatctttttgaaatagcgattgaagtagggaatgtcggtgaagccgcattgccaggctatttcgttaatgtccttatccggaaagttgcggagtaaagtgccaacggcctctatccggtattcgttgatgaagtttgtaaacgttttgcctgtttcacgtttgaaaaacgagcagaacgccgttgtgctcatgctgattacgtttgcggcgtccgaaagagttattttctccttgtaatgctcgatgacgtatttgaagatcagttgcatgcgttgcatgtttttggtaatgccgttgaatgccgtttcctgcaaaccgatagggattaaatcggttgtggttccgatttgttgcaggatgcggatcaacatcagcatcctttcgcttgcattcaggaggttcatttcttctaagcaggatttgatttttccggctgtttcgcctgtcagaaggatgccttgctggattgccgataaccggtgagcggcatattcccattcggtaaaaaaagacaggccggtttgtagcaagtcgggattgaattgcacaactatgcatctccgttttccatcaggctcgcagctttcggggttatacatccaacaatgtggttggttggtcgggaccagtacgacttctccctcctcgaacggctccagaaagtcgcctatcatccggtagcctgaacctttcacaacataacatatttctatttcgggatgaaaatgaagaggcatttcgtctttcgggtacaagctggaataatcgtagcgtaatgaggcacaactatcttttttgatttgttcgaattttagtttctcgtgcatgtcggatgaactttctgataaaacacagtaaaattagacaataattgcataatctgcgacaattacacttaataattttgttgtttctttgcggccggaaaaacagaaagatagaattaggttatgaagaaaggtttgtatgcattgtcttttggcacatttgggctggggattgcagagtttattatgatgagtatcttgccggatgtggcggcaggatttgatatttccttatccgaagccggtcatcttatttcggcttatgcgttgggtgtatgtgtgggagcgccgttggtagtggtggtggccaggagttggccgctacgtacgatcttgctcgctttggttgggctttttgttgccgggaatctgcttatggctctgtcggccgattattggatggggttgtgtgcccggtttgtatcggggttgccgcatggggcttatttcggagtcggttcgattgttgccagccgtttggcggagaaagggaaaagcacttctgctgtagctattatgattatggggatgacgattgccaatttgttcggtgtcccggccgggaatttcctggggcactttctgtcctggcgtttggtttttgtgattgcagcgttgtggggtggcgtaacgatttggtttatccggaggtgggttcctgttttgcccgccctgccggcgacgaatctgaaagggcagtttcgttttttgagaaggccggaaccgtggatgctgattgctgctaccatgttaggaaacgggggagctttttgctggtatagctatgtcaatccgttaatgacggaggtgtccggtttcagtgtcgggacaatgcctgtattgatgttgctggcgggtgcgagcatgtgtgtcggtaactatttgggagggcatttgtctgatcgttttacacctggtatcgtagcgatgtccatgcagtttctgatgtttgcatcacttctgctgatttatttttttgcttcgtacggctttttgtccgctttgctgatgtgcgtttgtactggttgcctgtttgcagtttcttctccacagcaattgttgttgcttcaatattctcctggcggagagatgatgggcggggcgatggtccagcttgcttttaatttggggaatgccgtgggggcttattttggaggattgtcgatcgaacatggggcagggctggaaagtacggcattgatcggttcgttttttgccctgttaggaactacggtgtttctggtattcaactatatggtgtttaaacctcagaggaaattacttttaaaggggggaatataatttccgaggatcaagacggtgtttttggacatagaaacagccgtccgaaatcgggacggtgtttttggagataaaaaacagccgtccgaaatcgggacggtgtttttggagataaaaaacagccgtccgaaatcgggacggtgtttttggagataaaaaacagccgtccgaaatcgggacggtgtttttggagataaaaaacagccgtccgaaatcgggacggtgtttttggagataaaaaacagccgtccgaaatcgggacggtgtttttggagataaaaaacagccgtccgaaatcgggacggtgtttttggagataaaaaacagccgtccgaaatcgggacggctgtttggatttataatgtctcttgtttcagttgttcgacgaaacgatcgattcgctgtagttctttcggaatatcgattccctgcggacagtgtggattacattggttgcaactagtacaatgatccgcttggcggagtttcggtacactgcggtcgtacccgatcagataagcccggcgagcttcgcggtagttttcatcctgtccgctctgagggacattcccctcgttcacacatttattataatgaagcaaaattcccggaatatcgataccgtaaggacaaggcatacagtatttgcagtcgttacatgggatggtcggatactgcatcatcaagtcggcggtgtcgaacaagaaacggttttcctcttccgtcaacggttgcaacggacagtaggagcggaggttgtcttgcaggtgctccatgtaagtcatgccgctcagcacggtgagtacgccaggaaacgaaccggcaaaccggaaagcccaggaggcgacgctccgtcccggttcgcgttgcttcaggcgggcgacgatatggtcgtgcacgttcgaaagccgtcctccgaggagtggctccatgatgatggcgggaatcccccgtttctgtaattccccgtacagatattccgcatcggtgtttcgcgggttgatctctttggcatgtttccagtccaggtaattcaactggatctggacgaaatcccattgatattcgtcgtgtttcgaaagtaaataatcgaacacctctatatctccgtgataggagaaacctaagtttcggatacgtcctgccttgcgttcttcgagcaggaagtcgagtatgccgttcttgacataccggttttcataggcttccataccacccatgccgatcccgtggagcagcatataatcgagataatcgacttgtagctccttgagcgaattgttatacatcgcgatagaggcttcgcggctccatgtgtcgggagagaagttcgaaagcttggtggcgatataatatttgtcgcgcggatagcggctgagggcgatccccatagcatgttccgaacgtcctttgcaataggcgggcgaggtgtcgaagtagttcacaccgtgctcgatggcatagtcagtcagccggttgaccatctcctggtcgatttcgtcatcgctgtctcttgcgctgcttttggcaatagtcggcagacgcatgcatccataaccgaggatggaaactttgtcttttgtggacggcgtcgtgcggtatgtcatccggtccgtgggaataggggtggagcttcccgaacctgaggccatcccgctgtccgaactgcacccggagagcaacggggcggtagttgccgtgctgattcctacaatcttcaggaaatcgcgacggtttatcgcttgatgattgtctttttccatatgtgatgattcttttatttcttgatcaaatattccggtgttgttcgtgcccttccacataaatggcgctgaacggacgcgacgggcacaggttttcacaggctccgcagccgatgcatttttcctcgtttacgaccggaagttgaggcgaatccgggtcgttcgggtcttttgccaccatcaagatcgcctgggtagggcaatggcgggcacagttgccgcaagtgacaccatcccggttgacgatgcaattttcctgaatcagtacggcatgtccgatctggatggccgttttgtccgctttcgtgatcggacggatcgctccggtcgggcaaacttccgaacatttgacgcattcgggacgacagtatcctcgctcgtacgatacttctggctgcataaatgtttgaaggttccccgaaggacgcagcacatggttcgtacaaaccgatacacaaagctggcacgcggtgcaatgctgggagaaattggcagcgctcagcgaacccggaggggtgatcggggttgtccggtccggtttctttttatcttcgatgatggccagtccgccgtcgactttcttgtccgggagttgtactttttcttgggctttcaatgcggcagaagtggcaagtaatgccgatacggtaaagaacttgcgacgatcgggcttgtctacgaccggttggttggtctgtgtttcagccttgtttgtttttctgcgtgtatatcggatggctccttgtcggcatttgtctatgcagtccatgcaatcgacacagcggctatagtcgatctcgtgtactttcgcattgatacaggctgctttgcaattacgggcacacaagccgcaaccattgcatttggacgtatcgataaccggtttgaaaacggaaaaacgggagatcaatcccaaaaacgttcctaccgggcagatcgtgttgcaataggttcgcccattccgccaggcaagtatgatcagtataatgaaggtaactgtggcaatgataaaggttgggaggctccgtagccagacttccgtttcgtagaaagcataattgtctgcccgttctgccaagtaggccagaaagttgtttccccattgccagaggggtgcgaataagttagaggcgatacgcccgtaagcgctgtaaggtgcgatcaatgccgcccatgctcctaacccgctgatcatggcaaggataaatatcaccatggctccgtatcttaaccaggacaaggcgggggaataacggaaacggtttttcttccgtttccccgccagccatgaaacaacatcctggaatatgccgagagggcagattacagagcagtaaacccgaccgaaaatccaggtcaatacaatgagaaacagtaccacgccgaggttgagtgccaataccgccggcaggaactgtactttcgccaaccacccgaaccatgcatgcaacgtccccgtgaaatcgagaaacagtagggttacaagcgtaaaacagataagtgcagttgtaagtctgatcgttcgcaacataataaactctttttagatagtctgttattttatgttgcaaacataataaaaggaaatggtttgcaacttacacgaattacggattgatgtaccaatattacggttttgtcaacttctgcaaaaagtctggctgacaaaccttagaacttcaggcaaggccgtccgccaataggtccagctatggccgccgtctcgtactcggaattcatgcctgatccctttctgcttcatgacctggtgcacctgcatgtttccgtccagcaggccgtcgtcatcaccgcaatcaatgtaataacgaattttgggcaagttgttttgattccagtcggaaaggatcttcaagacattgttttgcttccagtgttcgtctcccggcccgaacaggcggttgaataaatccttgtgcgatttgttttttcttgcctccatgactgtgtcgtcgaaaacggcggcactcaacggagcacatgcgcagaacatgtccggatgatgcaagctgtacaggaatgatccgtagccacccatcgacaatccggcaattgcccggctttctttgtcactgcggatccggtatgttttttccatataggggataagttcttcaaaaaacatgtcttcgtaaggtacttttccgtcatactggttgatataccaagtgtcccatgcgtccggcatgacgattatcatcggcacggcttcctcgtttgcgatggcacggtcggcaatcgttttcatttgtcccatctgtatccagttggtttcattgtccgtgtaaccatgcaagaggtagaggaccgggtaattccttttcgaggtgttgtagtcggaaggcaggtagatggagtaggaaactttcctacctaatttgttactttcaaaagagagcgattcgaaaactgtgctctgcgaatatcctgccatattgagtagaaagcacaggataagatggaggtaaattttgtttttcatatattattaataattagatttgcttgtctggacaaagtagaaataagagaagagagtttgtctgaaaacttattaggtttcgacatactctctttttcttatttggaattaatctgccatcggatagggaaattcggtcaaccctttgtacatgaattgataggtcggaacttcgattcccaattcttgggcagttcgtacgacatagcctgtcaatgtttccacttcggtgcgattgcttttttgaaaatcactgtgcatggaggttgtggagttgttaggcatgatcttctgggcgtcgatggcggagaatacttgaccgtccggcagacggatccctttggcttctgccacgcttttgagttcataacctaatgtgatgaacagatcgatatggttatttaccacttcgccaatcgtttcattgaaataggaggtgatagtggcggcggtcgagatcatgaagaatttcttccagatttccaagtcaatgtcatccggtattgtggtaaggatacgggcgttggccaatatatcctgtaagtctttctgtcgtttcttgtttccttgtttacttccgaagaacatccggtcctttatggtgaacttttccactcttcccggtctgaccaagcgggaaccgatgtaaacgcatcctttccaaacctcattgttcggtaatagcttttgtatgcgttccgctatatccgctccgttcagcaggggaatgataaccgtattagggccgatgatcggagtcagctgaactatattctcctccaagtcgtagcttttggtacagcaaaacaggtaatcgactggtcctatttcagcaggattgtcggttgcgagggttggttttgctttgatcgtcaggaatgtatttttgacttcgatgccgttcttacgtatctcttccagattttcaccccgggaaatgaaatagatgtcaatatcttcagagtctttgtaacgggcagctaatagtcctccgtagtagccgcctacagctcctataccggaaatcgctattttagttttattcat

SEQ ID NO: 442 - DNA, 10382 bp, unidentified
  source 1..10382: mol_type = unassigned DNA
ttatttgccccgctccgccatcagcaatgcgatttcctgctcgttgataccgaccatcgcttcgcccaaatcctcggaaagctctgcgagcatttccgcatcgttatagttggtaacggctttcacgattgcggcggcgcgtttttcgggattgcccgatttgaaaatacccgagccgacaaacacgccttccgctccaagctgcatcatcagcgcggcgtcggcaggcgtcgccactccgcccgcggcaaagttgacgacgggcagcttgcctttttctgcgacatattttacaagcgtataatccacctgcaaatcctttgccgcctgatacaactcgtcctttgacatcgttgtaagcctgcgtatctcgctctgcatcattcgcatatgccgcaccgcctgcaccacgtcgcccgtcccaggctcgcccttcgtacggatcatcgccgcgccttcggatattctccgcagcgcctcgcccaaatcctttgcaccgcatacgaacggaacgttgaattgcgttttgtcgatatgatatttatcgtctgccggagagagaacctcgctctcgtcgatataatcgatctcgatcgcctgcaatatctgcgcctcggcgaaatgcccgattctgcacttggccattacgggaatggaaacggccgcctgtatcccctttatcattttcggatcgctcattctcgaaacgccgcccgccgcgcggatatccgcgggaatacgctcaagcgccataaccgcgcacgcgccggcctgctccgcaatcttcgcctgctccggagtggttacgtccataatcacgccgccctttaacatctgcgcaaggttcttatttagttcgtaacgttttttatgagtttcttttttcatgatagtgtcgttctccttgactttcgttttcgtttattatatcatttatctgataatgcgtaaataatcagttttggagaattttataataccagatgaactatcatattgaaaaatccaaaaagccggcttatattcagctttacgaacaattacgccgcgatatagtcgaaggagtttatacttataaaagcaagcttccttcaaaaaggatactcgccgaggaaacgggcgccagcgtagttaccgcggagcacgcatacgcgctgctgtgcgaagagggttacgtcgactcgaaagagaaaagcggatactttgttatctttcgggatacggatattttttccgttccgccggataacgaggcgatatcccctgccgctgctttcacgggagatctcgtacagactttgccgttttcgacaatggcaaaaattatgcggcggacgttaagcgaatacggagaacaaattttttccgtatcgccaaacggcggacgcatggagcttaagactgccatagccaaatatcttgcgcgtagccgcggcatacacgccgagccgcagcagataattataggctccggcgcggaacatctttacggatttatcgccgaaacgctggggcgcgggcgaatttacggcgtggaatatccttcctatgaaaaaatcgaacaggtttaccgcgcctgccgagtcgaatacgaaagcttgcctcttggcgcaaacggcatcgaaagcgaggctctcggcaggtcaaaagcgtcggttctgcatattaccccctatcgcagctatcctagcggaatcactgcctccgcctctaaacggcacgaatacctgtcctgggccaatcagtcggaccgatttattgtcgaggacgattttgaatccgaatttacggtttcccgtaaatcggaagacactgttttctctcttgcgaccaatgaaaacgtaatctatctgaacaccttttccaaaacgatttctccgtcgatgcggttgggttatatggttttacccaaacaactcttgcccgtttacgaaaaaaaactgggattcttttcctgtaccgtcccgacctttgagcagcttgtcgttgccaagcttatttcgagcggagaatttgaaagacacataaaccgcatccgccgactgaagcgcaggatactgtcgtctgaaaaagccgaccagacctaaccgccgcagcccgcgtcttttattccgctcggaacaatcttcagccttaaagatttcgcggtgaaacgccgttgcagctcgcttttccgccgctttttgcaaagcattatttatcgcagtcattaagcaagacagctaaatattttatttttattacggattcctcgcatccgtttctgacgcgccggcccggattgtcacgctaaaataaagaaccgcagacaactcctttggtttcaaaacgttatctattgcggaataaatagaaccggtttaaccgctaaaaaaccgtgtcggacctatcaaaagttcaacccagtcccgcttggcagaagcagtataaatcacttgattttatctaacgtctctcaaattgacagaaaccacaataatcgtgtttaaaaacacaaaatacactataaagagtgtgttttaaatttaagtggataaaaacgctaccctcaaaaccgagcagaaggattgcagattgtggactttcaaacgcgaggacaagggagtttactgaggagtaaacaaccgaagtccgagacgtaaagaaagggcgcaatatgcgcacttttcctaggtttgacagagcgtgcagaaccttagctgaacactctgaaaataaaaaactgtattgaatttttggtgttcaacacagtttcacttgggtttagtagataaaaatgctaccttataacatattttttacataaaataaagtcgactttttctatttctagaaaatgtcgactttttatcgtggcggagagatggggatttgaaccccagtacgggtatcagccgtaacacgatttcgaatcgtgcgcattcaaccgctctgccatctctccttaacgcgacgaatccggcgaaaaatgccgccgaaaaccgctcctttatttataacacaaaaataaaggttttgtcaaacaatatcgacttgattgtactacaaaagtacttttccgtgccgccgtacgcaagcagcgcaacaaagcaataaacctgcggctccgctatcagccgcgtaaatttcggtttttctccgcaaaataatcaaagcggtcctctgcgatgcgctccctgatccgctcgaaatatcttgaatcgtttttgactccgcgttcgattttcatttcattttccagtattttacgataaataaaccttaccgttcttccgttaaacccgctcatattaaatccgtttccagtctccttttcgttataataattatataactttataacgttaaagtcaataatataagtcgggcgtacaggtcgtatattaacgtaaaatgtcgaaaaacgatgtttttttgaatttttcccgtttaatgcttatataaaaataacaagcatgcttttcaacgcgtctcacacgcggtattcgtaaacataatcgtccataaaaaagccctcgcctatatccgttttaaccgaatcgatttttttaaagccgaatttttcgtaaacttcgaccgcgcgcgcgtttctcttattgacggtaagaaaaacccttttcagctttctcagcacagccgtttttgcggcaaaattcaagccggccgttccaagtcctttgccgcggtattcgggcgacagataaagctttgaaagaaataacgcgccgtcggacgtaacgcaatgcgcggtgtaaccggcgcgcttgccgtccgcagcgataaaataatattcgtagccctcctcctctgtctgccggataaaggccgcgcgcgactgaaaacgcccgagcatataatcaacctgctcaagcccgatcagcttgtcaaacgcatcatgccacagccggcgggccagcctctcaagctcggtaaaatcggatttatccgcctttacaaattcaactttcatcgcattcctccgtttaacgcgaaaaattccgccctgcgctaagccgctcaataaccgcgcttaacgtgccgcgaaatcaattatttctgccgttttgtacaagcctgacgccgcaaaatcaagctgtccgcgatttcaaaattcagatttcgatcgcaaccttcattactccgtcgcgcctgttttcaaaaagctcgcaggcttccgccgccgctgacagcggaaacgtgtgcgtaataagcggcgccgaatttagacgcccctccgatattagccgcagaatttccgaacagtcgcagccgtccacgccgccggtcttaaaggtcaggtttttgccgtacatttcgggaagcggcaaaacctgaggggaatcatacagggctatcaccgtaactacggcgttgggacgggcgcactgccacgccaaacggaaggactcgtttgttcctgccgcctccagcaccgcgtccgcgccgccgcggtcgctagcccgcaaaatatctgccgccgcctcgggactgacggcaagcgccgccggataatgcctgcgcacgaaagcaagcctgcgctcgtcggtatcgcagatgattatctttttcggatttttaagcattacgcatagcagcgtgcagattcccgcaggtcccgccccgataatcagaaccgtatcgtccggcgttatttccgcaattttagcgccccagtagcccgtagccagcacgtcgcccgccagtaacgcctgtctgtccgataccgaatcgggaattttacttaatcccgtatcggcaaaggggacgcgcacatattcggccagtccgccgtctatgcggcagccaagcgcccagccgccgtttttatcgacgcagttgtttacgaagccgcgcttgcagaaataacattcaccgcaaaaggtttctacgttgacggcaacgcggtcgcccggtctgagtcctttgacgccgcttcccgtttcggcaattactccgaccatttcgtgtcccagcgtaacgcccggcaacgcgcgcggcaccgaaccgcgctttatatgaatgtcgctgctgcaaatgcttgccagcgtaaccttaactacagcgtcgcggctatgcagaatatgcggcgccggtttttccgcaaatccgaattttcccttttcaagatatgtaaaagcacgcattttttacctccctcagctttccttacaagccttcagaataacagttccttccctgatataaagcgtctctacgcgcgtaaatccggccttgaacaaaagctcggtttcccttctcaatgtcagcggaatatctatatgcactaacgctccgccggcaacccggctttttttgcgcctgtactcgtattccgccctgcaaaggcgttcctcctcgtcgcagcaggcgatataatcgcactgaagatagcttccgcccggtttgaccgcgcggtaaattttttcaaaaatcctaattttatcctcatacgtaaagtgatgcagcgtttcgacggaaataaccgcgtcgtataattcatcgtcaaacggataccggaaataatcgtctttgataagtcttacgtccttatccggataattgccgcgaagcttatccagcatttcggccgacatatctacgccggtgacggccaagcccggaaacctgcggaaaacgtacttaagctccagtcccgtgccgcatccgatatccagcagcgaatttataccggcgtccagaaaatcggccgcatgctcgtaaatttccggaaaattaccgagatgcacgctttcgtactcgttgattctggcggcgaaaaactcggccatgccctcgacgggagcctttctttgttctttaagccggcgtctgagccgtttcagatattcttttgtttccttatcggtgcgtattacgcttttaagcataaataagactcctcatctgtccggctttcttttgacggccagcagtctcatgtaatccccgaacgcttgttttcccgacggctgaaacataaccagcttgccgccgcggtagtccgcagccgcttcaagctcctttacggtcgcctccgacagcgaaggacgaagctcctctattttttcaaattcctttgcgctgaaggcaatcaaaagccccaaacgcagcttatccgcgtaaacggcgcaaagtcttttgccctcgcagcggtatttatactcgcagctccagccctttcctccgtaaccaaaagcggcctcgttaacgtatttttcgcaaattgcgccgtccaaagcctgaaatacgccgtacagccgctcgcccagcaacgaatataaaatccttttatccaatatatccaacggcatgataaaaactccttgctgtcttttattatatcatctgcgcgcgataaaatcaataaaacaagcccggtgccgcccgccgttttcttccgttttaaatcgtgagtatcgctgcccgttccgctcccggcgcagtccgcagcgcttcgaattaatgtaaaattaaataatattcgcgtattttccggtcaaacccttgacaaaaccaccgacttttattatactcgtatatgctacttgaaaagctttgtcgtcggggtgtagcgcagatggtagcgcgcatggttcgggaccatgaggtcgtgggttcaaatcccgtcactccgaccaagataaaaagtcgacattttctgaaaacagaaagtgtcgatttttctttatgtaaaaaatatgttataaggcagcatttttatccgctaaacccaaactgaggaaaagggcgcaagacgcgcccttttttcatgtctcagtcttcggtcatttatgccacagtaaacctcctttgaaagaacgcaatctgccgcccttccgataggttggaaagcatttttccaccaacgcgattaaacagtacgaataaactgtaaaacgccgtaaatcagaacgatttgcggcatttttctatcgttcaagaatgagcgtcttgaaatccgagattgaaaaccggacaaaagtatttttttaagactgtttttgccctctttttaagagaactagttttatacccgcatataaatttaaatcagtttttatcatagctatcagaacaaaaaagcaacgcaacaaaaacttcgttgcgttactatatcaggtcggcgccgaataaaacttaatgacgcggctgaaactcatacggcttacttcgcactcggattaaatcggagtcatattcggccattgtatgcgttgctcacgattgattataaggtttttataatggcgcgccataataccaaaatttaatgacttataatttttgcctaaagttttgattcaatgttttgccgttttcatttagtccctttttacagttgtatttacaaccgcagtatagcataattctaaaaaatttcaaagcgtttagggttgtatttatgtccttatgtacaaaattatatttgatagaatagaggtgtaaaaacaaccataggagaacgtatgaaattaagcacggcagtcgcgttaagagtaagcaatattctgcgagaaaagaatatgtcgcaataccgtttagaaaagaacatagcgatgccgcacaatacaatgaaaactctaatgggcgaacgaaacaacagtgttaatctaaaaaccgtaatgcaaattattcgtggtcttgaaatgactacggctcaattttttgacgatccgctatttgaaaatcccgatttagaaatagactgacgccatatcgcaaataaaaaagaaaccgcaagctgtattacaaaatctaataagcattgtctgccgaaaaaatcaatcttaaatttaatgaatacaacgtaaatttacaggcaatgcaaataagcgtcagcgaatagcaatatcaataaggatttcaggtatactatgttagatttattagacggaaaaaagatttacgataaaatcgacgctctgcgattagaaaaagggtggactatttatgagcttgcaaagaaagcgggagtagcgcccacaaccatttataattggcgggacagagcgtcctcgccttctttatatttattagaagcggtatgttctgcttttgggataacggtaattgattttctattggatgaagacgagcttttggctcttacggaagaacagaaagaagtgatacgattgtggaatacattgtctgccgaaaagaaaaaatccgtcttaaatctaatgagaacaatgtaaaactattgaatttaaagaattatcccatacgggtttatccgccgggttattatttttttcaaagatattgtttgcaggtttacttacggttagtttagttacttttttaaatcaacttttttgtacgattaaaaacaggcaaaaaaacgttttgcctgttttttgttttggaattttcccctaaagtcgtatccctagcgctttgcttgctgtttaggaagaaattttttctcgattgaattatcgccggccgtcggcaaaagccggatatttcaacaaaaatacgcgcggccggtttaggcgtaagctgcggcagcataacgaattcattgctttacagtcgccttaaagcccggattaacgcaatttccgcgcgtttggcgtttttatttaaaccttgcagcggccgctcaagcgttttccgacgaaattatgtcgattatctcgcgcatatccgttactacgtatttgcaggcggaaaaatcgctgtttgcggcggttgccgtgccgcggtaaccgatgcacgggatttgtgcggcggcggctgcgagactgcccgtcctggaatcctccactacgaaacagcgtcccggctctgcccctagcttttcagccgcgataagataagtgtccggcgcgggcttcgggcgcggaacctcgtcgccgcagacaatcgtacggaagcagtccgctataccgagaaattccagcacgccggaaacgtactctctcgaggacgcggagccgacggcgacagaaacgccgtttttaccgagaaatccgagcagcgcggaaagatttctgctttccggcagatttttttccttaatcaaattaagaacttctcggaattcgccggccacaagctcctttggcgaatcggccagaccgtaacgggatttaaaatccgtccagtaatccagctttcttgcgcccagcactatctccttttcagccgacgcgggcacgcccaacgccgcaaaaaaacgcgcgcgggctaaagtatgcagcggctcgctgtccaatattacgccgtccatatcgaaaagcacggcctgagtctttttcataagttcctcctgacaaaatacaaccgactaaaatcacggtatttacaagaagcgcgtacctaaccctagtccccgtataataatatttaaggctttacgggcggataatatatttgcccagcgcgcgtttttcgggcgaagaaagtatttccttcagttcctcaagcggcgcgacggcggcaaccatacccgaaacgtccaaagaccgcgcgtttatcagattaagcgcgcgcccctgcgtataaggattgacgtacgacgctttaagcgtaatttcccgcttgaaaatttcaaacggctttatcgcaagcgcggcgtccggcgccgtcaggccgaacatcataaccacggaagccttaccggcgatatctatcgcctgcgcgattgtagaggtctgccccacgcattctatcacgcaggagagacggctgattccggcgcggcgtatttccgctttgacgtccgtgccgaacggatccagcgtcaggtacgcccccagacgggccgcctcctcgcgcttaacctttgacggctctatgagcgcaacccttgccgcacccgcgcgcatggccagctgaagcatgatcagccctatcattccgccgcctatgacggcaacgtcgtcgcccggacggatattgcacatgtcgataccgtgcagacagcaggcaaccggctcggtcatcgcgccctcctcaaacgaggtcgtatcctccagtctgtaagcctgacgcgccggcacggcaacgtattcggcaaagcctccgttgacggtagtgcctatccccgtcatatcggtgcagaaatgtcccagcccggacaggcagtaagaacattcgccgcacaaaacgttgggatcgacgcataccctgtcgcctgccgtaaagcccttgactccccggccaatttccgttacctctcccgcaaattcatgtcccaaaacggtaggcggacaagtttgcgccgcgccctcgtcgcccgaaaaaatatgtacgtcggtgccgcaaaccccgcaggcgcgcacgcgcaccaaaatctcgccctccttgggtacgggcttggcgatgctctccaccctgatatcgcccttaccgtaaaaaaccgccgctttcat

SEQ ID NO: 443 - DNA, 17142 bp, unidentified
  source 1..17142: mol_type = unassigned DNA
gagatcggtctcggcattcctgctgaaccgctcttccgatctatacaaaaaattaataattatacggaggttgcacaatgtattcatttgatgaagttttaaattacgaccctgaagtagcgaaagctatggaggacgaactcacaagacagagaacacacattgagcttattgcatcagaaaaccttgtaagtaaggccgttatggcagctatgggaagcccgcttacgaataaatatgcagagggttatccgggaaaacgttactatggcggatgcgaatatgtggatgttgttgagactcttgccattgagagagctaaaaagctctttggctgtgagtatgcaaacgttcagccacactcaggtgcacaggctaaccttgcagcattctttgcaatggtagagccgggcgacacagttatgggtatgagccttgactgcggcggacatctttcacacggttcacctgttaatatttcaggtaaatatttccacattgttccttatggtgtaacttctgaaggttttatagattatgatgaagtgttaagaattgcaaaagaatgtaagcctaagatgattattgcaggtgcaagtgcatatgcaagaacaatcgatttcaagaagttcagagaaatctgtgatgaagttggtgcttatcttatggttgatatggctcatatcgcaggtcttgttgcaggtggtatgcatccaagcccgattccttatgctgatgttgttacaacaacaacacataagacacttcgcggaccaagaggcggcatgattttaagttcagccgaaaacgcagataagttcaagttcaataagtcagtattccctggtatacagggtggccctcttatgcatgtaattgctggtaaggctgtatgcttaaaagaagcattagatccaagtttcaaggtatatgcaaagaatattgttgataatgcagatgcactttgcaagggtcttatgaacagaggttttgatattgtttcaggaggaacagacaatcaccttatgcttgtaaatcttattaataagggtgttacaggtaaggaagttgagaagcttcttgatgctgcaaacatcacatgtaacaagaatacaattcctaacgatcctgcatcacctttcgttacaagcggtatccgtcttggtacagcagcagtaacaacaagaggattcaatacagaagatatggacgttgttgcagaagcaatcgctcttcttgttgatgatgttgaaaagaatcaggcaaaggctatggaacttgttaagggacttacagacaagtatcctctttatgaataattcaatttcatgaataattaaataaaaaattgtataacacatacataacaacaagccgcaggacagataatgttttgcggcttgttgttatataatttacgcgtgtaacgagccaaagtccgtgcttgcacgagaccttggcgactgccgcgataacttgagaaacttgcggagcgtgtttctcatagttatggctttgtgttgcttattgtaaagattggggggggactttgtattaatttaactgaaaaatacagatatatttaatgaattacatgaaagatattataaaattaaatgatttttaataaatataaaaaaattattgaaataatataaaatatgcttgcattaataaaaagattatgataacatcaatttatagcatagattcgtggaaaggggaaggatgttaataaaaatataatttggggttatataaaattctattttattaatgttattgcaaaagtggcaaaaaacaaaagagatgtgttatttgataatttatatgtgcgtgctatagattatcgataatttggggtttgtgaattggtataatctgtataaattgtgggatgatgcatttctacctaaaaaggagaaatttgtatgaatttaaaaaagacaataaaagttatggggatagctatagcatcgcttatatttgtttcagtgccggtatcggcatctgttggaaattaccattttgttttatatggagatggagaaaacagtggggttactgattgtcagactaagcctgatgattatgattatgcatttataagagttacagattcgaatcttattgattctgatgaatgttacatgagcattttgtctagagattacagtgctcttacgtcagaagttaatatggttgaagccggcaacccgtgtcatccgaggtatgatttaggaaccataccaggagccggaagtgagtgcagactcaaaggggttacatataagtatgatgtaactattgagggaagatgggaaacttaatggatgattaggatatgcacgttttgtgcgtatactgatttgtattgtttgtgtaaattaaaattagtttggatgcctgtcaaggtatccaaactatatttggaggttaataatttgtataataaaagaatatttttatatttttgcattatactaattttatttacctgttcagggtgtgcattttttccagatggttccagatatagtggtgaacaggtgactgcggaggtagttactgagaatgataatgttaccggcaaattaggtgataatatattagttaatgcggatctaaaaattcctgatgttgcagtatggaatacatataatgcaagtgcgaagatttacgatgaggaaaaatttataaattttctttcagatgttaatggaattgatataaaagacagacgcgaagaaaataaatattataagtttagtgacggaagcagtgttagttttagctcggaatgtttgcgttatgagactgtaaaaagtggtgaaaaacattataattcgcttgttagcgaatattatggattggcatttgatataagtgatagatttcctttaaacgaattagaaggtttttcaaaagaagagtgtattaagacagcaggtcaggttgtagaaacacttggagtagaaacttatggtgaacctgtaattataacaatggatgcagatagcagcaatcgatttcttaatactgagggaaatgaatatttaaaatatactaatttaaagagtgaagaaggagatggaacgtggacaaaagatgatgaagtgtattttgttgaatatcagttatcaatagataatattccaatatctttacagaaagtatcgtcttcaacatcaagctttgcaggttcatttatagatattgttattggaaagaatggcataatgtatattgaaggcagaggtgttaatcaatatgatggagctcagagaatagagggctcgttaattgatgttaataaagcgtttgatgtacttgcgacatcgagtaaatacatgaataaatttaccgttgataatgcaatggtagtaagttgcgaactttcgtattccacagtaggaacttcaactctttataagccatattataaatttttaataaaatatactgaaacaactgaaaaaaatggtcagatttcacaaaagaatcaagttagatatgtatttattaatgctatagatggaagcatgactgaatgaggtggctgtatgaaaaaaatttttaataatgcagacacgttaggtgttataaggcttgaatttcaaagaatatttacaggctggaatttttatgcagcagttattgtaacaacggcattggtgttatatcagacattttcaaagaataattatgcaggaagtgttatttcaggattggtaaagatgtcggcattgagttttatatgtcgtcttatgactatgtcatcagcatttccggcagcaagcagttactgtgatgattgtattggaaaatattataatcctattgttaataggagcggaatatcaagttatataaatggaaaatttataagctgttttttgtcatcttttttggtttgttttatatcccttattttatatacaataattggaagtatgttgtttattaatgggataggaacacagataaaattgtataatgagcctaattcaatattttatggaatgataaagtgttcaggattgatatatgttatttttcatatattgatttattcgggaacaatagcagttttttcactttatggattggttatatcagcatatatgactaatcgttttgtggcagttacagcaccattgctctcatgtattttgttggatgagattacatcatatcttccgaacttttgcagtcttttttcgtttggaaagttaagttcaaaaatcacagatactcctgtaaaatttattgctttatatacagcggtaatgctggtttatataattatagcaaagtatctttatacaaaacgcgtaaggaggaaactgggaaatgaaatcgtttagaatatgtaatcagaatatacgaaaatggactggaaataaaaggattcttatgattctgatacttatgcttttttttacgcgtgtttatacgaaaaatgttgtcatcttggcaattaatatggggaagacaatatctccgtggcttttaccgtttctattgaacaggagatatatgaagataatatatttgatattggttgtgtttatattttgtgatgcaccgtttattgatactaatcagccgtatgtttttttgagatgtaatagaaatatatggagtattggacaggtattatatataataattggttcatttattatggtaaccatgctatttgtttctacaataattgtcaatataagatatataagatgggacagcacatggggagatgtaataagttatgcatcagtaactaatgttttggcaaacatgggactaagcaatgataccataggattttccggtaaaatagtaaagtatttttcaccattacaggcaatcgcatttacaactcttcttttatggatgagttttatgcttattggacttataatatatgttattaatattattacacgttcacagttattagggatactgacggtatcgtttctggtaatgttatcgagtggagtggatatgcttccgggttcgataaaagagagggcgatatggttttctccttttagttggaatacgctgaataatattaaggtaacagctacaagtgaattacctacaatagattatattcttggcatgtatattggaatgatagttatattatgtattattgcagttgttgcaggaagaaaattggttatagatgtacatgaagaaatgtagtggaggagtggcaaatttgaaaactgataatatatcagaggataatagtattataaatgttatacatgtgacgaaaaaatttggacaggcagttgtgcttaatgatgtcaatatatcgtttgaaaaaggaaaaatacacggtcttattggtagaaatggttcaggtaaaacaatgctgatgaaatgtatatgtggatttgttccaataacacaaggggagatttttgttaatggtaaaatgataggaaaagacatagatgttccggataaattgggagctataattgagacacctggttttttgtataattacagcggttataataacttaaagttcttggcagctatacaaaataaaatcagtaaagatgaaatttgtgatgcaataaaacttgtaggacttgacccggacagtaagaaacatgttggaaaatattctttaggaatgagacagagactcggacttgcacaggcacttatggaaaatccggatatattattgcttgatgaaccaatgaatggtttggataagcatggtgttatggaaatgagggaactttttaaaaagcttgctgataatggtaaaactataataatggcaaatcatagttcagaagatatagaagcgttgtgtgatactgtatgtgagatggatttgggcgttttagagagaataaaataaaaaaggctgtgccttaacgactaaaaattgttaaggcacagcttctttgttatgtacaaaattaattttactttgtattgttgtttttcttaacttcttcctgcttcatagcacgaacctttaatgaaagaccgaaaagattaatgaatccttctgcgtcatggtggtcatagaggtcacctgtcttgaatgaagcgattgattcgttgtagagtgaatatggagaagttgtacctgctttgatgatattgcccttgtaaagcttgaatttaacttcacctgttacatattcctgagttttatcaacgaaagcctgaacagcttcacgcagaggtgtgaaccattttccttcgtatacaatctgtgcaaatttattgcccatatcaagttttaacgctgttgtatctctatcgagaattaattcttcaagctgctgatgtgcttcgtagagaattgttccgccgggagtttcataaacgccacgtgatttcatgcctacaacacggttttctacgatatcgataatgccgatgccatgttttgcaccgagtctgttaagttcacggataatatcagatactttcatctgtttgccgttgactgatgtaggaacacctttttcaaatgtcattgttacatattcagcttcatcaggtgcatcttcaggacgattgccaagaacaagaagatgtttgtaattaggctcgtttgctggatcttcaagttcaagaccttcatggctgatatgccataagttacggtcacggctatagcttgtatctacagagaatggaagatgtatgccgtgctgtctgcaatattcaatctcggcttcacgggaatcaagaccccatttatcatttctccaaggagcaataatcttaatatcaggagcaagtgctttgattgcaagttcaaaacgaatctggtcattacctttacctgtagcaccgtggcagatagcaacagctccttctttacgtgcaatttcaacaagcttcttagcaataagaggtcttgccattgatgtaccaagaagatatttgttctcatatacagcatgtgcctttacacaaggaacaatatattcgtcacagaattcatctgtaatatcttcaatatataacttagaagcaccgcatgaaatagcacgttcttcaagtccatcaagttcttcgccctgtccgcagtctgcacatacgcagataacatcgtaatcgaaattctcctttaaccatgggataatagcagtagtatcaagaccgccggaataagctaaaacaactttttctttcataaataaatcctccttattattgcggggaaaataatgccgcatttataaatatacgacagaaatctgttctcctcgtgttgtgaatctcatgtgttttataataatccaatcataataaaaaagcaataggcaaaattatttttatgcagaaaaatgtgaataaaatacataattcatgcataaatataaaaaatatgcaaataagactttacataagaaaaaaagttgctataataaaaaacatacacaaaatgcatgcagatgcgattggaggaagtatatgataaaagtaggaattatcggagcgacaggatatgccggaaatgagattgtaagattattgcttggacataaggatgtaaagattgtatggtttggttcgagaagttatatcgaccagaagtatgcagatgtatacagaaatatgtttcagcttgtagatgatgtctgcatggatgataatatggaagaacttgccaatcaggttgatgtaatatttacagcaactccacagggattatgtgcatcacttgttaatgatgacatattaaataaggtaaagataattgacttgagtgctgatttcagactcaaagatgtaaatatttatgaaaaatggtataaaatcgagcataaagctcctcagtacatagatgaagcggtttatggactctgtgagattaacagggacaagattacaaaggatacaagaatagttgctaaccctggatgttatacaactacttcaatccttacactttatcctatggtaaaggaaggacttattgaccctgatacaattataattgatgcaaagagtggaacttcaggtgcgggaagaggtgcaaaggttgccaatcttttctgtgaagtaaacgagagcatgaaagcatatggtgtcggaacacacagacatacacctgagattgaagaacagctcggatatgcatgcggaagagatgatttaaagctcatatttacaccgcatctcgttcctatgaacagaggaattcttgtaacagcatatgcaaatcttaaaaaagatgtaacagatgatgatgtaaaggctgtatacgataaatattataaagatgagtattttgtgagagttctggataaaggtgtatgtcctgagacacgatgggttgagggaagcaattttgtcgatataggatataaggtagagcctagaacacacagactcattatgatgggtgctttggataaccttgttaaaggtgctgcaggtcaggcggtacagaatatgaatcttttattcggacttcctgaaaatgaaggactgcagcttgcaccgatgttcccataatagtagatattttgtgggattaaccggacagcaacgaaaaataaatcacacaatataaatacaccgtaataaattcagcgtgaggagattaatcaatatggaaattatacagggtggcgttacagccgcaaaaggatttaaggcggcaggtatgaatgccggaattaaaaacaagacaaaaaaagacatggcaatgattttttctgaaaaaccatgtgttacagcaggtacatttacaacaaataaagtatttgcagctcctgtaaagtgggataaaaatattgtatataacagtgaatattcacaggctgttgttattaacagtggtgttgccaatgcctgcacaggcgaggagggcgacaatgcatgccttagggaagcacaggcagtatctaaggcacttgggattcctgaaaattctgtgcttgttgcatcaacaggtgtaatcggaatgcagcttcctatggatacaatggtagcgggaatcaatgcacttccatcaatgcttgctgatacacaggaagcgggaacacaggctgcagaggcaattatgacaaccgatacaagatctaagcaggttgccgtgacagttgacataaaaggaaagaaagttacagtaggcggtatgtgcaagggtgcgggaatgattcatcctaatatggcaacaatgctttgttttatcacaagtgatgcaaatatcgaaaagagtgcacttcagaagatgacaagtgcaatagtagatgattcatttaacatgatttccgttgatggcgatacatcaactaatgatactgttcttgtaatggcaaacggaatggcagaaaatgaatgtataaaggaaaatacacctgagtacgatgaatattttaaagcactttcatatatacttacagagctttcaaagatgatagcaggagacggtgaaggttgtacctgtctttttgaagtaaaagtaattaatgcaaaagaaagacaacaggcaagaacacttgcaaaatcaattgttacctcaagtctgacaaaggcagctatttttggacatgatgccaattggggcagaattctttgtgcaatgggatattccggagcagattttgaacctaaaaaagttgatatttactttgagagcagtgctggaaagttaaagatagttgaaaatggcaaggcaactgattatagtgaagaagaggcaacaaagattctttcgcagaatcctgtaacggctatagctgatgtaaagcagggtgatgtcaacgcaacggcatggggctgtgaccttacatttgattatgtaaaaattaatgcagactaccgttcataattaaataagaaagaattttaaggagaaattattgacatggaaatgaatgaagaattaaaaaaagcacagattctcgttgaggcactgccttatatacagaaattcaacagaaaaataatcgttgtaaaatatggcggaagtgccatggttgacgaggaattaaagaaaaaagtaattcaggatgttgtgttgttaaagctggtaggatttaagcctattatcgttcacggcggcggaaaggaaatcagtaagtgggtatcaaagacaggtggaaatcctcagtttatcaatggcctacgtgttactgatgaacctacaatggaaattgctgaaatggtattaaataaggtaaataagagtcttgttgcacttatagaagaacttggtgtcaaagcgtgtggtatcagcggtaaggatggcggcatgttaaaggttgaaaagaagctttcaggtggcgaagatataggttatgtaggtgaagtaaaagatgtagatactacaattataacttcacttttaaaagatgattttatacctgtaatctgccctataggatatgatgatacatttcactcatataatattaatgctgatgatgcggcatgtgcaattgcaagagctgtcaatgctgaaaaacttgcatttcttactgatatagagggtgtatacagagattatgaagataagtcttctcttatttctgaacttacaactgatgaggcaagagaacttcttgctggcggaacaattggaggtggtatgcttcctaagttaaataactgtatagatgcgatagagcatggcgtttcaagagttcatattcttgacggacgcattccgcattgtcttcttcttgaaatatttactaataagggtgttggtacagctattcttagtaaagaagcagagaaattttttgatacaaatatctagttaagggagaaaaatgatggatacaaagacaattattgaaacagctgaagaaaagcttattcatacatataaccgttaccagattgtacttgacaaaggtgatggagtaagactttatgataaagatggaaaagaatatcttgattttggtgccggaattgcggtatttgcattgggatataataataaagaatacaatgatgcagtaaaggctcaggttgacaagctcatccacacatcaaattatttttacaatgagcctgcagtaaaggcggcccaggccgtaacaaaggcttccggcatggacagagtgttttttacgaacagcggtacggaagcagttgagggagctataaaacttgccaaaaaatatgcatatttaaaggatggctcaacagaccatgaaattattgcaatggaacattcattccacggaagaagcatgggggctcttgctgtaacaggcaaccgtcattatcaggaagcatttggtcctatgattccgggaataaagtttgcaaaatacaatgatcttgaaagtgtcaagtcacttgtgaatgataagacatgtgccattatcttcgagacagttcagggagagggcggcgtatatcctgccaaaaaagaatttatcgaaggtgtaagaaaactctgcgatgagaaaggaattcttcttattcttgatgaaatccagtgtggcatgggacgtacaggttctatgtttgcatatcagcagtatggtgtgaagcctgatattgttacagttgcaaaggcacttggctgtggcgttcctattggtgcatttcttgcaaaagaaaatattgcaaaagcacttgttcctggagaccatggtactacatatggtggcaatccgcttgcgtgtgcggcatcagcaaaagtatttgaattatttgaaaaactcaatgtacttgaaaatgtacaaaaagttggtgcatatatggctaaaaaattagagcagattgttcaggattatgatatagtaattgagcacaggggcgtaggtcttattcagggaattgagttgtcattaaatcctaaagatgtgatttccaatgcacttgataatggtcttattctgttctcagcaggcacaaatgttataagatttgtaccaccttttgtaataacagaaaaagatgttgatgagatgatagttaaattaagaaaagcccttgatgaaacaaggagttaattattatatgaagcagttaaagagagcagcggcggttttacttgcagtttgtctgattttttcgcttgctgcgtgtggtggtgtcaatattgataaaacggcaaaaaatcttcacattgagcaggcagagaatataagagtatggtattgtgacgacaggtatacagattatctgaattttgttgcggatagatttcattctgcaaacgaacttgttacaattgaaccggttttggttgattctgataactatcttgagaatatatatgaagagagtgtacgaaacggtaacgtggcagatgtatatcttatgcttacagatgagcttgaaaaagcaagcatgatgggtcttacagttgagaacagtacatattctgatttgtatacacaaaaaaattatggaaacagtgcaattgaagcagcatcatataaaggtaaactttatggatatcctgtcacatttgatgttccatttcttgtatacaataaaaatgctgcatcttctgtagaaacattttcacagcttatagattattgtcataattatacagttaatgatgataatcagaatgttgagcagctcgtatcatgggatgtctcagatatgcttgttaattacgggtttgtgtgtggttcggttacaataggcggagaaagcggagatgataatacaaagctcagtgctgacaaagatttacttaaaaaatcgctgactgaatttgtaaaattaagagacgaatttggtattgtgcgtgccgagacaacgcttgattcatgtgctgatttatttgcacagggaaaacttgcatatacaattacagatgtttcgcatcttaatacaattgcggagtcaggaatttcatatggtgtatgtaatattccggcactttcagatgatatgcagattgaaaatatttccgaaaatttatgtgcatttgttaatccgtattcatccgatgtccagactgcaaaggcagttgccaacgctatgagctatgattatgctgctgctgtaaacagcacaacagggcttttaagttcaagaactataagcattaacagcaaagaatataaggatacatatgggaaaatatatgaaatatattcaaaggctgatgacaaagcaaaatttatgggagctgcatatttttatacaaaatttgatataatgcttcatcaggtatgggatggaactgatatagaaacatcagtaaattcatttttatctgaattaaaagtccaataaaaataaagaataaaaaacctgttatgagtacataattaagtattagattgaaaataatagtaaatttaattcttaggaggtactgatggcaggttttttgattgcaattttatcgggtgcattaatgagtatccagggagtgtttaatacgggagttacaaagagcagcagtatatgggtagcagctggattcgtgcagattacagcatttcttacatgtgctgtgatgtggattgttgacggaagaccgcagataatggggctgtttaatgtgtcgccgaagatatcgcttctgggcggtgttattggtgcatttataacatatacggttgtaaaggctatgtctgatcttggagttgcaaaagctgagattaccattgttatcagccagattgcggttgcctacattattgaattgttcgggctttttggaagtgagaaaaaagatttttcatggataaagctgttaggcattgcggttgcagttacaggtgtagtaatatttagtatgtgtggtaattcaaaagagtaaaatcatatgtaaataaaaatatacaataatttaaattcatattagtaaaggagagtacatggaagatttatttaaaatatgcggaattgttaatttgaaaaaaggtgagggacgtactatcaaagccggcggaatgtgggtatatgataatgagatagaaagcatcatgggagatgctcctgatggaacacttgttgaagtgcatgattttgacggatattttatgggaataggttttattaacagaaggtcaaagcttacagtcaggatgatgagcagacatcagcatgttattgatgaggattttattgagcagagagtgcgtgactgtgtcgagtatagaaaacatacagttgatatgtcttcatgccgtcttgtatttggtgaggctgatttccttccgggaattgttattgacaagttttcggatgttcttgtggtagagtctcttgcgttgggaattgacagattcaagccaatgatagttgataaacttaaaaaagttcttgatgaaaatggtatgaatatacgtggtgtgtatgaaagaagcgatgccaaggtacgtctgaatgaagggcttgagcgttttaaaggatttattggcgaagagtttgatacaaaagttatgatagaggaaaatggtgtaaagtattacgttgatgttcaggatggacaaaagacaggatttttccttgaccagaagtacaatcgaaaagcaatatggaagatttgtccgggtgcaaaagtattagactgctttacacatacaggctcatttgccttaaatgccggaatggcaggggcagccagtgtacttggagttgatgcatcagaacttggagttgaacaggcacgcgaaaatgcgaagcttaacggacttgaggacagagtttcatttgtatgccgtgatgtgtttgaacttctgcctgaacttgaaaagaagggcgaaaagtttgactttgtaattcttgacccgcctgctttcacaaagtcacgcagttcaatcaaaaatgccgtaaaaggttacagggagattaaccttcgtgcgatgaagcttgttaaagacggcggctaccttgctacatgttcatgctcacattttatggatacagaactttttacaaagacaatcggcgaggcggcaagaaatgtacataaacgtctgcgtcagattgaattccgcacacaggcacctgaccatcctgtactttgggcatcagattcttcactttatttgaagttttacatcttccaggttgtggacgaacgttaggcgtaggtgttttgtcaggaaaatgaatatgctttgtttcataaaggattgatattatatgtataatatactgtaaaaaaattacgatatagcatataatcactgtaaaaaagttgcaacaaacggatgctgtatgtataatataaataaaagacatttgcaaaggggtatatattatgttggagaagattatatttgaaaattttaaatcattcagacaaaagacggaaataagcctcataaaaacaaattatacgttattgccgtataatgttgcagacaatggtgtgttaaagggatgcctgtttgttggaccgaatgcttcgggcaaatccaatattataattgcaattaaatatctgctggattccatgtttttgaatcagaatatgaatgcaaaagtttacagatgtattttctctgaaaaacgcagttattttttggattattattttttgattaataatgagcatataagatattttattaagattgacgataaatttaatattacggaaaaattatttattgataataaattgaaaatggagcgtattggattatcggcgaaatcatatatagctgatgaagaaggtgttatttatgatgagaatgatatagataaggagacgctttttttaagaacattgtattttaatacaaaattcacaacaaatgaaacattgaaaaaatggattgaatatttaatgaattccgtatatataaatctatatgaaaaaaaggttataccgtacggaaaaactaattatcaattgtttgaatatttaaaagacaatggtacagtaaagattaatgatttttttgacagatataattttaagcagcaaatagaatatgcacattcaagcgaaggtaataatgtgagaattacctatcgcggagacgaaagtgacaagtatattttttataaaagaaaagggattaatgaacctattccgtttggtgaggaatcgcttggaaatcagaatcttttaagaatgttaccgtcgtttttgggggtggttgaaaacggcggaatgttgcttattgatgagttttcaagtggatttcacaatgatttggaaagtatgcttatcaagtattttcataaggaatcaaaaaattcacagatgatttttgtatcacattcgactaatctgctttctaacagtctgctaagaccggaccaggaatatacggttgaatttcaggataaaaacggaagcaaagttaagaggttctcgactgaacagccacgttcggcacagaatatcgaaaaaatgtatacaagcggcgtgtttggtggcttgcctcagtttgaagaggtatagccatgattgaaataaatgataaaaagagtattggaagggtactttttattgttgaagggagtaaaacggaatttgcaattcttagaaaaatattttgtgacatattaaaatatgaatatattgaaaaaagaagaaaccgccctgatacatttaaaagtaaaaataacagtacgtcaaaagttgcagtaataaatacagaagaaagtaatattaactatattacggatagcgaagaatatttagatgtattgtttgaaatgttacggaaaaaatatgattttcctgttgataatgcggcaatatattatttgtttgacagagatccgaaatcaaacacagatgttgaaagaataaaaacatatattgatacattaaaagacccatatgataacggaataacaaaagccggaatgtttctgcttagttatccaagcatagaggcatatacagtatcaggatttgagaaaaattcctgtgaaatgagaaaaaatcttggttctgagctaaaaacatatataggggagaataagaatattcagtttaataaattcaatgagagtatagttttaaatgcggctgatgaatttttaaagtatttgtttaatgaaaagttaaattatgatttggatgatttttcgccaactagtaaagaaatatttagcaggcaggaaaaagagtatctgtcgggtaacggatataaattattttcgatgcttacgctggcgtttatgcagctggggataattacacatacggaagctattacataa

SEQ ID NO: 444 - DNA, 7577 bp, unidentified
  source 1..7577: mol_type = unassigned DNA
atgcaaatggcagtaattgaactggaaaaaaacatttcatatatagagccgacgcaaaatccattgtcggcaaatgtcgtgctgattgaaggagaaaataatctgtggctgtacgatgtcggaaataatccgtgtgtgccacagattatatctgcttttaacacttcaaataagaagataaatgtgattttgtctcattttcatgcagaccatataggtaatcttgataaaatcagctattcaaatgtgtatcagggcagattgacttataaatatacgaaaacaggtgaaatactggaaaatgatttgtatttttgtgatggtaatatgaatcttcatatttttccactcccgtcaagtcatgccaaaggttctttggcattagaaataaatgaaaaatactgttttttgggggatggtgtttatgcaatgcaaaaaggtgaaaaaaggctttataatgcaggaattcttaaagaagaaattgaaattctaaaaaatataaaagcacaacattttatgcttagccacagaaatccttttgataattcaaaggattcggttataaggctgcttgatgggatatatgccaaaagaaaaagcggagagccgtatatttccggcattgacggggaatgagaggtattaagttagtcgtatcagaaagtatgcagagtatatttatgtaatctgcacactttacatttacacaaaataggtatactatataattaaaattccactatatacaggaggagaattatgaattattctattaatacaaaatgcgtacaggcaggttatacaccgggcaatggcgaaccaagacagattcctattatccagtcaacaacatttaagtatgatacaagcgaagatatgggaaagctttttgaccttgaggcatcaggatatttttatacaagattgcagaatccgaccaatgattatgtagcttcaaagattgcagcacttgagggtggtacagcggcaatgcttacttcatcaggtcaggcagccaatttttttgcgttgtttaatatatgcgaagcaggaagccatattgtttcttcatcatctatttatggtggaacatttaatcttattgaagtaactatgaaaaaaatgggcatagatgtgacatttgtagaccctgattgcacagatgaggaacttaatgctgcatttaaggataatacaagagctgtttttggagagtcaatagccaatccggcacttacagttcttgatatagagaaatttgcaaaagcagcacatgaacatggtgtaccgcttattgtagataatacattccctactccggttaatttaagacctatagaatggggagctgatattgttacacattctacaacaaaatatatggacggacatggtgcagctgtaggcggtgcgattgtagacagtggtaagtttgactggatggcacatgctgacaaatttccgggactttgtactcctgatgagtcatatcatggaattacatatgcagagaagtttggtaaagagggtgcgtttataactaagtgtacttcacagcttatgagggatttgggctgcattcagtcacctcagaatgcttttattttaaatctcggtctggagtcacttcatgtgcgtatgccaagacatgtggagaacggacaggctgttgcagaatttcttgagaagcaggataaggttgaatttgtcaattatccgggacttccatcgaataaatattatgaaatagcaaagaaatatatgccaaacggaggttgtggtgtagtttcctttgaattaaaaggtggaagagaagcagcagaaaagttcatgaagaatcttaaacttgcagcaattgagactcatgtagcagatgcgagaacatgctgcctcaatcctgcaacatcaacacacagacagatgaatgatgaacagcttgcagcggcgggaattccggctggacttatacgtatatcatgtggtcttgaagataagaatgatttgattgccgatatcaagcaggcacttgatgctatttaataaaaatttaataaacatcttcaaataagcttgaagagcatgttaattaagtaatatttcaaaaggagaagctcacgggcttctcctttttgaactcaggttattcattatattaaaatcttgcaagcatacggcttaggattttatcgcatataaatgtataagcagaactaaagatatttgcacttattcttaaaataacagcgtattgggcaccgaaaagccctgctgcaatagatagtgcaccaaatgtattaaaagctgtctgccatgcatatcctgctgaatatccaacgccgataccaccgattattcctatataagggtacattgatgaaggcaggatatagtaaaggacaaggaaaagaaggcatccgactatattaaaaagtcctcttttcacagctcttggctttatgtcatttgaaaatggaaggcagactgacatacatgcgatacctgcccacatggcacgagggaggttgagcagtgacattgcaagtattgaacttgatacaataaaagttagtttaatataccattttgtgcgtgatgaagtaatattaaattctgaaaataaatttttaaaagtacgatggtaaggtctgtttttctgatttttgtaaaaaacaatcatgcatataagcatgcctgctgacaaacctgcaattcgcataagataatcgtgtccgcttacatcatatcccagaagcaggagataactgagaacaaatgttgaatggttatacataatgacattatggcagctgaaaatcataatgagcattatacataagaaattaataaaaaatgccggtatggcaggcaccatatttgcaagacgaggaccggcagctaatattacaaatatacctgcaattgaaataagtccgtgatttgtctgaataccaaaatcagcctgtctgagtacaagtacagaaagcagaacgcatacaccaacgacgctgttactgtttcctgtcaacatactgaaaatagttacaattgcaacgcagaatatcattacaagataaaccttgaaattatatattaaaatatgtctgaatttttcttttttgtcatgtgtatttttgattaactgcttagaacctgcagaactaagctgtaattcctgataaaatgtcatagaaatctccttgtgatgatgtaaaaataatccccacaatagatagggttgaataatataacattaatgacggattatgtcaaataattttaattttacatgtaaaattttagatgcaaatttaaataataagtaccaatgcaaaaataaaagttatataataaaattatagggaagaaggggaatgacagctgcctgacaaaaaagggagagagtatcaggacagctatcggagtttatgaaaaggttttatctaatgtctttcgacattgtctatattacagataaaatgtgattaataattgttgattttatgaaaaaattgtgaaaaacatgaagtgtctcgaagaaaacaaaaaacaggatacagaaaggcggttaatatgaaagttggaattataggaatgggaaatatgggtgcaaaatatgccctgatgatagcaaaaggtgatgtcaaaggcatggaacttgctgcgataacaagagttactgatgaaagatgggatatgattagacaatatgtttcacctgaacttatgaagtttaattcgggtgacgatatgtatgccgccatagatgacaacagtttgtcagtggatgcagtaataatagtaacaccacattattcacatgaagaacttgttaagaaagcgtttgaacgtggaataagtgtactttgtgataaacctgcaggagtttattcaagacaggcaagaagtatgtgggaggcatatcagagtgcaaaaaaaagctgtccgaaacttcaatacggattcattttccatcagagaacatttcctgtttatagaaaaataaaagaaataatcgataataaaacgtatggtaatattaaaagggtaaactgggttattacagactggtacagacctgatgcatattatgaatctggtaaatggagagcaacgtggaaatatgacggaggaggaactctgcttaaccagtgtcctcataatcttgatttattgtcatggatatgtggaaatccttcagatgttgccggattttgcagcgaaggcaagtatcatccgatagaggtagaagatgatgtcacggcatatatggaatgggagaatggtgcaagcggagtgttcattgcatcaacaggcgaggcatccggtgtcaacaggctggagataagtcttgataatgctcttcttgtatgtgacaaaggccagcttcgtgtatgtgaacttgacaagccggaaatagaatacagaagaggaaatggtgatttatttgctaagccaaagtatgagtggaaagatataaagacagagccaaatgatggtgcatatgaaaaactactgacagaatatgcagcgggaaggtgtgttgcaaatggagacgaagctattaacagtctttatttatccaatgcgatatacctttcatcatggaaaaacagaaaagttgcattgcctgtaagtggcagcagatatgaacttatgtttgaaaaacagtttgaaaaagaacttgaaaaaaagattaataaagctataagacgtaagtgatagaatagcagaagccgcggttttatataactgcagcttctaaagatttttcgagatttttcaattcttttaattctcttattgtaaaatatccacatacaatggcggcggctgcatcggcgataggacctgcatacattacgccatcaattcccataaaaatagggaaaataattataagcggaagcaggaacaatatctgtcttgtaagtgacataaatacaccaagtcttgatttacctatagaattaaagaaatttgatgttacaggctgtattccgttgatgattgtcaaaaacatatatattctgaaatacctttcagaaaacttaaaatataattcacttccgttaccgaatatactgataatctggcgtggaaatacctgaaaacatacaaatgcaataagcgataaaccggaagctgcagcaagtgccagcagatatgttttacgtacacgtttatatttttttgctccgtaattaaagccgataacaggctgtgttccctgagatattccgattacaaatgacataaatatcatatttacttttgtgataattccggcacatgcgagaggaatatcaccgccatatacagacattgcaccataatgtgcaagtgtgttattcattacaatctgaacgactgtcattgcaatctggttgaaacatgcacttgctccgaggataaaaatatttttccaatgatgcaatgaaactgtaaagctgcttttgcttaattttatatttttaaaatgaaacatatagcgtaaacttatgcaaaatgaaattatctgtccaataatagttgcaagtgcggcacctgtcattcccatcttaaatacaaatatgaagacaggatcaagaattgtatttacaattgcaccgataagcattgatgtcattgaatagtttggactaccatccgcgagaatcagcttgctcattcctgtattggctatcagaaatggaaagcctatagcagtaatacgcgtatatgcctttgcatatggaagtacatcaggtgttgcaccgaaaaatttaagcattggcgtaaggaatatggtggttataagaaataaaaatattcccattatagccataagaattattccattgccggcatatttttctgattctttcttttcacctgcaccaagatgcagtgagtaattggttgcacaaccaattccgagcaggagtgatatagccgtgcatgttgttgatagtggaaatgcaatatttgttgctgcatttccaagcataccgataccctgaccgataaaaatctgatcgacgatgttgtataacgcagtaacaagcattgatataatacatggaattgcaaatcctacaagaagttttccctcgtttttgtacccgagtggattttcattttcattattgatgctcattgtgtgttatcctttctgataaaataatcaattattcttcaaatgaaacaatctgtgttgcattattataacccagctgctgcatttttttctggagattattaagagctttatcatattttaagaaagcatcatatgtatcgttaaaatatgagagagcttttttgtcgtccccatcttcttttgcctgccatgatagagtggcaaagtgatgaagaacttcatgtgttttgacaagctgaccaaattccggactttcagtaagacggctgtcagtctggctgttcagccattttccaagcttgcatcccaaagggttatcaacctgttttttctttaagtgttcaaatccgacaatattgttgtatacacgccatgtaagaacatagtgatctacttcaaatacacgcatccagtcctgctgtgtgatattagaacatccacgaaccaggtcacttctggtcttgtcaagataacgtcctaatttaaatacacgttgtcctgattgtatacattcatcagataaaatgttataactttgagaaatattttcaatttgttttgctaatgattttgttacaccggtctgcgtgtcaatgtcgttaaatatactgtcaacgcttacgcttatgttgtccatctggccattcatctgctgtatggcggcaagcgactgctcaactttcttatttccttctccaagtgtgagagttgtctcatccattgcagaggcaagtgagtcaatgctttctcttaattcagcaacatattttacaatatcttcggctgattgtgaagtgtttgaagataaaattcttacctgttcggcaacgacagaaaagccttttccggcttcacctgctcttgcagcttcaatagaagcatttaaagcaagaagattactctggcttgcgacattttggacaatgtcaacaatttcttctattttattgatttttcctttgaaatcctggacattctgattgatagtattgattttttcagatgatttattgacagctttaatactgtcattcatgtctgtagttatattttgtgaaactgatagaattttgtgagtgtttgtgcggatatctcccattgcatcagaaatgttttcaatagaactttcgagatgctggctggaattttccatgtgctgtattgattttgtctgtgattcgacctgttccagagtattctttataagagtgttgtcaccgataacacccattgtttcattgagacgcattacaacagggttatttacttctgtaaaaacatgcagcattttattgagtttttcaccatattcggggttgttaaagtcaacaggattaacaccgctgaagttacctgcaataattttatcaatagtatcaagtatctgtaccgcatcatggtcagacaaaatctcatccttttttttccttttaaacat

SEQ ID NO: 445 - DNA, 17744 bp, unidentified
  source 1..17744: mol_type = unassigned DNA
atgaaagaaaataagataaaaaaagcaaacacatccccggaagggcaggctggttctgagaacatgagcacagcagatgtagatgcagtaatgaagaaatacgaccgcgaatccaatattcgtgtgtggaccggcaaatataagctggctgtacgcggcctgctggttgccttttctctgtggtgtatctatgttaccttatttgcaaccttcctggaggaaatccgactgacttcttttctggggctgatcattcttatcggatttcttacctatccggcgaaaaaaggagacatcagagaaaactacatgccgattggcgatattatttttatgatcgcaggcacaggtgcttttctgtattttactttttctgcaaatcagatcatcaatcagggtaccagatttgccccttatcagattgtgatcggtattatcggtattgctgcactgatcgagcttaccagacgatgcgtgggcctgccgatcctgtttgtggcaggttttttcctgatctatgcactggctgtagggcttaccaatccggcattttggggaagagtgaaattcctggtgcggaatcttttctacacaaaagagggtattttctccacacctgtaaatgtatgctctaaatatattgtggtatttattattttcggtgcgtttctggagagaacaggaatctccaacttctttattcagctggctaactgcattgcaggaaaatatgcaggtggaccggcaaaggtagcggttatcagttctgcactctgtggaatggtatccggttcctctgtaggtaacacagtaacaaccggttctgttacaatcccgatgatgaaggacacaggctacaaaccggaatttgccggagcagtagaagctgcttcttccacaggtggacagatcatgcctccgatcatgggagctgccgcattccttatggcagattttgtgggtgtaccgtactccaacattattgtcagggcgattctgcctgcattgttgtactttacaggaatctttatttctgtacatctggaagcaaagaaattaggactttccggaattccgaaggaaaaacttccggtatttaagcttctgatccgtaaaatctatctgttattacctctggtcatgctggtaatctgggtgtccggaaactatatgaccatgcagaaggctgccagctatgcaatcgttctttctgttatcgtaagtctttttgacaaagaaaacagaatcagtgttaccaaatgtattgatgcgctggaagcaggaggaagaggtgttatctccgtagcagtagcctgcggtgttgcaggaatcatttccggttccatcaccatgacaggacttgccaatgacctgatcaacggaatcatcagtgttgcaaacggaaaactgatcattgcactgcttctgactatgctgtgctgtatcgtacttggtatgggtgtacctaccactgccaattactgtatcatggcagcaacctgtgctccgatcctggtacgtatgggagtacctacactggcagctcatttctttgtattttactttggtattgttgcagatatcacaccgccggtagcgctggctgcctacgcaggttcagccatagcgaaggccaatccgatgaagactgcatttacagcctccaagctggctatcgcagtatttatcgtaccttatgtattctgcttcaatccggcaatgctgctgatcgataccacaccgcttaaggttgttcagatctttatcacctcactgattggtgtgtttggattgtcctcctcactggaaggcttcctgtcagtgaaaatgtctgtaccggttcgtgtcttaatggcagcaggcggactgatgctgatcgatccgtcactgatgactgatgttgtgggaatacttctgatcgtgggatgctgcgtatggcagacagcgcagaagaagaaaactgcatagagaagaataaaaaaaccggcaaaacacctgtcatttgggtgtcctgccggatttttttatttagaaatccagttctttcagataccgtccaagtgcatcctgccaggtggggagtggtgtgaaaccattggctgtcagtttgctcttatccaggcggctgttaaacggtctggctgctttggaagcgccatactctgcagttgtgacggagttgactgtcatgttttccgggagatattccgggtgtcccatggcagcggcctgacggaagatttcttttgtgaaatcataccagctgatatatccgccctcattggttgcatgataataaccgtatttttcagtttcgatcatatctaccagaagtcttgccaggtcataggtataagtaggtgtaccgatctggtcattgactacggagagagtatcatgagtttttccgaggttgatcatggttttgataaagttcttgccgtttttgccgaatacccatgcaatacggacgataaagaacttatcaactgtgccggatacggcaagttcaccgtccagctttgtctgtccatagacatttaatggtttatagtccttgcagtcaggctcccatggagtggttccctgaccatcgaatacataatcagtggacagatacagcatcttgatgtcaagctctttgcacacatcagcaatattctgagttccggttacatttaccagacggaccttcggctggttatcttcatcttcggcagcatctacagctgtccatgcagcacagtggatcacagcatcaacatttgcttctttaatgactttttctacagaagctttgtcagtgatatccatctgaacataaggcattgtggtaactgcagtgccatcagcgattccgctgtaggaaggagcaatgtcgcttcccacaccttcatagccgcgtttcgcaagttcgttcataacatcatgtccaagctgaccgcctacacctgttacaaaaattctcataaattatgcctccccgcggtttgcgtacattttttcatagtagttctggtattcaccggagatgatagtttcccaccattccttgttatccagataccatttgattgttttcttgataccgtctgcgaattttgtttccggtaaccagccaagttcgttgtgaatcttagtcgggtcgattgcataacgcatgtcatgacctttacggtctgctacgtaggtgatcaggctttctggtttgccaagttctttgcagatgatcttaacgatatcaatgtttgtcatttcattgtgtccgccgacgttgtaaacttctccaacacgtcctttgtggatgatcaggtcgattgcgcggcaatgatcttctacatagagccagtcacgaacgttttcgcctgttccgtataccggaagtggtttgtcatttaatgcattggcgatcattaacggaatcagtttttccgggaagtgatatggtccgtagttattggagcagcggctgatggttacaggcagtccgtaggttctgtggtaagccagcaccagaaggtctgcagaagccttggaagagctgtaagggctgcttgtgtggatcggagtttcctctgtgaagaacaggtcaggtctgtctaatggaagatctccgtaaacttcatcagtagatacctgatgataacgtttgataccgtatttgcggcatgcatccatgagaacagcagtaccgataatatttgtggtaaggaaaacttccgggttttcgatggaacggtcaacgtgactctctgcagcgaagtttacaaccatatcagggtgttcttcctcaaaaagtttgtaaactgcttcgcggtcggtgatgctttcttttacgaaacggaaatttgggttgtccatgacaggtgcaagagtggaaaggtttcctgcataggtcagacagtccagacagatgatgcggtaatccgggtatttttttaacatgtgaaaaataaagttgcttccgataaatccggcaccgccggttacgataatgttcatagtgattctccttaaaaaatatataatatgaatatctgtaagattctgttatagagtcaggcagataaaattatccgccttgctgcatggcgggtgatatatcaaataactgtttgaaaatttgatatatcactcacttgactgcgaattcggttgtacaggtctaaaagcttcggttagtgcaatacatccagatatttaccgtccagaacgtcttttaagtactgaccatactgatttttcttcagtatttcataaaccttcagcacatcttcctttgtaatccagccattgagatatgcaatctcttccaggcaaccgattttgcggtgctggtggctttccattgtttttacaaagttggtggcttccacaaggctctcgtgtgtacctgtatccagccatgtgaatccctgtccgagaagctctacgtttaattcgcccttttccagatagatgcggttcagatctgtgatctcaagttcgcctctggcacttggtttcagattttttgcatactctacgacgcgattgtcatagaagtataaacctgtgacacagtagttgctcttcgggtgctccggtttctcttcaattgagatagccttgccttcatggtcaaattctacaataccgaatctctccggatcatctacatagtatccgaaaacagttgcaccctcgccggattctgcgttctttacagcagctttcagtcttttcttcagtccatgtcctgcgaagatattatcgccgagaaccatggcaacagtatcatcaccgataaattcttcgccgatgataaatgcctgagcaagtccgtccggacttggctgtactgcataggtgagatggacaccgaactgatgtccgtcaccaagaagttcctcaaaacgaggagtatcctgcggagtagagatgatcaggatatctcggattcctgcgttcatcagtacagacatgggatagtagatcattggtttatcatagattggcagaagctgtttggatgttaccattgtaagcggataaaggcgtgtgccggaaccgcctgctaaaataatacctttcatgtgtattctcctttgttattggcagtatgcggtcggagcgatattctgtcagttatctgtgtaaatgataagcaaaatatcaggcgactgcggtactaatcaacgggtttctgattgtcagtctgagttacgatatcatcctgactctggtgattgtattataaaaggtgaccttaggtcaccttcaagcactttttacaaaaaagttaaattttggttatttttcacaaagaaaaatgccggcatccttggtaataaagaacccatcctttgtctttcgcgatacaaatccccggaaatctttgtatttgtccagaagatactgattctgatttccatggcaggagaggatataggaaatcagcggttctgcatcggggacaagaagagagtccttatagctttcccagaaaatacgggaaaaatacggtgccaggatatctgctccgttttctctgccaaaacgctcatagagtttgtctgcggagagaacgatccggtcgtcaaaatcccggaccagtctgctgacttcctgcatgtgtttttttccataggtactgcagatcagttttccgcccggagtgagcacacgttgaatttcgctgcatacagcagagatatcttcacagtaaaaaagcacatggtttgcaatgaccagatcaaagcttctgtcttcatgaggaattcttgcacagtcaaatgcctcgaaggaaaaacggctgtctttgcgtccgatagcacgtctggcatcacgaagcattccggatgaaagatcagaaagagtaacggaaactttaccggggaggctggaaatattctgtgtccacagaacaccgtcgccgcatccaagttcaaggatacgcatccccggatgaatctgacactgctcataaacccatggaaaccatccctgtttattctgggaataaaggctgtgcagattaatgcgtgaggaaatgttggaggcgttctggtattgatttttcatgcttttctccatgcctgtcaggtggatcaggtcaagcatctgattccagtctatggaatgatgggagcggatcgcatctgtggtatcctggattgccttttccaccagctgcatttgttcgatacggtcacgtaccagctttagctggatgttcagggaattttccataaaatgatagtctgagtcgtcaatggtcatttcccgtatgtcatccagggagaaacccagatatttcagaagcaggatctgggaaagtcttgcaaaatcctcatctgtataaaaacgtgcgccggattctgttacataggagggtttgaggatattctgtttgtcataatagcggatagtgcggagtgttacatgtgccatccgtgcaaattctccggaagagtagtagccgtcttttttcattgtaaaaccttctttaagaaaaatagtcttgcccgcaaatgcggatagaaacagttgttcagcctgcatttgcgtattgctgatatgtgtagagtataacatagctgaccggcaggctacaagcatcaggtattaccggatggataatactatactggctgaatggtaagtcagatggtgatttttgacattttttggaggatgctaatccttgtcttttgacagaaattatggtatgttaaataataacaatcaaaactgattttcatacaaatcataatctggcagttctgccatattttttccaaaatacaataaatattaagagagaacagtaatgacaatatgaaaggtgcagggacaggaggagcctgatgattaatttatttgattttacttactgcggagactataatcggcagattcagaacctggcaaggatggtgccggagaagtggagcttttcggatacagatgataacggaattctgaaaggatacctggaacatacatttaaacgcctttatgaagaacagaaggtgtgggagaaaaagaattatgccatatttaatacaggactctttaattactattatcagccgatttatgcgtattttattcccaatctggtcccggacaggcagccctggtttctggatggcttttatacagaatactatttgttaaaagaaggaatcacctgtctgccggaaaaggcatgctatgtggaaaatccgtcagatcttgtgtttgatacaaaacttccggtaattccacagtacgagcatattttcggggatgaggaaaatgctgcccgtcttccaaaggaagtacgtgacagcagcatgaaaatgcagctgtttgacggcgcgctgaaacagacaaaaagaatgcttgaggcagattacagaacggcaattccacagtattataatcactcaattcaactgctgctcccaatctgtctccgccatccgggaaaacccgaccttgcactggcgtgtatgaaaacttcggacggaagcaaatatctggggcgtacctgcctgactctcagaatggcctatcataatgccagactccttgcaagggtggaccgaagctggctgatgacttctgtatctgcctgaggtttgacatgtgtggttcgctttgatatattatagcagcgaagcagatgattttatctgtctgactgaaatgatgtcaggttagatatttttacggattgttctgctgctatagatgaaacaacagaaaaaggtgggtgagaaatcaaatgcgaaataaaagtctggatgctgtaaaggccattgctgcgtgcctggtggtatgcatccatgtaagctttccgggacaggccgggcagcttgtaaaagtactggcaagatgtgcggtgccgtttttctttatggtatccgggtatttctgttattatcaaaattgcaatgcctcaaaaagaatattgtctaaaatcctgcatatcatgaagctttttgcagtttcagttgtgttttattttatctgggaatgttttatgaaagcctggaatggggagagagtatggacatggataaaagggcttgtgagtacagagcatctgaaggaatttttcgtgtacaacagtacttctccggtaagagcacatttatggtttcttcctgcattaatttactgttatctgcttgctctcctgcttgaaaaatggagaatgcgtaaggctgcatattgtatggcacctgtattgctggcaatacttttatggagagcggagttttgtgtcttttttgacatattttatcacactatggaatacagaaactttctgtttacaggaatgagctttttccttacaggtcagatgatccgtgaatatcaggataagatagtatgcaaacgtcaggagcaatggggattgaaagcagggatgattttcggtgtggcactcagcatgatggaatatgctttccgaggggcaggagaaatttacacaggaaattgtgttgcagtgatctgtctgtttctgtggcttattttatatggaagggaaataaattttccctctgtactggtggaaaccggaagaaaatatgctttcctgatctatcttcttcatccagcgatgtcagaccttctgaaaaaatgtgcagaaggtctgggagtcagcaactgtcagatttatttttggctgcgtccggttttagtatatatgctgacagtggtgacagtttccggcatatctgcggcctctgcatatgcaaagcaaaatattttgcagaatgatcatgtatagtcaggggatgaaaatcaggaatgaattttggctgcattactgagaatagaatgaatggtaatataataatgtagtaattctattttcggaaactgcgggaattataactgttcacataatggaaaatgtgatatagtaatcagtaaatcttatgaatgcaaccgtcaggtgtttcgcagaatggcggattgctgaacagttaccgaagaccattatgcagaaaatacaaaggagagagaatggcagataaaaatcaggacaagaaccagagtaagaacagagcagaacaggcagaagagcacgatgaaagcgtgctgaatccggagattaagaatgaatcggatttgtcaaagaaagaaagacgtctgattgagaaagaaaaattaaagggaatgggaccaaagaaaaagctggaatatatctggatgtattataaaccggctattttcggagtgatcgcagtgattgctcttatattcggaataaaggattactatgaacagtccaaaataaaaacagttctgtccatgacagtggtaaattcaatggcaaatgatacggaaactcctgagcagaaaatcaaagaaacacttgggtacaaagatgatccctatagtaaagtagagataggcgtgaatcttactacggactctgaaatggcagaatttgattataatgcacagatagcttatatggcacagatccaggcaggttccattgatattatggttatgccggagaagctttatcagactttgaagaagaatgagccatttgcagatttgaaggaattgatgggtgaggaagcttttgagaagtctggaatgcagacagatactacgcacatttccattactgacagtgagcttgaacaggaattaggtgtaatctacgatcctgtatgcattgcagtgccgtattcagcaccgaatcaggaaaacgcagtaaaatggataaaaagtcttgacagcaggagataaattatgatatgttaatcacaccaaaactggtgtggatttttcagtcttgtgacaaacatgaactcttttcgccgcacgattatcatacagcaatgtagagataattgtgtggcgttttttgttgcaatgaaacagagaaaggaaaaaagaatgaacaatacttttatgaagaaaaaaccgattctgccgcttctggcatctatggcaatgcctatggtactgtctatgctggtgaattcactgtacaacattgtagacagcttttttgtggcaaagatcagtgagcaggcgatgacagctctgtctctggtatttcctgtacagaactttattaatgcagttgccattggtttcggtgtgggaatcaatgcacagatttcttttcagctgggagcaaaaaatattaaaaatgcgaatatagcagctacccatggtatgctctttaatattatccatggaattatttttacagtaatctgtattccgtttatgcctgtatttctcagtatgtttacaaaagagcaggaagtgatctcatctggtgtgcagtattcaaccattgcatttgcattttccacagtgatcatgatcagcctgtccttcgaaaagatttttcaggctgtgggcagaatgaaactgacaatgatcagtctgatgatcggttgtatttccaatattatcctggatccgctgctgattttcggagtggggatttttccggaaatggggatcagaggtgcagcactggcaactggtcttggccaggtatttacagttattgtatatctgatcgcatataagaagtgtagtattccggtggagatcagcaggaaatatctggaacttaacaggaacctggacgggaagctgtatatggtagggattcccgcaatcctgaatattgccctgccgtcagttctgatctctttcctgaatcagatattatcggctttttccggaagctatgtagtggttctgggaatctattataagcttcagacttttttgtatctgcctgcaagcggcattgtccagggaatgcgcccgttgataggatataattacggagcaggagaaataaagagggtaaagaaactttttgggatttctgtgcttctgaatggtatgatcatgctggtaggaacgatcatctgctttacagcatcagagacattgatgggaatgtttactgagaacccggaaactgtaagacttggcactgcagcattacagattatcagtatcgggtttatcccatctgccatctctgttacagcttccggtgcattagaaggactgagcaaaggtgctcagtccctggtgatttcgttattaagatatattatagtgatcattccggcagcttatctgctgtgctattttgccggggcagatgctgtgtggaatgcgttctggatctgtgaatttataacagcagtagtagtaggtatcgggataaagtattactggaaccgtctgctgcagtagacgatagtgataaagctgctaagtcaggctgcgcctgcttcagcagactcagcatcagactctgcttctgaggcattttcatcagtaacatcttcggcatcggaattgcttccgccgctgagaacataagtgatgacttcgtccggaacgcctgcattggacagattatccataagtgtagtgaggtcgagtgtagctgcgtaggcactcatatcatcttcattggttacgtcataaacatctccaagagccgtaaggtccggaatttcaacagattcgcctgcaccggaagtaacagtgaagcttccgagagtgcttcctgcactttcaacggacagtgcaacagaaccagaatcttttgctgaatttaaatctaatacaagtgcaaagttctcgagcatggaaagagaagaatctgtatcttctgaagaatcagcagggaaggtgatagtatagttaccgtttaagtaaccttcttttgcagattcggtgtcgtagtcctttacttcgataacagctgcggctgtatcatcctgagaaattttataggttccgtttaatttaccgccatcaatctgaccggatccggacagggagagtgtgccggaatcatctgtttcaatggagagaagatagccaaagtctgagccgtccctggtcatctgccagttcagaacaggagttattttatcaccttcctgaaactcaattttacgtcctgcaattctgccggtttcatcaacccagattctggtgttgagatgagaatcatcggaatcaccggtatctgcatctttcagaaaatcaagaccgtcttctacagctttggtaaagctttcatgcaggtcctcattacttgagagtttctctgtccaggtatcgaggatgttctcaatatcactgtctgattttgcttcttccaggattgcagttgcagtttttacagcgtcttcggctgaaatctggccttcatatactgtacagtcctgactgatatcacctgctgtcagagtttcctgactgctttcgccttctgttacattgtcaaaaagcatagatccgtatttatccagaagtgtttctactacagaagcttctggagctgctgctgacagatcagacatcatggaaacagtcaggctgagactgtcagaataagcggaagcgaaattgtctgtcggaatatctgcatctgaatcatcaggggttaattcttcaagatcattttcaatattggcagcctgttggtctgcggcttcttccagattggtcttgaaatatttatcagagagttcagggatgcgcatataaatatcctggctgtccggatcaagataatattccagagtacagattttattatcattaagaaggaccttcatcagaataccttcttttccttctgtaaaagagatatcattggaaagtgtgacattgtccagccaggagacatcaaatggtgcgacaaaccccagcaatgagcgtccggaatcttcaaatttcagaatcatgtcactctgcattcctgacatcagagactggctttcttctatagatgtagcgtaagaagatgccatttctgtgaccttttttgcccatgcatctttttcaatggaagcgtaactgtctgctgcaaatgctgtagatggaattgcagcagtaccaagaagtgctgcagtacagatagcggttgtttttcttaaccattttttccttgttttcataaagggcctccttccgttctgttatgaatcttatgtagtggaattacatttcaggacattcattttcagatatgtcgtttgactgaaataataatctatagcagtccttgtaaatgatttttcaaatacgctctatattaagatgcattattttagaggattgctatatatcaattttaccagataaagatagaaaaagctatgttttttcgacaatatggaaaaagatgttgattttagactaaattatttctatagaaaaataacaaaatatagacaaaaactatatgtgtatataaataattgatataagaaaatttattgacagatttatgtgaaaaatatatactactattcatatcaaaacactatgaaattagtaaaaacagggaaacgatatatcacagaaaacataccgttagtccggagattattatattttacaaggggaatatgctcatggaatttcagactaaattattacacggaaaagcagtagacaattatgcgaatggttcaacagtgccgcctatcagcctggcaaatgcttttgcatatgaatcttcagaacagttggaaaaagtattccagaatcgggcaccgggatttgcatataccaggattgcgaatccgacagtagatgcgtttgagcgaagagtaaatgaattagaaggcgggattggaggtgtagcctgttcctccggaatgtcagcggttacattatcattacttaatatcctgcaggcaggggatgaggtaatcgcaggaagtgcattgttcggaggtacactggatctgcttcatgatctggaggcattcggaatcaaagtacattttataccgagggtagagaaggcgctgatcgagccgtttcttacagataagaccagagcagtgtttggtgaaatagtaggaaatcccgcactgaatgtaatggatgtccgggaaacagcagattttcttcatggaaaaggagtaccgctgattgtagacagcacaacttcgactccgtatctgcttaatccgattcagtatggtgcggatgtagtggtgcattctacttctaaatatataaatggaagtggagatgccatcagtggaattatcattgacagcggaaacttttcctggagtccggaacgttatccgggaatgaaggaatataagaaatacggaaagtttgcttatcttgtgaaactgaggaacggaatctggcgaaacatgggcggctgtctggctccgatgaacgcttatctgaatattatcggaatggagacacttggtcttcgtatggagcgggtctgtaataacgctttccggcttgcccaggcactggagaagctggaaggtgtatctgtcaactatccgctgctggagtccagtccatatcatgaactggcagaaaaacagcttagtggaaagggcggagcgattctgactatccgtgcaggttccaaagaacgggcgtataagctgatcaatcatctgaaatatgtaaagattgcaaccaatatcggtgatgtgagaactctggtgattcatccggcgtctacgatttatattcatagtacgccggaagcaatggcagaggcaggagtgtacgacgacacaatccgtatcagtgtgggtatcgaagatataaaagatctgatacaggatttcacagaggcagtggagagccttggagaagaataattcatgatatacacattatcaggcgctttggtcggaacatgatagtaaccggacagaggcgctggtttaaaaacagaacaactgacagacagtcagagacaagagaagccccggaagttcaggagtgtccagttaagtggaactcgatgatcttccgggcttttttgcagcaaaattttttcagatattgaatctgtttccgaaaccgtttcgttataaaaaatagcggttaaaaattaacaactatctgcgggcgcgtttttcaatcagtccgaggagtccgtacaggataatagcgatgatgcacagaatgataatggacatcagtacccaggtaagcttaaaggtctggctggaatagatgatcaggtagccaagcccttttctggcaccgataaattcgcctatgataacaccaaccagacacagaccaatattaactttcataacactgagcagtaacggcacagaagacggaagaataatcttcataagcttttctttcttcccaccgcccagcgtctcaatcagcttcagtttttccgggtcagcttcgccaaaacctgtatacagattcaaaatcgaaccaaagatagcaaccgacataccgcagacaataatcgtccgttcgttggcaccaagccatacaataagcaaaggtgccagagcagatttcggaaggctgttcagtactacgagataaggctctgtgatcttcgcaagtctgggacaggtccacagcagaaccgccatccctgcacccagaacaacaacgaacagaaaactgaccagtgtttccgtaattgtaacagagagatggggaaaaatagagccgtctctgcacatactgcagaagctgtgccagatcattacaggactgctgaagataaaagaatcgatcagcccggtcctggcggagatttcccacaacaccagaaagaaaagaagaataaatatccgcaaaaaaagaacaagtttcttttctcttttctgatgtcggatatactgttgctgatgatatgagatttcagacatcatgattcagctccttccagataagattgaaataagatttaaattcaggcgcatttctggaaaccataggagtacggttttccagatcaaaacaaactggcacaatcttacgaataatggcaggccttggagaaagaatgataacccggtctgccatgctgatcgcttctgaaatatcatgggtgacgaggatcgcagtctttttttcctgacgcaggattctgccgatatcatcacttacgctgagtctggtttgagagtcaagtgcagagaacggttcatccagcagaagaagttccggctttaatgccagagtacggatcagtgcagctctctggcgcattcctccggacaattcagacggatgagcagagcggaatttgtccaaaccgtaatctgagagaagctgatttacataagcaagtttttcggcagtgagttccctgcggatttccagtccgagaagaacatttttataaattgtccgccactccagcagatgatccttttgcagcatatatccgatacggcagtcaccggaagttaccggtgtgccgtccagaagaatctgtccctgttccggccggagcagaccgcagatcagattcagcagcgtggactttccacagcctgacggcccgacgatggcgagaaattcacctggcatcagttgaaaggatatatgagaaagggcaggggtttcccctgataaactgtggtaggagagactgacatctgtaatatccagcagtggtttcatacagatacctccatattcggtgaatagtaacgaatattttcataatttatgatatgcagaaatgtcagggtatgatataatagatagactatagtatttttgctgctatagtatttgagggcaaatgttctgtaaggaatacgttactgtttactatgtgtttcatatcagaaatatacatatatcagacactgtgacatacatgaattgggtatagaaatcagacgaatgctgtaaaaaaatgtataagaaagtgtaagcaaatgagaaacaaaaagaaagcaatatttaacaccatttttctgatccttatattttccattaccgtatatatggtatttaagggagaggatctgggagagattattcatacagtacggcaggcagatccggtttacttactggtcagtgtggtttgtgtggtactgttcatacttggcgagtctgtaattattttctatatgatgcggactctcggagcaaaagtaaagatggggcattgtgctctgtattcttttgtgggattctttttcagctgtatcacaccgtctgcatccggcggacagccaatgcagatttattttatgaaaaaggacaaacttccgattcctgtcactacgctggtcctgatgattgtcacaattacttataaagcggttctggtagtgatcggaattgtaatctggatttttggcagaggctttctggaaggatatcttggccagtacatgtgggtgttttacctgggtgtaggtctgaatattttctgcgttactttcatgatgatccttgtatttgcacctggactggcgaaatggatcatggtaaaaggtctgaaacttattgaacatttccgtttccttaagccaaagacaacccggcttgagaaactggaagcgtctatggaccagtatcatgaaactgcggctttctgggcaagtcacaagctggtgatcctgaaagtgttactgatcactatggtgcagaggattttgttatttacagttacatactgggtataccgttcgctgggatttcatggatattccattataacccttacgattttgcagtctgtcatatctgtctctgttgatatgctgcctttacccggaggaatgggaatcagtgagtctctttatctggtgatgtttgcaccggttttcggagaagcattacttcctgcaatgctgctcagcagaggaatttcctattatgcacagatgcttatcagtgcagtgatgacctgtgtggcgtatttcataataggaagaaaagaacaagaagaaaagtag

SEQ ID NO: 446 - DNA, 8966 bp, unidentified
  source 1..8966: mol_type = unassigned DNA
atgaagcttccaggttattatacgtccggtcagtttgcacatatggcagaggtatcggtacggacaatccgctattacgaccaacagaatattttaaaaccttcttatattaatgaaagcggtgcgcgtttttataccgatgaggactttgtacggctccagcagattttattattgaaatatctcggtttttcactggaagatatccgtgaaatgacgattaatgataccgactatcacctgatgcagaatgccttaaatctccagttaaagctgattgatgataaaatcgaacagatgcagctggtgaaacaggcaattcaggatacttcccgtgaaatttccaaaaatcacaccgtaaactggagccagatgctgcatctgattcacctgaccggcatggaaaagagtttaaagacacagtatcagaatgccagcaatatttctgcccgtatccgtctgcatgaaatgtattcccaaaatcagacgggatggtttccatggatttaccacaactgtaaaatcacagacggcatgcgcattctggaaatcggctgtggggacggtacactctggaatgaaaatatggcaaaacttcctcaaaatatttccgcagtcttatccgatatttcagaaggcatgctgcgtgatgtcagaaggcgtatcggcagtgattcccgcttttcttttcaggcatttgactgccaccggattccatttgcctcagacagctttgaccttgtgattgccaatcatgtactgttttactgtgatgatattgcaaaagtctgccgtgaagtatcccgcatattagttcccggaggaaggtttctatgcagtacctacggtgcttcccatatgcaggaaatcacggcactcgtccaggaatttgacagccgtatccagttatccggtgatgccctgtatgcaaggtttgggcttgaaaacggtgcggaaattcttgccccgtatttttcggatatttcaacgcggctctatgacgatgccttatatgtcacggatgcggcaccactgattgaatatattctctcctgccacggcaaccaaaaccagtatctgttagaacgttatcaggatttccgccgctttgtagaaaagaaaacctgcaaaggctttcatattacaaaatcggcagggctttttatctgccggaataaaatatagaaattctttcataaaattttccggaaaaagcttgaaggtgacgtaacgtcatcttttatactgggtatattgacaaaatttatttgcctgattttagaacaaagcatttactgtttctacaaaagactggaggttttatgaaaggaattattttagcaggcggttcaggcacacgtctttatccgctgacaatggtcacttcaaaacagctgctgccggtttacgataagccgatgatttactatccgctgtccgtactcatgaatgccggcatccgcgacattttaattatttcaacaccacaggatttaccgcgttttcaggaactgctgcgcgacggcagccagtttggtgtccgcttatcttacaaagaacagccaagcccggacggactggcacaggcatttattatcggtgaagaatttatcggtgatgacagtgttgccatggtactcggcgataacatttttgccggacacggtttaaagaaacgtttaaaagccgcgattgaaaatgccgaaagcggcagaggtgccaccgtttttggctactacgtagacgacccggagcggttcggtattgtagaatttgacaaaaatggcaaagccgtatccattgaagaaaaaccggcaaagccaaagagcaattactgtgttaccggcctgtatttttatgacaaccgcgttgttaaatacgctaaaaatttaaagccaagtgcgcgcggcgaacttgaaattactgatttaaaccgcatttatctggaagaaaaccagttaaatgtcgagcttttaggacagggttttacatggctggataccggaacgcacgaaagccttgtcgaagctaccaattttgtaaaaacaattgaacagcaccagcacagaaagattgcctgccttgaagaaatcgcttatttaaacggctggatttcaaaagaagatgtattaaaggtttatgaactgttaaagaaaaaccagtacggacagtatttaaaagatgtcttagacggcaaatatatggatgtactgcactaaaggaggatttatgactattattgtaaccggcggtgccggatttatcggaagcaactttatttttcatatgttaaacaaatacccggattacaggattgtctgcttagactgcctaacctatgccggaaatttatcaacgttagagcctgttatgaacaacccgaatttccgttttgtaaaggaaagcattacggaccgtgaggccgtttaccgtctttttgaagaagaaaagccggatatcgttgtcaacttcgctgctgaaagccatgttgaccgctctattgaaaacccggaaatctttctggatacgaacatcaaaggtactgccgttttaatggacgcctgccgcaaatacggcattacacgttatcatcaggtttctaccgatgaagtatacggcgacctgccgcttgacagaccggatttattcttcacggaagaaacgccgattcacaccagcagtccttacagttcctcaaaggccggtgcggatttactggtgcttgcctaccacagaacttacggcctgccggtaacaatcagccgctgttccaacaactacggtccatatcatttcccggaaaagctgattccgttaatgattgcaaatgccttaaatgacaagccgcttccggtttacggaaaaggtgaaaatgtgcgtgactggctctatgtagaggaccactgcaaggcgattgatttaattattcacaagggacgtgtcggtgaggtttataatatcggcggccataacgaaatgaaaaatatagatatcgtaaagattatctgcaaggagcttggcaaaccggaaagcctgattacttatgtaaccgaccgcaagggacacgatatgcgttatgccattgacccgacaaagattcacaatgaactgggctggcttcctgaaacaaagttcgcagacggcattaagaaaaccatccggtggtatctggacaatcaggactggtggaaaaccattatttccggcgaatatcaggattactatgaaaaaatgtataaaaaccgctaatagaaaggacataaatttatgaaagtgcttgttaccggtgtcaaaggacagctcggacatgacgttgtaaatgaacttgaaaaacgcggacacactgctgtcggtgttgatattgaagaaatggacattacggactttgccagtgttgaaaagacactgacagcggtttctccggaagcggtcattcactgtgccgcatggacggctgtcgatgccgcagaagatgccgaaaatcaagaaaaagtccatcttgtcaacgccatcggtacggaaaatatcgctaaaatgtgtaaacatctggatattgcctgcatgtatatttcaaccgattatgtatttaacggtcagggaactgacagctggaaaccggactgtaaggactatgcaccgttaaatgtgtacggacagagcaaattagacggggaactcgccgtttccggtctgctttccaagtattttatcgtccgtattgcatgggtattcggtctaaacggcaataactttatcaaaacgatgttaaaggtcggcgcaagccacgataaactgacggttgtcaatgaccagattggcacaccgacttatacgtttgatttagcacgcctgcttgtcgatatgatcgaaaccgacaaatacggttactaccacgcaaccaacgaaggcggctttatcagctggtatgacttcgcgacggctatttttgccgaagctgtggctttaggacacaatgaatatgacagcggacatttaacggttgctcctgttaccacggcggaatacggcatttccaaagccgcaagaccgtttaacagccgtctggataagcacaagcttgttgaaaacggatttactccgcttccgacatggcaggatgcactaaaacgatatttgaaagaaattttgtaataacaagggcatgaaaatgcccgtggaatggagaagtgtgaaaaataacgctgatgcgcttatttttcacacggagatttgtttctgagcgaaaacaaatctccatgattgcagatgagaaatcgcctgcgcgaatttctcatcgcatcttcgcaacaagttgctcagaaaaggagataatatgggacagattcaggttgaaaaaaatgcaggcggaattgaaggcctgtgcgtgattacaccaaccgttcacggcgattcacgcggatattttatggaaacttacaatcaaaaggatatggaggaagccggacttacaatgcagttcgtacaggacaaccagtctgcttcttcaaagggtgttctgcgcggtttacattttcagaagcagtacccacagggcaaactggtacgtgtcatcaaaggctgcgtttttgatgttgccgtggatttacgtgaaaacagccagacatacggcaagtggttcggtgtggagctttcagaagaaaataaaaagcagttttatatcccggaaggctttgcacacggatttttagtattaagcgataccgcagaattctgctataaatgtacggacttctaccacccgaatgacgagggcggtctcgcatggaatgacccggaaatcggaattgtatggcccaagcttaccggctcctataacggcaccccgtccggagacggctatagccttgatgacggcacgaagctgttactcagcgataaggatcagctgtggaagggattgaaggatacgtttcatttcgcataaagtgtaaaaataagaaagcagtgcagtaccaaaaacgcctcaacgtgttacttgacttcggcttattttggtactgcactgcttttatttacgctttggctccatgaggggagagcatggcagtcggaacattataggcaaaaatttaccgtgttacttgacttcggcttattttggtactgcactgcttttatttacgctttggctccatgagggaagagcgtggcagtcggaacattataggaaaaaatttaccgtgttacttgacttcggcttatttgggttcttccctgcttttatttacgctttggctccatcatttacagttaagcgaattttctgcctgttaataattcaaatgcttctttatattttgcaattgtcttatcgattacatcgtccggaaggaggtagtcgctgtccggatttgcttttaaccagtctcttacgaactgcttgtcatatgacggctgtgactttcctgcttcgtatccttctaacggccagaatcttgagctgtccggtgtgagcatttcatcaccgataacaacgttgccgttctcatccagaccaaattcaaactttgtatctgcaatgataattcccttgcttaatgcgtattctgcgcacttcttgtaaagcttgattgtacagtccttaatctgtgttgcataatctctgcccttgcccggataaagcttttctaacacttctacgctctgctcgaaagaaatattttcatcatggtcgcctaattcagcctttgtacttggagtataaatcggttcaggcagtttttctgattcctttaaaccttccggaaggctgatgccacaaacagtaccgttcttcttgtagctttcccagccactgcctgtaatgtatccacgcacgatacattcaatcgggagcatttccagcttcttgcacagcatgctgtttccgtcgtatttttctgactggaaaaattccggcatatcttttacatctacagaaaccatatgattctttacaatatcctttgtgtaatcaaaccagaactttgacatctgtgttaagattgcacccttatctgtaatcttattctttaaaatgtggtcgaatgctgatattctgtctgttgccacaagaataagattctctccgatatcgtaaacttctcttacttttccttctttgaatggtttaaattcctgcattttctttatatcctccattttttacaatttactttagtatacaatattcgacaccggtactcaagccgtattttatgaaaatatgccaagcgcaggcaatttctcatctgccatcacctgacttcaaaactgctgtgttccccgctgataaatttcattgctccgataatcgaattttctgccatattggatacggcttcatccgtgtaaaatgcggtatgcggtgttacaacgacattggaataggaacgcaggattgctagctttggattgccaagcggttcacccatacggttaaaataatacagtccgctctcatgttccacaacatctaaccccgcaaaaccaacttttccattttcaatgccttcaattaaagcatccgtgtcaatcagcgcacctctcgcacaattgattataatgacaccgtccttcattttctgaattgcctgcgtatcaatcatgtgataattatcatctgttgccggtgcgtgcagtgtaataatatcactttcccgaatcagtctgtcaaggcttacgtattctgccttttcccttactgcttcctgctcgtaaatatcataagcaagcattttacagccaaaaccgccaagatggtcaatcaccgtttttccgatgcgtcccgtaccaattacaccaaccgtacagtcgctgaactccctgccgatttttcctttgagcgtataatcctgaatcgcggcacgttccataatgtgctttgccttacggcaccccatcagcattaacataatggtataatccgccacactcgccggattgtaagttacatgagtcacacccatgccaagcgtatgggcatattccgtatctatatggtcatacccaatcgttcttgatgaaatacagcggattcccgccgcataaaacgcatcaatcatcggcttatccataattgtcgtgataatatccacaacatcatagccctttgcaagctctacattttcaaggcacggtgtctgtgtcgtatacccgaattccacaccgtattccccacagaacttctcaaaaaaggccagttcatcatattctctcatactgtatacaaaaagcttcattatactactcctattctgagcgatttctcatctgccattaggcaatttgttttcactcggaaacaaattgctgtgtgaaaaatctttcatttatggatttttcacactagtcggcatactctgacgtaattcctaaatattcttccagtgaaagtccactgttatacacctttgttgccatgtcaatgcctaagtaacgcaggtgccacggctcatactgatagccggtctgtgcatcttttccctttggaaaacggataataaatccgtactcctgtgcatgctgttccagccatgcactttccttcgtattaccaaaggaatcatcaatcgtatttaaatcaaagcagagtcccgtctggtgttccgaatatcccggtcttgacgaatacgtatctgccagtgcctttccatcactctttacataattgttatacagtgtctgctgacggctgtatgagcggtaacctgaagaaatgtaaatatttaagccctgtgcggcagcggctttctgcatgactgcaaaggcttctttgacttccggcagcaaatcacccggtgcatagctttccggcagggaataagacttattggcaatcatcacgccgccgatatacgtcacaccgtctaccacctgaatggcatagccctttgccgtcacactctgtacctgtgtgcctgcaagtgtttctccggctgcttctgtctgagatgtctgctggccctgcacagtatctgtaccgttttctgtctgtgataccgtctgtgcagaagtatcattctgcaccgtctgtgtctttttatgatgtcttataatgccagccactacaagcactgccacaagcacaagcgctgctgcaagcactgccgcccgcgccgcggcagtctgtctgcgcctgcgtgccttttcacgttttctgttatctattcttaccggttttgtacccataattcctccgattcatattaggatagcttctgtaaaaatgcttttgttctttcattatccggattatcaatgacatcttccggctttccctgctcgacaatcacaccgctgtccataaaaataacacggtctgccactttccttgcaaatgcgatttcatgcgttacaatcaccatcgtcattttttcctgtgccagctcacgcagtacctttaagataccggctgtaatttccggatccagtgccgaagtcggctcatcaaaaaagagcattttcggattcatggcaagcgctctggcaatcgccacacgctgctgctgtccaccggataactgtcccggatagctgttttctttttctgcaagtcctacttttctaagcagctcccttgcctctttatagacttcatccctgtcacgcttctgcacatgtatcggcgcatccgtcacattttttaaaaccgaataatgcgggaacagattaaaattctggaaaaccagtccaaaattattctttaactgtgccagctgttgtctggatacgtaatgggtggcttctccctccgcattatccgttgccgcttccccacagtatttcaaaacacccttatccattgtttcaagcagggttgcacagcgaagcagggttgattttccggagccggatggtccgataattgctacaacctcgccttcttccacttccattgatatatcttttaatacttcaagctcgccaaaacttttgccgacatgcttcatctctaataatttcat

SEQ ID NO: 447 - DNA, 8711 bp, unidentified
  source 1..8711: mol_type = unassigned DNA
ttagaaatctgttaaatcagcagctcttctctctaagaaagcagtcataccttctgttttgtcatgagtagagcaggttacgccgaataagtttgcttccatctcaacagcgttcttgatgtccatatcataaccgttgttgattgctgcttttgcaacggaaacagcgtagcttcctttggagatgattttcttagccatagcttttgctgtgttcattaactcttccggagcaactactttatttacaagaccgatgcggtaagcttctgctgcatcaacggaatcgcaggtaaagatcatctcttttgcgcgtcccatgcctactaaacgggcaagtctttgtgtaccgccgaatccaggaatgattccaagacctgtctctggctgtgcgaaagtagcgttgtcagatgcgatacggatatcacatgccatggaaatttcacatccaccgccaagtgcaaaaccattaacagctgcgatcgttacctgacgcatgttcattaatttgaagaatggtacggaagctctcataccgaaagctcttgcttctgctgcggtaaagtttaccatctcagaaatatcagcgcctgctacgaaagatttgaattcgttgcctttcttgtcaggaccgccggttaagattacgactttgatgtcatctcttgcttcgatctcagttaatgctgtgtttaactcgtctaatgtctcactgtttaatgcgtttaatgctgctggtcttgaaattgtaagaacagcaatctcctcagcaacttccagttttaaattgttaaaatcgctcatcgtttggaaccctcctgaatagtttgataaaaaattaacaatatacgttattaatagcgtacagcttttccctgaatttgtcaatagattatgggaaaaattcactataaatttggtagaaaaagtgctatgataggtggtatgatattttgacaaagacacagaaaagaggaaaaaccatggacacaagcaaatcatacttatctaaggtagtaaaggagatgccggattcagggatcaaggacttttttgatattgcaaatacgatggagggagcattgtcacttggtgtcggcgagccggattttccgacaccggaacatgtcagggaggcagcgattgcttcaatcaaaagaggtgagacaaagtataccgataatcgcggtacggtcgaactccgtgcggcagctgcagagtatttagagaagtttggacttcattatgacagggaaaatgagatcctgatcacgatgggagcaagtgagggtattgatctggcgcttcgtgcactggtggatccgggggatgaggtgttagttgtagaaccttgctatgtttcctatattccgtgtgtggaattgtgtggcggcattccggtttccatcccgttaaaggcagagaataaattccgcctgacgaaggaagaacttgaagaaaaaattacagataaaacaaaagtactgctgatttcattccccaacaaccctaccggagcgatcatggaaaaagaggatttagaagcaatccgtgaggttgtgaccgcacatgatatttttgtgattacagatgagatttatgcagagctgacctatggcaaaaagcatgcatctattgcggcgctgccggatatgtatgagcgttgtgtggtattaaatggtttttcaaaagcatttgcaatgaccggatggcgtatgggtattgcagcgggtcctgcggaagttatttttcatatgaataagatccatcagtttacgaccatgtctgcaggaacaacgtcacaggtggcggcgcttgaagcattgacgagtccggttcgtgacgaagagatcgatgtgatgcgtaaagaatacgatgagagacgaaagatcatggtggacgggttccggaatatggaactggatgtgacagaaccggaaggtgcattttatgtattcccgtcgatcaaaaaaacaggacttaccagcatggaattttgtaaccgtctgctgcaggaacagaaggtggcagtcattccgggagacgcatttggaagttgtgcagagggttacatccgctgctcttatgcttattccaaagacattattaagaaatgtttagagaagatcgcagtatttgtcagccagtttgacctcaaataaggtactggtttgaaaaaaataagcgcagacatgaaggctgctatataacaaagaaagtttgagacatacatgttaaaagattacgacttaaagcaactggtatccccattattgcaatggtttttaaatcatgcccgtgtattgccatggcgagaggaaccgactccataccgggtgtgggtttcggagatcatgctccagcagacgagagtggaggcggtaaagccgtattttgagcggtttaccacggcactgccggatgcaaaggcacttgcagtgtgtccggaggatgaacttttaaagctttgggaggggttaggttattataaccgtgtcaggaacatgcaaaaagcggctgtggaagttgtggaaaattatggtggacaacttccggcagattatgagaaactgttgaaactaaaggggatcggccattatacagcgggagcggtcgcatctatcgcatacggaatcccggttccggcggtcgatggaaatgtgctccgtgttttaacgcgcgtttctgcggatgatacggatatcatgaaacagtcattccgtaatgagatggaaaaattattagaaaaattgatgcatggggcagacggcagaaatgaaaaaaatgtatttccatggatggaggatgcagatgatctgagggcaaaggtatatcatcagaatcttgccggtgcgtttaaccaggcactcatggaacttggagcaacgatctgtgtgccaaacggtgcaccgctttgtaccgaatgtccatggaaggatttttgtgaggcaaaaaaacaggaactgatcggacagataccagtcaagagcaaggcaaaaccgcgaaagatcgagaaaaaaacggttctgattttaagggatgatgagaaggttgcaatccggaaaagaccggcaaagggacttttggcaggactgtatgagcttccgaatgtggaaggaaatatgggacaggaggaagtactttccatggtaaaagagatggggtatgcaccgatccgtattcagccgttaggtgaggcgaaacatattttttcccatatcgaatggcacatgacaggttatgcagtccgtgtagaggagccggaaatgcatccacaggtgaagtgtgaaaaaaatcgtgcagatggattattatttgtggaagcagaagatgcaaaagaaaaatatgctattccgtccgcttttgctgcgtatgcgaaatatataaacattcttcttggaaatgaaaagaaagcttaaaagaaaatatttataaaaagagggagccggtgcaacagcaccggctattcattatgaaaaagagtgtgtatgaaaagtgaagtaattcactatttgctgggaggaaccttgcttatcggataagcaaggctacctgacttacatcaggtatgaaaaaaagttctatgaaaaattttaacttgttgccttaactttgaatttagtatatcggggaattgtgaccgccgtatgccctgtttgtgagaattatgtaaataaaatatgaacaactacatactttggcagaaattaagaatatctaaagaaaaatttgattggtttgcggtaggaaaatgtgtataatagaatggctatggtaaaacaaagtggaaaacaaagtggaaaacaaggaggattacatgtacgattgtatcgtgatcggcgcaggaattgcgggtgctgtcagtgcgagaaagcttgcagaggaagcaggaaagaaagtactggttttagagagacgcagtcatatcggaggtaactgctatgatgagccggatgaacatggaatattaatacataattatggaccacatatttttcatacaggaatagaagaagtatatcagtatctctcaagatttacggactggtatgtattcggacatgaggtggtagcaaaggtcggggatcgtctgatcccggttccgtttaatttaaatacgcttcatatggtatatgaaaaggaaaaagcagatgcattagagcagaaactgattgctgcatacggagagggaagccgcgtgccgatcatgaaactgcgggaaaatgaagatccggacatccgcgagatcgcacagtttgtgtacgaaaatgtatttttaaaatataccatgaagcagtggggacaaaaaccggaggatatcagcccggaagtgacaggccgtgtgccggtgctggtttcttatgacaaccgctattttcaggacaaatatcagggagtgccgaaggaaggtttcacaccgatgtttgagcgcatgttagaccatgagaacatcacggttgagacaggtgttgactgtaaagagagattacgttttgaagaaaatcagatttattttgatggaacaccgtttgacggagaggttatctatacgggcgcactggatgagttgtttgactgtcagtttggaaggcttccatatcgttccttaagatttgactttgaacattatgagaaagaatcttatcagggacacagcgtggtcaactacacggtcagtgaggattttacaagaatcacagagtttaagtatctgaccggacaaaagaacacggacggaaccacaatcgtgaaagagtatccgtttgcctacacaggagcggagggagaaattccttactatgcgatattagagccaaagaaccaggaactctatgaaaaatatcatgcgcttgcaggtggactgccgcatttttatctgctcggacgactggcagaatacaaatactataatatcgatgcgatgacgaaaaaagcgatggaacttgctgatgcgatcatggcagaaaatacaaaaagataatcggaggattcatatatgaaattactgacatttgcgatcccgtgttacaattcacaggattacatggaaaactgtatcaaatccctgctgccgggtggcgatgatgttgagatcctgatcattgatgatgggtcaaaagacagcaccggtgacatagcagatgcctatgagaagaaatatccgggaatcatccgtgcaattcatcaggtaaatggaggacacggagaggctgtcaatgctggaatccgcaatgcgacaggactttattttaaagtggtagacagcgatgactgggtagatgaggaggcttataagaagattttagataaacttcgtgagctgaccggcggcaatcagaccctggatatgtttattgccaattatgtatatgaaaaagaaggtgcgcatcataaaaaagtgatgcactacacgaacctgccccaaaatcagatttttacctggaatgatgtgtcacgtttcagaaagggtcagtacattttgatgcattctgtgatttatcgtacaaaactgctgcgtgaatgtggattagagctgccgaaacatacattttatgtggataatatttatgtgtacaaaccattaccaagtgtaaaaacactgtattatatggatgtagatttttaccgttactttattggcagggaagatcagtcggtcaatgagaaagtgatgatcagccgtatcgaccagcagatcaatgtaaataagattatggtagatgaatttgatctctggaagattccaaaccgaaaactgcgtcattacatgtttaattatctggaaatcatcacggtcatttccacgattatgctgatccgctccggcactgaggaaaatcttctgaaaaaacgtgaactgtggaaatatattaaggatcacgacatccgtttattccatcatctgcgcgccggaattatgggaaatgcaatgaatctgccgggcaagggaggcagaaagatttcggttgcggcatatcgactgtcacagaaagtggtcggatttaattaagaggtagtgagagtatgagtgaagaaaataactggaattatggaaatgatgagccgaatgtaaatcagggaaatcctgtcagcctggagaaaagtacgactgatggtacagcaggtgtaaatttagagaagactgtgaccggaaatgaagagcgtgtaaattcagaaaagactatgacagacaatccgtattatacaaatacgtcatatggaaacggcaatacaaattataattacggacagtcaaatgacagtgcaggttataactatggacagtcaaacggaagtacagaatataattacggacaaccggctggcaggtatggaagtaataagtcagaaagtgaaggctttggtattgcgtcgttagtacttggaatcattacggttttgctgttctgtacctgtatcagctggatcaccggtattcttgcgattatttttggtatcatacagcttgtaaaaggaaacaaaaaaggaatggcgatcgttggtttgatcacaggtggaatcggttttgcagcatcgattattctgtatatcctgattttttttacaggacttggatcttatagcagctataatgacatctatgatcatatttacgatgatatctatgatgatattgaagacagtatggatgacggaacgatataataagactgccgagcgaagcgagtgtagatcacgatcatgatatagaaatttttaatggagagggttatggaagagttattgacagtcagtggattatccaagacatttcacttgtcaaaaaaacagcagaaattagaaaagacaacggaaaaagttaaggttgcggtggatgatctttccttttgtacttacaggggggaagtttttggattattagggcccaatggagcgggaaagacaacaacgcttcgcatgttagcaacgctgatcaaaccggataaaggtgatgctctgattgacggaagcagtattgtgacagatccgaacggtgttcggaaaaagatcggatttctgacgagtgaattaaaactggaagaattttttactccgaactatctgtttgattttttctcagaattatacggtgtcgatcaggcagagcgggatgagagaaaacgtatcctgtttcagaaatttggtgtggatgagtttgcggaagtgaaggttgcaaatctctccactggtatgaaacaaaaagtatccctgatcatttcactggtgcatgatccgcagatcattatttttgatgagccgacaaacggacttgatgttatcacggcgaaggttgtgaccgattttctgcaggaattgaaagcagaaggaaaaacgatcattgtatcaacacatattttttcactgatcgaaaagatctgcgaccgtgtcggcattatcatcaacggaaaaatggttttgtgtgacacgctttcccatgtgacggcggaaatgccacttgaggataagttctttgaaatctatcgggaaacggcaggtgagatagtatgagtaaaaaaatgattgcaatcatgaaaaaagagtttgcccgctttttcggagataagagactggtgtttaccacaattttaatgccggggcttatgatctatattttgtatacgcttctggggcagggaattatgaagcagtttgccgcttcggaggattatgtatatcagatctatacggtggatctgccggaggcgttttcttatttaaagacagagtctgatctggaagtgacggaaattacagtagaaaaagagtctgatgtcttagaaaagatcgaggcggaggaagcagatcttttgatggtgttccagtcggattttgatgcggctgtcgctgcatatgatccgttagataccacgcaggcagcaccggatatcaacatgtactataattcagtttcgacggaatcgtcgacgatctacaatcagatgtatcaggtttttgatgattatgaatcttctctggcaaataagtttgatatcaatgccgaagaaggtgtgaaatatgatgttgcaacggaaaaagatacttctgcacagcttttttccatgcttctgccgatgcttttgatgtcatttttattcagtggatgtatggcggttgcaccggaatccatcgtcggggaaaaggagcgcggaacgatcgcaacgctgcttgtcacaccgatgaaacgcagcgagcttgccgtcggaaaagtcttaagtctgagtgtcatcggacttttgggcggagtttccagctttatcggcacgatgctggcacttccgaatctgatgggcggtgcggcgcttgaggatgacagtatgacgggtgcgatgagcgctgcagtttacagtggaacggattatgtactgttgttatttgtcattttaagtacggttctggtaattatcggtgcaatctccctgatgtccggcctggcaaagagcgtcaaagaggcaggaacgatggtttcgcctctgatgatcgtcgtcatgctgatcggtgtgtcgacgatgttcggggatggtgcgccgaaggaggtttactggtatctgatcccgttttataacagtgtacagtgcatgaatggaattttttcctttgatcttgtgcctgttaattttgtggtaacaatcgtggcaaaccttttgtatgcactggttatgacggccgggttagcaaagatttttgacagcgagaagattatgtatagttga

SEQ ID NO: 448 - DNA, 13530 bp, unidentified
  source 1..13530: mol_type = unassigned DNA
atgcgggcggtctttcacggctggcccggaaatgatgaaacaatagataccgtcatgtttgatccaaatcaaaaacccgatacagcccgggcagaaaattccattttcggctctccggaagcagacaacctcctgcccaaggatcagttcccggattacgccatgcgtgcggaggacgccttccagttggtgtccgatgaattgatgctggacggcaatgcccgccagaaccttgccaccttctgccagacgtgggatgaaaagcaggtcaggatgctgatgaatatcagcattaacaagaatatgatcgacaaggatgaatatccccagacagccgctattgaaatgcgctgtgctgccatcattgccaacctttggaacgccagccaggatgaaaaacccatcggctgttccaccatcggttccagtgaagcgtgcatgctcgggggtatggccgccttgtggcgctggagagcccgccagaaagctgccggcaaacccactgacaagcccaacctggtatgcgggcccgtccagatctgctggcacaagttctgccgctactgggacattgaaatgcgtgaaatccccatgtcacccggaaaatggaagatggatgtggacagcatgctggaacagattgacgaaaacaccatcgtggtggttcccacgtttggcgtgacctacacgggcgcttatgaattgccggcggagattgccaaggccctggacgattatgaagacaggactggcatcagtgtagacatccacgtggacggcgccagcggcggtttcctggccccgttctgcgctccggacattgtctttgacttccgcattccccgcgtcaagtccatcagcgcttccggccacaaatacggtcttgctccgctcggagtgggctgggtggtatggagagacatcgccgacctgcctgaagggttgatcttcaacgtcaactatcttggcggtgaaatccccaacttcgccattaacttctcacggccggccggacagatcatctgccagtattatgacttcatccgtctgggcaaggaagggtataccaacatccatacccaggcctatgaagtggccaagtacatttcagatgaggtttccaagctggggccgtacgaattcatttgcacgggcgatccggaaaagggcattcccgccgtctgtttcttcatcaaggatggagccaagacgaactataccctcttcgacctctcggacaagctgagaacccgcggctggcaggtgcccgccttcaccctccctgccaattgccaggatacggtggtgatgcgcgtgatggtccgccagggcttcaccaaggacttggcagacctgttcctggaagacttcaagcgcatggttgatttcttcgagaaacacccggtcacttctccgatgactgcggaagaaggcacggccttccaccactcctgatggagaagctccgcataataatttttgttggatgaataagtgtgtgtaagcgcagctccgcagttgtcaaggtttgtgcgtggacctggcggctgcggagtttttttatgctccggcggttgcgccgcggatggcggaagcgtgatggaggcttctgttgcggatgaacgcggactgttccggaactgtttccgaaaggggctttgtgagacctggcggacttttccgttccccctccggaattcgcggaatgccgtttttccaagttgcttcgtgaaatcctgcgcgttccccgtcttcttataaaaaaccgggcattttgttattcctgcgtcttccgtttcgtttgggaaaaggcatgcttccgcaaggttccttgcatcattctttcggaagggtggggggggttgtagcgcgggctacggataaatgcggggtccacctgtttgaggcgccatctttacttggtgaaagattgctgcgtttcaaagcctggcgcgttgccgccatgtccggacaggcgggattgataaaaaccgtcctgttttttcatgccgccgggttgcagaccctgcggagattacggcaggggacggcgcggaggctgttgattccctgatctgcttacatgatgccgcgtcgcggacgcattgccggctggcagcgaatgatggattcaaaaaaattgtgcccgccgctttaacacgatcggcaaaaagcaagggaacaaccccggtcaggagtcttccatccatcctcacatccggaatgcagcgggaggcgtggaatggcgcttagctgatgcagcggtaatagtaatccacgcgggaaatgaaccaggaccatttgaaaccgggcttgccgttgtccagcagcaggtgggggcagcgttttccggtccagtagtaatgcggcacgacgttccgcagcgggatatcgtgggcgtacatgttgtaggcggccagcttggcggcgcggtcaaaggtcttgacgatgctctgtccccgcttttcgcacatttcaatgccgatggaatacatgtccccggggccgccccggtccgcatggcgtcccgtttcattcagggggatgtgctgcatggctacatacggatccaccgtgtagtgccagttgcagcgcagggctccgttattcagcgcgcgcgcgtgctgcatggcgtctgcggaagggttttccgtgttgtgcatggtgatgaagcgcggcttcatccgggaagagcgctgccggagaggggaagagcggggcatgaacatcggccggacgttgcattccgccagcagctgccgcggagagcgcttcaccacggggacaccggagggcttgaaggaaatcatgggcgccattccggctttgccggagggttccgaacaactggtcagggccagcagggcggcggcttccagcaggaaggttctgcggtccatgccctggactttctccagcatgggctggagctgtccggaaacacgggcaagataagtggcgatggtggaaatattgctcatacagcgaccgggaggtgggggatttacagcacggatgcgggaaaagtttagttcacgctaagattcacctttcttctttgcaacgaaaaagtgtgaaagctttagctttgtgccgaattcttcacgctttttgtcatattgggccgttcaaaccgttgttgagagcaaaacggtatccggttccacggcggtgacggcgtccgcatttgccggagacaggatgaattctccctgccgcgccgttttcccgtcccaggacacggagccgcggagaaccgtgaagatggagaagcgggaggcgtccggttgggtgaatcgttctccctggtccagccgatattcctccgtggtgaaatgcggcatttccgtcaggtagccgggttgccggcagagttcccggaattccgcgatggaatccagcgcctgttccatgtgcagttcccgtccctgtccggaagcgtctgtccggttccagtcgtaaaggcggtaggtggtgtcgctgttctgctggatctccgcaatgaggtgcccggcgccgatggcgtgaaccaggccggcgggaatgtaaagatgttcccccttttccagatgggtggagcgtatcagttgctccatttggcccgtttccgccgcccggcggatgtccgagagcgtagcggtttcttccattcctccgtaaatcagggcatccgggtctgcatgcagcacgtaccatacctcgtttttaacctctccccgccgtgctgccgccgtgcgttccgggggatgcacctggacggaaagattctcacgggcgtccagaattttgcagagcaggggaaaacgcgtaaaacgttcgtagccgggcccgaagagttcttcccgctgttcttcccacagccggtgcaggggcattccttcccattcgccttcccttaccgtgctcatggcttccggacggtcgctgatttcccaggcttccccgtaggccgtttcccggtcgggcagttcccggcccagcatggttctcatgtgctggccgccccagatgcgcggctgatagatggaatggaatcgaaaaggctgcatcgtaataacgggagcgtaggccatcttttacggccggacaagtaaaatgcccgcaggaggcctgcgggcatgaagagagggaaatcggggagtttccggttatttgatggattcccatacgatgccgatctcatcaaacggcacatattccttgttcttgtccggtttcggcacaccgtagttggtccggaacaggggcaggatgggcgctcccgtcttggggtccttgctcatgggtgccattcccacttcctccagcagcagggtcatgccgaattcgccgccgggaccttcgctgaccaggatttcaatggggtacaccttgccttgctccaccgtgaactgcttgccggcggctacgccgcgcatggtgttgttccagtggccggaggggccgtatttgtagaacgtgacgggggggacgttgatgcccgcgtccttgagttccttcttcaggtcgtcgttgccgggcttgccttccatggcatcaagccatttggcgttgttcgccgtcattttccccagggaggcggattcccagccgtagtcgaatacgttctggttgttgaaccgcactaccaggtagtcgtctcccagccccacgaagcggaacgtgccggatttgggagcgcgcactttgccccggtaaatggcaagccactggctgggtttcaccttgtcgtcgcatccgtaggccttgggcgcgtctttggcgggagttctgggaatgtagaactgggcggcgtacaattgctgcggcgccttgtaaaaacgattcagctccgactcattccagcctttgttgacaaagcgggaaagaaaggcgcggtactggtccatcgtcatgttggtgggccgtccgccgggcgtctgcttggtatcgtaaaaggtgcctaccagcgtacttcctgagggctgggacgtgccgaaggcggaggtggcgtcacccaggtcggggccgaagccgtcccccatgcccagagcggttccttcttccagcatgacgggttcgtccggcgggtcaatgtcgatcttggggaggctgaccggggctgccgccgcggctaccacgactttgacgggagtttccgcatgggaggaagaggaggtttccctctgcacttccggcggcggaggcgtatccgacggaggagcttcgtccggcgtgatgtagccgacgaccttgggttcttccgggggggcgatgatgatggtcagggagtagagaatggctcccgccaggacgacggagagaatggatgtcgccaatgcggcaatgtaatttttccgcctttccttgcgcagggtttccactgcgtcttctgtgggttctatatgaaggctcatgcatgtatgataacataggagccccatatgttgagtaacatgaggataacaaggataacatgtcggtaacaaaaagggcgtctttgacgccccttcttccttatggcttctcagcttttcctgcgctttcccgtttttccgggagccagtgcgatggcaagaatggaacagacgcccagaatcagggggtaatacaggtattccatgatcagcaggggggaaacctgggcgattccggcggccatgagcatctgggccccgtagggaatgacgccctggaccaggcaggaaaaggtgtccagaatactggcgctgcgcctgggcgggatatggaatttatcgctgatctccttcgcgatgggacccaccgtaatgatggcgatcgtgttgttggcggtgcagagattggccagggagaccaggccggcgatgctgaattccgcgccgcgcctgctccggatgtgggccgtgatttttccgatgatgtacgcaatgccgccgttgaagcggatcaacgccagcacgccgccggccagcagggtgacgatgatcagctcccccatgccggtcatgccgctgcccatggcgcggaaccaggccatgaaggaaaaataccccatgcctactccgacaagtcccgtggcgagcagccccagcgtcagaacggccatcacgtggactccggccagcgccgtcaccagaaccagcaggtaggggaacaccttcatccattcaatgggagcgtccgccatggagggggactgcacgttccatccgagcaggatgtagcaggccagggccagcagcgcggcgggaagcaccaccttcacgttagcccggaatttgtcccgcatggcgcagccctgcgtgcgggtggcggcgatcgtggtgtctgaaatgaaggaaagattgtctccaaaaaacgctccgcccaccacaatggccgtcatcatgccggtgctgacctgcgtggcgtgcgccagtcccgtggctacgggagcaagcgccacaatggtgcccacagaagtgcccacggaaagggagatgaagcaggatgcgatgaagacgctggcaagcagcagattgtccggcaggaggcgcagcgtgagctgcacggtggcgtcaattgcccccatgtccctggcggactgggcgaatgcgcccgccagcacgaaaatccagatcatcatcaggatattccggttggctacgccggaggaaaacaggtccacccgttccgccatgcttttcccgcgggtgatgagcacggcccagactgccgccgccgtaaaggccaccgtcaccggaacggcgtaaaaatcctgtacggctacggagatgaccaggtaaagcaggaagaaaaccagcagggggctcagcgcccacaggctgggtttgacgggcgccgtatcctggctgtctggaaaatgggtcatggggagtgcgtgctgccggagatgctgggcggcttagtttccggcggcttcctcttggtccagataccaccggtagatgcgctccacgccttcttccagctccacccggtgtttccagcccagggaatgcagcttggaaacgtccgtcagcttgcgcatggtgccgtccggcttgtccgcgttgaataccagttctccccggtagccttccgtgacggctatcaggcgcgccagatcgccgatggagatttcctttccggtgccgatgttgatatggcagttccgcacctcccggtcttcccctttcagctggctgaaatccacctgttccatcacgtggacgcaggcgtccgccatgtcttcgctccacaggaattcgcgcaggggcgtgcccgttccccacagttccacggaaccgggggtgatgccgtatttggccagcgcggccaggatggcttcttccggcgccgttccgtccacctgttccacaggccgcgcgtccaggtctttccggacggcgtcccagtccccttccatcaggcgcttggccaggtgaatcttgcgcaccatggcgggcagcacgtggctgttctccaggtggaagttgtcattggggccgtacaggttcgtaggcatcacggcgatgtagttggtgccgtactggaggttgaagctctcgcacattttcaggcctgcgattttggcgatggcgtagggctcgttggtgtattccagcggggaggtgagcagggcgctctccttcatgggctggggtgcctctcgcggatagatgcaggtgctccccaggaagaggagcttggatacgccgtgccggaaactttccccgatgacgttctgctggatctggaggttgcggaagataaagtccgcccggtaccgtgagttggcgataatgccgcccacgaacgccgccgccagaaagacgtattccggcttttcccggtcaaagaattcccgcacggccgccgggtcctccaggtccagttcccggtgcgtccgtccgatcaggttggaataacccctctcttccagggatttccagatggcggagcccacgaggccgcggtgtccggccacgaatattctgctgtttttttccatctcaggaattgacgggatttttgacgtattccatgtcgtggcggaccatgatgcgcacgagttcctcaaacggggtggaggtggggttccagccgaggagggttctggccttggtggggtctcccagcagttgttccacctcggaggggcggaagtacttgggatccacttccaccaggatatggcccgtcttcttgtcgcgcccgcgttcttccacgccttcgcctgcccattccagctcaattccggcttcacggaaggccagcgtgcagaattcccgtaccgtgtgcatttccccggtggcgatgacgaagtcttccggcttgtcgtgctggagaattagccacatgcattccacgtaatccttcgcgtagccccagtcgcgcagggcgttcaggttgcccagataaagcttgtcctgcatgccctgggcgatgcgggccgccgccagcgtgatcttgcgggtgacgaagttttccccgcggcgttcgctctcgtggttgaacaggatgccgttgacggcgaacatgccgtaggattcgcggtaattcttggtgatccagaagccgtattgcttggctacgccgtagggggagcggggatagaacggcgtggtttccttctggggaacttcctgcaccagcccgaagagttcggacgtggaagcctggtaaatgcggcatttcttttccatgcccaggatgcggacggcctccagcatgcggagggtgcccacggcgtccgtttccgccgtgtattccggcacgtcaaagctgaccttcacatggctctgggccgccaggttgtagatttcatccggctgcacggtctggatgatgcggatcagggagctggaatccgtcatgtcgccatagtggaggttgatcagccggtttttcttcatgtcccgcacccactcgtccaggtaaagatgctcgatgcggcccgtgttgaaggaagaggagcggcgcaggatgccgtgtacttcatagcccttgtcaatcaggaactctgcgagaaaagaaccgtcctgtcccgtgatgccggagattaatgcgattttgctcatgtgctgtgtgtaggtggtttgttggcggaggaggttgaagaataaatggtgaaacctccagcggagccgcagttgatgcgctccgggcataaatagcgcatttttcccatggtgacgaggaaaatgctctggtcatggaagaggaatgccactgtcagcggacggcttttcctttgccggacgcaatcatttccttgaaatcccggaacaggtactgggggtctctggggccgggggcggcttccgggtggtactgcacgctgaaaacggggagcgttttgtgggcgatgccctccacggtattgtcattcaggttcatcagcgtgatttccacgtcgtccggcacggtatccggatccacggcaaaaccgtggttctgggacgtgatgctgattttacccgtgcggaggtccttcaccggatggttggcgccgcggtggccgaacttcagcttgaaggtcttcgcccccagcgcgtgggaaatgatctggtgccccaggcagatgccgaacatgggaaccttcccgatcagggcggctacttcacggtggatgtccgtcagcgtggcggggtcccccggaccgttggaaagaaaaacgccgtccggcttcatgccaagcacttcctccgccgtcgtgtgggcgggaaccacggtcacacggaagccgttttccctcagttggcgcaggatgttgtacttgatgccgaagtcgaaggccacgatgtcgtactccgtggggggcagtaccccttccgtcaccagcgcgtccacttcctccggggtcatgggatgggagccgatcttgtctacgatgttgcagccttccatggagggggcctttctggcggcttccacggcttcctccggcgtcagctccgtggtgaggcaggcgcgcatggcgcccgcggagcgcaggtgcttggcgatcttgcgggtgtccaccccttcaatgccgatcacgccctgcttttccagccacgggcccagggcttccgtggcgcgccagttggaaggaaccttcgccagctccgccaccacgaagccgctgacctgcgccttgccggactcgtaatcttccgggttgacgccgtaattgccgatcagggggtaggtcatcgtgacaatctggccgctgtaggacgggtccgtcaggacttcctggtagccggtcatggacgtgttgaagcaggcttcccccacttccgtgcccgtggctccgaagtgcgaaccgatgaagacgcttccgtcttccagtgcgagaatggctctcatgatgatataaaaatgctgtttggtatggggttaaacggtctgggcatggtattcctggatggtgcacacctggaggttcctgttcttcagcgcctcaatggcgttcacgcaggcctgtgcggaggccaggttcgtgcagtaggaggttttggcggcgatggcggaggaacggatgatgatgtcgtccgcccgcgcgtcgtgggagccgggcgtgttgatgatgaaatcgatgtccccgttcttgatgtggtccacgatgttcgggcggcgcgcctcgttcaccttgtacgcgcgttcgcattcgatgtcgtgctggagcaggtggatcatcgtgccgcgcgtggcgcacagcgtgaagcccatgtccgccagctggcgggccatgtggagcacgcgctccttgtcccggtcattcacggagatgaaaaccttgccttccgtcggcaggggattgaatgcgctgatctgggatttggcgaaggcgatgtccgggtccgggtcgatgcccatcacctccccggtggatttcatctccggccccagcaccacgtcgatgcccgggaagcggccccaggggaagacggcctccttcacgcagtggtattccggcgtgatttcccgggtaaagcccagctcctccagcgtcttgccggccatgacctgcgcggccagcttggcgaggggcctgccgatggccttggagacgaacggaacggtgcgggaggcgcgcggattcacttcaatgacgtaaagctgttcgtccttcacggcgaactggatgttcatcagcccgcagacgttcagccgccgtgccagctccttggaggcgcgcgtgatttccttgtgcattttcatggaaatgcccatggcgggaatcatgctggcggaatccccggagtggatgcccgcgggctccacgtgctgcatgatggcgccgatgacggcccgctcccggtccgcgatgacgtccacgtcaatctccacggcgttttccagaaagcggtcgatcagcacggggcgttcctcggaggcctccacggcttcgttcatgtaccggcgcagctcctgctcctcgtacacgatgatcatgccgcggccgcccagcacgaaggaggggcgcagcagcaccggatagccgatgcgggcggcaatagcggcggcgtcctccacgttggtagccgtccccgcgtccgcctgcttcagccccagctccctcagcagggcggagaaatgttcgcggtcttccgccaggtcaatggccttcgggctggtgccgatgacgggcacgccgtgggcttccagggcgttggccaggttcagcggcgtctggccgccgaactggacgatgacgccgtccggcttctcctgctcgcagatgtggagcacgtcttccagcgtcaggggttcaaagaaaagcttgtcggaggaatcgtagtccgtggagacggtctcagggttggaattcacgatgatggtttcataccccatttcccgcagggccatggaggcgtgcacgcagcagtagtcgaactcgatgccctggccgatgcggttcgggccgcctcccaggatgaggatcttcttccggcccgtgtcgcgcgcctcgttttcatccccgtacgtggaataaaagtaaggcgtgtatgcctcaaactccgcggcgcaggtgtccaccaggcggtagccgggcacgatgccctgttcgcggcgttccttgcggatgctttcctccgtagttccgcgggccagggcgatctgcctgtcggaaaagcccagcttcttggcttcccgcaggtccagcgcgtccaggcggtcgcccgccttcgccaggtcccgcatctgggccaggaaccaggggtcaatctgggtgagctggtgcacctcgtccagggaaaagccgctgctgaacgccgtctgaatccagaaaatgcgttccgccgtggggacggccagcttccgcgtgatttcctccgcggtgggcttctgcggcgccttcgcgtcgaaaccccagccccagcggcccgtttccagggagcgcagggccttttgcagggattccttgaacgtgcggcctatggccatggcttcccccacggatttcatggaggtggtcaggtgctcgtccgcctgcttgaacttttcaaacgtgaagcgggggaccttggtcaccacgtagtcaatggtgggttcaaagcaggcgggcgtttccctcgtgatgtcgttgcgcagttcgtccagcgtgtagcccacggccagcttggcggccagcttggcgatggggaaccccgtggccttggaagccagagcggaagaacgtgaaacgcgggggttcatctcaatgacgatcatgcggccgttggccggattgatggcgaactggatgttggaaccgcccgtttccacgccgatctcccggatgacggcgaaggaggcgtcccgcatgacctggtattccctgtccgtcagggtctggatgggagccacggtgatggaatccccggtatgcacgcccatcgcgtcaatgttctcaatggagcagatcaccacgcaattgtccgcgcggtctctcatcacttccatttcaaactccttccagccgatgagggattcctcaatcaggatttcggaaacgggggagaggtccagcccgcgggcgcagatttcctcaaactccgtcttgttgtacgccacgccgccgcccatgccgcccagcgtgaaggcggggcggataatcaggggaaaggtgcctatgtccccggctacccggcgcgcctcctccatcgtgtgggcgatgccggagcgcggcacgtccaggccgatgcggatcatggcctccttgaacaggttgcggtcctccccgcggtcaatggcgtccgcatgggcgccgatcatgcgcacgttctccctctccagcacgccgctgcggtggagctccatggcgcagttcagggccgtctggccgcccagggtggggagcagggcgtccggcttttcccggacgatgattttctccacgaactccggggtgatcggttcaatgtaggtgcgcggggcggtctctgggtccgtcatgatggtggcgggattggagttgaccagcactacttcataaccttcttcccggagggccttgcaggcctgggtgccggagtagtcgaattcgcagccctggccgatgacgatcgggccggagccgatcacgagaatctttttgatggaggtatctttaggcat

SEQ ID NO: 449 - DNA, 6813 bp, unidentified
  source 1..6813: mol_type = unassigned DNA
atgcgcattatcttctgtctgatggttttcttgttcataggaaaaaacacgatgctggcacagcaactgtcctcattcgtagaatatggaacaaccctgcataccggtgacaacacccctctttggcaggtcagcaaccagcaaggactcacttcgcttgacaacaatacttacatacgtggaggaatatcctacagacaccaactcggaaaatggaagtttgaagaagttgtggatttggttgcagcagccggattcagtgctacctctttcattgtacagcaggcttacgtagacatccgctacaagtggttcggattcttcgctggaagccgggaacagaattctccattgctgaatcaagagctaagcagtggcggcatgacttggtcgggcaatgcgcgtcccatcccacaagtacagataggcatacccgagtatgtacagttgctgccccgtttaggtctgaaaggagaaatctcgtacggatggtttacagacaacaaataccaacgggaacaagtcggagaaaaatactggtataccaagagcatcaaataccatcataaagaagggttcctgcgtatcggtatacccaaaggaaaatggcaactagaactcgggatgaccctcgacacccaatttggtggatataaaattggaggttccgaatcgggggacttgggaaacggatggaaggattatatacgcgtattcttccccggccacggaagtgaggacggaccggtaggtgaacatctggctttccaaggcaattttctgggcagcgaatatatcaaaatgacttatagtcctaaggaagatttctctatcagcgcctatctggacaatcattttgatgacttctccgccatggccaaactcaacggttgggatggcttatggggtgtggaatataaatccaaccataaacaagccatcaacggaatcgttatcgaatatctccagactaccaatatgagcggtcctctgcacggtttgcaaaattctgtagtaggtaagaccggaggagccgacaactactacaacaacggttactacccaggatgggcacattggggcatggcgatagccaatccgttgatagcatcgcctatctataataaggatggcgatatgagtttcaagtacaatcgtgttaaggccctgcatctgggatggagcggtgacatcagcagtgagtggagatatgtagcaaaattgtctcacaacagaacttggggaactcctcatcgtccaatacccgatatattagaaaatttttctacttttgcatcgttttactatactccccgtaaatggaagggctggtgcttcaacgcgtcccttgcattggatatgggagagatatatggagacaattttggagtccaactaaaagtacataaaatattttaagaaaatgaactacatacaaacagagattgacggcgtatggctgattgagccgaaagtattccatgatgcccgcggatactttatggaagcatttaaggaagaagagttccgtgcacatgtcggagacgttcacttcatccaggacaatgagtccaaatcctctttcggtgtattacgtggtcttcactaccagaagggcgattgcagccaggctaaactggtacgtgtcattaaaggaaaagtgctggacgtggctgtcgacttaagaaaatcttctcccactttcggaaagtatgtcagtgtggagctaagcgaggagaacaagagacaattcttcattccgcgcggttttgctcacggttttctggtgctgagcgatgaagctgtctttacatacaaggtagacaacgcatacgcaccacagtccgaggcatccatccgttttgacgacgaaaccatcggtattgaatggcctgttgctacggaacagcttctattatcagataaagacggacatgccgtatcgttcaaggatgcggtctattatgaataaaatatgaaaatagccattgtcggtacaggatacgtcggtttggtaaccggaacctgctttgcggaaatcggtgtcaacgttatttgcgtagacacgaacagtgaaaagatagagtcactgaaaaagggcgttattcctatctatgaaaacggactggaagaaatggttagccggaatgtgaaagcaggacgcctgcaattcaccacatccctggagagttgtctgaatgaggtggaagtggtattcagtgccgtaggtacaccacccgatgaggatggaagtgccgacttgagctatgtgctggaagttgcccgcaccattggacgcaatatgcagaaatacgtgttggtggtaaccaaaagtaccgttcccgtaggtactgcccaaaaagtgcggactgccattcaagaagaacttgataagagaggggtgaacattgactttgatgtcgcttcgaatcccgagtttctgaaagaaggtaatgccatcaacgattttatgagtcccgaccgtgtagtggtgggagtagagtccgaacgagccaagaagataatgagcaagctctacaaaccattcctgctgaacaacttccgtgtcatctttatggacatcccttctgcagaaatgacaaagtatgcggctaactccatgcttgccacccgcatcagcttcatgaacgacattgccaatttatgcgaattggtgggagcggatgtaaacatggtgcgcagcggtatcggttcggatacccgtatcggacgtaagttcctctatccggggataggctacggcggctcatgcttccctaaggatgtaaaggcactgattaagacagctgaactgaacggctacaagatgcgtgtactccatgcagtagaggaggtgaacgagaaacagaagagtatcttattcgaaaagttgcagaagcatttcaataatgatttggagggaaaggtcatcgccatttggggactggcctttaaacccgaaacagacgacatgcgtgaagctccggccctgatattgattgacaagctgctgaaagccggctgtaaagtacgtgcctacgacccggctgccatgaacgaatgccgacgccgcataggagaaagtatttattatgcgacagatatgtatgatgccgcactggacgcagatgcactgatgctggtgaccgaatggaaagaattccgcctgccttcatgggcagtcatcaagaagaccatggagcagccgttggtattggacggacgtaatatttacgacaagaaagatatggaagaacaaggtttcacatatcattgcatcggaaaataaagtcgcagaaagaagaaaagaaataaacagggacgttatgacaataaaaggaagtgcgattctcattgtacttgttgtctcattagcctcatgcagcaacagacaaacaggagaggtttccgtaaaggaagatctcattgcaaagcaactgttacaaggcatctgggtgaacgatgaaacagaaatgccattgatgcgcatcgaaggggatacggtatattatgccaacccgcaaagcgctcccgtatctttcaaggtcgttcacgatacaatctacatatacagcaatgaaccggtggcctataagatagaccgtcaaacggaatacagcttctggttccactcgctggccgacgaagtaattaaactgcataaatcagagaatgcagaagattctttggttttcaccagccgggaagtagaggtcatttccactactccagaagtgataaagaaagacagtatcgtaatatacaagaatacaaggtataggggatatgtatatatcaacccctcaaagatgaaggttttcaagacttcctattctgaaaatggaatcagtgtggacaatgtgtattatgataatgtaatccatatctgtgtatacgaagggaagaagatgctttacggccaggacatcaccaaaaagatgtttgcggatatattccctgccgaaatactgaatcaggccattcttgccgatatgaacttcatgggtgtggacagtaagggataccattaccaggcaacccttggcatacccgaaagctccgtatacagtctggtaaatatgattattggttttgactgtacaatgagcatagaaaaagcggaataaatccgctttttctatgtcttttcttcaccacaccacagtgtttatttcttctcaccgccattctgtggccgtttggcactgggctttccgcctttattgttgttacggccattcttatttcctcctggcctacgtccgtttccatggccgccccgtcttcctccgtcaaatgctctcggcttgtattctggtgcttcacccagctcttcgggaaccgatatcttatagatatccctatctaggaatttttcgatattcttaaagttaccctgctccttttcggaaacgaaggtgatggctacgccgtcattattagcacgcgccgtacgtccgatgcggtgcacataatcttcactgtcgtggggaacgtcgtagtttatcaccagacggatgtcatcgatatcaatacctctcgcaacgatatctgtggctaccaggatattgatacgtcctgccttgaactcatacatcacttcttcgcgctgtgcctgctccaagtcggaatgcatttcaccgacgttcagtttcatctgcttcaaagctttggtcacttccttcactttcagtttggaagaagcaaagatgataacgcgttccggtgtctcctctgcaaagaggctacggatgatgcccagcttctgattctcgtagcaaacgtaggctgcctgcacaatcttttctgccggtttggaaacagccagcttcacctcggcaggattgttcagaatgttaccagccaactgttgtatcttagcaggcatggtggcagagaacatgattgtctgccgctctttaggaaggaatttgacaatttgcataatatcgtcataaaatcccatatccagcatccggtctgcttcatccaaaataaaataagagacacgggaaagatctacataaccaaggctaagatgggctatcaaacgccccggggtagcaataacgacatcagcacccagtgtcaaccctcttttctgctgctcgaacagtattccgtcattaccgccatacacggccacgctggaaaccggcatgaaataagagaaaccttccatctgttggtctatctgttgcgccaactcgcgggtaggagccatgacaatgcaattgatggcatcggcagggtgtccgccttctgagagcttgttcaatataggcaacaaatatgcggcagtttttcccgttccggtttgtgccactgctattaaatctcgaccttcgagtatgacgggaattgatttttcttgtatgggggtgcactcttcaaagcgcatggcatccagtgcctccagcacattgccatttaaatgtagttctgaaaacttcatgtatctcttttaaatttgcgtacaaagataggaaaaagacttataaaatagactcttacagtaaaaaaataagcccttgggacaataattatctcaaggacttgcaaatttgtttcaagcatctgccttcaacggggaatatcaatgtatgaatccttaaatcccagaaagtaaagtacgccatctaagccgatggtgttgatggattgcttagcattggcaacaactttgggctttgcatgaaaagcgattccaaggccggcaattcccagcatgggcaggtcgttggcaccgtcgcccacagcaatagtctgcgcaatatccactttttccacctgagctatcaaacgcagcaactccgccttacgcttaccgtcaactacatcaccgagatagcgaccggtcagtttgccatcctctatttccagctcattggcatacacatagtctataccgtacttcttctggaggtactgcccgaagtaggtaaaccctcccgaaagaatagctatcttgtaaccgtatttcttcaaaacatacatcaggcgatccacaccttccgtaatgggaagattctctgcaatttcctgcatcacggactcatccaatcctttcaacaaagccactcgttcgcgaaagctctcaatgaaatctatctcaccacgcatggcacgctcagtaatagcctttacctggtcgcccacacctgcacgtatggccaattcatcaatcacttccgtttcaatcagagtagagtccatatcgaagcaaatgaggcgacgcatccggcggtacatattgtccaactggaaagagaaatccatttccagttcggttgccagtttcatcaactgttcttgcatggcaatgcggtctttcggagtgccccgaacggaaaattcgatgcaggcgcgtgtacgcgattcacattcgtccagcggaatacgtcctgtaaggcgcttgatggcatcgatattcatgccttgctctgcaagaatacgggtcacagcagatatttgacgggcagacaacttgcgccccaataaagtaagaatatagcggttctttccctgcatattcacccaatcctcgtactctttggcagtaatagggtaaaaacggacagtcactcccagggaggaagccttgaaaagcagttccttcataatgaaccccgaatgttgttcttccgtcttgcataaaatgcccaatgaaagagtattatgaatgtctgcttgaccaatatcaagaatagtagcatcatatttggccagaatttccgtcacggaagctgtcagtcccggacggtcttcacccgtaatacgtatcaggatgagttcagtgttcaatggttgcat

SEQ ID NO: 450 - DNA, 6478 bp, unidentified
  source 1..6478: mol_type = unassigned DNA
atgaaagttttaaagtttggaggtacttcagtaggttcggctcagcgaatgaaggaagtggccaaattgattaccgatggtgaacgtaagattgtggttctctctgccatgtcgggtaccacaaacacattggttgagatttcggactatctgtacaagaagaatccggaaggtgccaacgagattatcaacaagctggaaagtaaatatcgccagcacattgatgaactttttgctactccggagtataaacagaaaggcttggagctcatcaaatctcattttgactatatccgttcttataccaaagacctcttcactctgtttgaggagaaggtggtgttggctcagggcgagttgatttccaccgccatgatgaattactatctgcaggaatgcggtgtgaagtctgtgttgcttccggctttagaatacatgcgtacggataagaatgccgaacccgatccggtctatatcaaggataagcttcagattcagctggaattacatccggatgctgagatttatattactcaggggtatatctgccgtaacgcctacggagagatagacaatctgcagcgtggcggaagcgactatacggcttcgctgatcggtgctgccatcaacgcttctgaaattcagatttggacggatatcgacggcatgcacaacaatgatccccgtattgtggacaaaactgcgccggtgcgtcatctgcacttcgaagaggccgcagagctggcatattttggtgccaagattctgcaccccacctgcattcagcctgccaagtatgccaatattcccgtccgtctgctcaatacgatggaccccactgctccgggtacactgatttctaacgatacggagaagggtaagattaaggcggtggctgccaaggacaacattacggctatcaagataaagtccagccgcatgttgcttgctcacggattcttgcgtaaggttttcgagatattcgagagctaccagacttccattgatatgatttgtacctcagaagtgggtgtgtccgtatctatcgacaatgtgaagcatcttaatgaaattctggatgacttgaagaagtatggcacagtgacggtggacaaggacatgtgtatcatctgtgtggtgggcgatctcgaatgggagaacgtcggtttcgaagccaaggcattggatgccatgcgcgacataccggtacgtatgatttctttcggtggtagcaactataatatttctttcctcatccgagagtgtgacaagaaagtggcgttgcagtcactcagcaatgcgctgtttaacggcgaataaatatttttttagggtgtagattacgcggattgtacagataaaaaacaaaaagaatccgtgcaatccgcgtaatccgtgcctaaaaagagttgcaaacacttctttcatttccttttttaaaactaaacaaagattacagctattatatgaaaggaacatttcccatcaataaattccgcgaattgcgtactcccttctattactacgatacaaaggttttgcgtgatacgcttgcctgcattcgtacggaggcggcgaagtatggtaattattcagtgcattatgccgtgaaggccaacgccaatcccaaagtgcttgccattatccgcgagaatggtttgggtgccgactgtgtaagtggcggtgagatccgtgctgccatcaaagccggttttcccactggcaagattgtttttgccggggtgggtaaggctgattgggaaattaatctggggctggattatgatattttctgctttaatgtggagtctgtccctgagctggaaattatcaatgagctggctgccgctaaaggtaaggtagccaatgtggctttccgtatcaatcccaatgtaggtgcccatacccatgccaatattaccactgggctggccgaaaataagttcggtatcagtatgcaggatatggaccgtgtgatagacattgcgcagaatatgaagaatctgagactcatcggactgcatttccatatcggttcccagatattggatatgggtgatttcgtggctttgtgtaaccgtgtcaacgaattacaagataagttggaagcccgtcatatccgcattgagcacgtcaatgtggggggggggctcggaatcgactatggtcaccccaaccgtcagccgatacctgactttaaaagctacttcgagacttacagcagccatttgaaacttcgtccccatcagacgcttcactttgagctgggacgtgcggtagtgggacaatgtggttcattgatttcgcaggtactttatgtgaagcagggtaccaacaagcagtttgccatcttggatgctggcatgacggatttgattcgtccggcactctaccaagcgttccataaaatagagaatatcacttcggatgcgccggttcaggcttatgatgtagtaggacccatctgcgagtcttccgatgtatttggtaaggctattgatttgaatggcgtgaagcgtggtgaccttatcgccctccgttcggcaggggcttatggtgaaattatggcttcgggctataactgccgtgagcttcctcaaggatatacatcggacgagctggtatagagcggctggagacgtgttgcatggatgacgaagcattccaagacctttgtttttgtataaaaaatgttattgtgtgaacaacttttaaggtttcttgttacttttgtaatgatttcaattttaataaatacgattatgattacagaaaaattacagaatgcaattaatgagcagattacggctgagatgtggtcttccaatctttatttagcgatgtctttctatatggagaaagaaggttataacggtatagctgcttggttgaagaagcaggcttctgaagaaaaagctcatgcttgcgaaatggcttcttatatcatcaagcgtggcggtaaggctaaattggataagattgatgttgttcccaatgattttggtactccgttggaagtattcgagcaggtttatgaacacgaatgccgtgtttcaaagatgattgatgcattggtggatgttgctgctgcagaaaaagataaggctacacaagatttcctttggggatttgtacgtgagcaggtagaagaagaagctactgctgctggtattgtggatatggtgaagaaagctggtactaccggaatcttctttgttgatgcaaagttgggagaacgcaaataagaaacaacaaaaaatcccgcggctaatcagtcgtgggatttttttgtttggttataacttataattcacttcagcactccaagctctttccccaccttaataaatgcggcaatacatttgtccagatgttccttttcgtgtccggcagaaatttgtacgcggatgcgtgcctggtctttgggcactacggggtagtagaagccggtaacgtagataccttcttcttgcatgcgggcggcataaatctgggaaagtttggcatcatacagcatgacggcgcagatggcgctctgtgtcggcttgatgtcgaagccagcggcagtcattttgtcgcggaagtaattcacgttttccagcagtttgtcatgcagggtattactctctttaagcatcttgaatacctcgagactggcgccgatgatacctggcgccaatgaattggaaaagaggtacggacggctgcgttggcgcagcaggtcaatgatttccttacgtccggtagtgaatcctcccaaagcgccgccaaaggctttgcccaaagttccagtgtagatgtctacgcgtccgtaggtgccatattgttcgcttacgccgtgtcccgtggggcctaccacaccggcagagtgtgattcgtccaccatgaccagcgcgtcgtatttctcggcaaggtcgcaaattcggtccatcggggcaacgttgccgtccatggagaataccccgtccgtaacaatgatacggaaacgctgtgcttgggcttcctgcaggcatttttccaggtcggccatgtcggcattggcgtagcgatagcgtttggctttgcagaggcgtacgccgtcaatgatggaagcatggttcagggagtccgagatgatagcgtcttcttcggtgaagaggggttcaaataccccgccattggcgtcgaagcaagcggcatagagaatggtgtcttcagtcttgaagtagtcggagatggctgcttcaagctccttgtggatgtcctgcgttccgcagatgaaacgtacggacgacatgccgtatccgcggtgttccataatctgctgggcggcggcaatcagccgcgggtggttggacagtcccaggtagttgttggcacagaagttcagtacctctttgccttttacggtgatggcagcttgttgtgcactctcaatcagtcgctcttccttgtagagtccggcttcttttatttcagcaatagtcttgctgagatggtctttcattttaccgtacatagcatttttattttttaggtaatacgttgtcgttacatttcccacaaagaacatcatttttcttggaataaacaataacaatatggcagaaatatgaaaaaaaagtgtgtatatttgcaccatatataataacgaaaccttataaataactcgtatgaagaatattttggtaattggagctaccggacagattggatcggaactcacactggagttgcgcaaacgttatggcgatgaccatgttgtggcaggatacattccgagtgctatgcccaagggagaattgaaagcatccggtccttcggctattgccgatgtgacagaccgtcagtccatcgaggtggtggcgcgtcagttcaagattgatacaatctacaacctggctgccttgctctcggtagttgccgaaagccgtccggccatggcttggaaaatcggtatcgacgggttgtggaatgtacttgaagtggcgcgcgagtacaattgtgccgtgtttaccccgagttccatcggttcgttcggcgaagctacgcctcacgtgaagacaccacaggacactatccagcgtccgcgtaccatgtatggcgtgactaaagtgacgactgaattgttgagtgactattactatacaaaatatggtgtggatacacgctcggtacgttttccgggaatcatttcgaacgtgacccctccgggtggcggcactacggactatgcggtagatattttctactctgccgtgaagggagaaaaattcgtatgtccggtgaaggccggtacgtatatggatatgatgtatatgcctgatgcactgaatgcggccatctcactgatggaagcggcaccggcaaggctgaagcaccgcaacgccttcaacatcgcctccatgagttttgaccctgaacagatttatcaggaaatcaagaagcatgtgcctgattttgagatggtatacgagattgatccgctgaagcaggccattgctgatagctggcccgactctctggatgactcttgtgcacgcgaggaatgggactggatgccgcagtatgacttggagtccatgaccgtagacatgcttgagaaattgaaggctaaattaaataggtgaccgtaagcggtccgcaaagaatgaaaaaacttttattgggatttttgttactcgcctttttgatttcgtgtggaaacaaaaaggcgaaaatggatccctttgctaccattgcggaaatggtggattcggccggttacaaggccgatacgctgcaggaagcagaagtgaaggaagaaccgaagccgatggtggcagacgagctgtttgatgattttatcttcaattatgcttcggatgatgccctgcaaaggcagaggacggtatttcctttgccctattatgaccgtgatactccgctgaagatagaggcggacttctggaagcacgattatctgtttaccaaggagaactgttacaccttgctttttgataaggaagaggatatggacatggtgggtgatactacgctgacatcggtacaagtggagtggattttcttgaaaacgcgtatggtgaagcgttattattttgagcggaagcggggaatgtggatgctcgaggccatcaacctgcgcgagatggagaaaggtgaaaatgaggacttcgtggaattctatacccgttttgtgagggacagtgtctatcaaagcaagcatatcagccatccgctacaattcatcaccatagaccctgatgacgagttttctatcctggaaactactttggatgtggaccagtggtatgccttccgtccggtaatgcctaccgacagattgtctaatatcaattacggacagaagaatgaggacttgtcggataccaagatactgaaggtaaatggtataggcaacgggtactccaatatcttctatttccgcaaacgcggtaagggatgggagctgtacaaatatgaagacacgagcatttaa

SEQ ID NO: 451 - DNA, 10082 bp, unidentified
  source 1..10082: mol_type = unassigned DNA
atgaaacaatataccgcaaccgccaacgacgacggcgttcgtctttcccgctttgtgcagagcgtgacccgcgattttcccaccagccttttgtacaagagcttccgcaataagcgcgtgaaggtaaacggaaaaaaggccgtgccggagtaccgcattcaggcaggcgacctgatcgagctgtacatcaacgacgagtttttcccgccggaaggcgcaaaaaccgtgcagaaggccgcgccgaaaaaaaagcagaatcagcccaaggtcaatgtcatttatgaggacgaaaacattgctgtgctgtacaaacccacccaccttttgtgccacagtgaccgcaccggcgatgcaaaccttgtggacgcttttacccagtatctgtccgaaaaaggcgagtacgatccccacggcgagaaccggttcaagcccggcatttgcaaccggctggaccgcggcaccgagggccttgtgatcgccgccaagagctacaccgccctgcgggacatgaacgagatcatccgcactgacctactcaaaaaggagtactacaccatcacggtgggtatcccgcagtccgggcggttcaccgcatggtgggagcacgacgagaagaacaacaaggtgagcatccatgcacaccagtcgcaggacgagcgccgcaagcagatcattacggacgtggacgtactgcgcaccgccgggccgttcgccctgtgcaagatcggccttgtcaccggccgcacccaccagatccgtgcacatctggcctatctgggccgtccggttctgggcgacatcaagtacggcaaccgcaagatgaacgagcgcaccggcaccaaaacgcaggccctgtgcgctgtgcgggtcactttccttgatattcccgaggaaaacaccctgcattatctctccggcaaggtcgtcaagctgaaggacccgcagatcataaagcagttcgatgcgctggataaaagcaaggcggatggagaaaacgaccatgcataaaatcgacatgaacacgtggccgcgggcagagctgttccggttcttttccggagtgtcgcagccattttacagtgtcaccttccgggtggacgtgacgaatctccacgcctacaccaaagcccgcggcatttccttttattatgccctcggctatctcgtgaccgatgccgtgaacagcgtggtgaatttccgctataccatccggaacggcgaggtctggcttctggataagcgcatccccagcctgaccgacctgaagcccggcagtgagcagttccacatcgtcacactgcccaagaccggcacgctggacgagttctgctgcgctgcaaaagctaagagcacagcacagcagagctttctggatcaggactgcgagacggacgcgctgatctacatttccaccacgccgtggtttgatctgaccagctgcaccaacgagcgggattttgacaaagacgatgccatcccccgcatcacatggggcaagtatgtaccggaaaacggccgcgaaacgctgggcatgagccttgaggtgagccaccggttcatcgatgggtatcacctgggacagttttatcaaaaacttcaaaaaagcattgatgaattgtaaaaaacggccgctgtactttaccgtacagcagccgtttttctctttgttctttactttttgtcggagtcctgctccgccttttcctgcgattcctgttcacggcgcagctccttgatgcgctttctctcgctctggacatggggccatggccagctgaagccctcgttctcacggcaccatttgaccagcggatagaaggcgaaagccagaccgaagaggtacagcagagcgtacagcagggcatccagcgtgatgagtgcatccagtgcaccgatcaccgccaccacgcagcctgccttcaaaaagaacaggccgttctggcggcagtattcctcaaagtgctccgccttgacggcacggcggccctgatctccccagacacggggatttttcatgaccgaatagccgtagaataccatcatcaggccaagggtgagctgaaagccaaaaaacatttatgatccctcttaatcttcaaacagcggcttcatcaggggcaggaaatccagcgttgcaaagtaatcgcgcggagtctcggcacggcggatcagacggtgggtgccatcctcgcacagcagcacttcggcgctgcgcagcttgccgttgtagttgtagcccatggcagagccgtgtgcaccggtgtcgtggatataaacgatatcgccaatgtcgatcttgggcagcatccggtcaatggcaaacttgtcgttgttctcgcacagaccgcccaccacatcgtacatatggtcgcaaggctcattttccttgcccagcacggtgatgtggtggtaagcgccgtacatggccgggcgcatcaggttggctgcgcaggcatccagaccgatgtattccttatagatgtgcttttcgtggatggcagttgccaccagtgcgccgtaggggccggtggtaaagcggcccatctcagtaaaaatggccacatcgcccatgcctgcgggcaccagaatttcctcaaacttcttgcgcacaccctcgccgatggccatgatatcgttctcggtctgctccgggcggtacgggatgcccacaccgccggacaggttgatataaccgatgtgcacgccggtggccttctgcacccggacagccagctggaacaggatacctgccagctccgggtaatactcatcggaaatggtattggaagcaaggaaagcgtggatgccgaagttcttggcacccttggcggccagcttcttgtagctttcgatcatctgctcctcggtcatgccgtacttggcatcgccgggcttgtccatgacctgaaagccctcttcgctctcgcccagactgaaggttccgcccgggttatagcggcagaagatgttctccggcacaccggcgacacgctccagaaattccaccatggtggcatcgtccagattgatataggcacccagctcgtaggccttcttcatatcctccacgggagtctggttggaggagaacatgatttcactgccggagaaaccgcacacctcgctgagcatcagctcagtcagggacgagcagtccacgccgcagccctcctccttgaggatctgcaggatgacagggtttggcagagccttgacggcaaaatactccttgaagcctttgttccagctgaatgccttgttgatgcggcgggcattttcacggatgcccttctcatcgtagacatggaacggcgtgggcacatcctgaatgatctcctgtgccatcgcctcggtcagaaacggtttcttttccatagtaacatccctctcattttatatgcacgcggccgatcgccgcagtgacatcagtagaaactcctttcgtcatcgctgatgcgatgccacccattcccctttttgtcgctggcgcgacatctgtttttctctttgttacctgtggtgacatttttccccggcgcagggagaatctgtcccggccgggggaagtctttctcaaagagggaggctttgccgcacggacaagctccctctttgagggggctgtctgcgcagcagactgggggagtttacagcttcagattctggcgggtgggggtgaaggtcgggatcatctttgccagctgctgcaccacaccctcgtcgttgtgctctgccgcagcggcaagctcctgcagctgcccgtagaactcggccagatcgatgctgcgcggcgaagccacaaaaattttattgtgctgggtgcggcgcatcttatcctgctcctcgtccatcatcagctcttcgtagagcttctcgcccgggcgcagacccacgatcttgatctccatattcacgcccggctcatagccgtaaaagcggatgagctgctttgcaagatccatgatcttgaccggctcgcccatgtccagcacatagatattgccgctctcggccagtgcaccggcctgcagcaccagctgggccgcttccggaatggtcataaagtagcgctcaatgttgggatccgtcagggtgacaggcccgccttttttgatctgggcctcaaacagcggaatgacgctgccgtggctgcccagcacattgccaaaacgcacagccacacacttcatatccgtgttgcccgcaaaggtctggatgagcatttcgcagatgcgcttggtacagcccatcacactggtggggttcacagccttatcggtggaaagctgcacgaaccgctccacgtcgtgttcgctggcgctcaccagcagatttttggtgcccagaacattgttcttgaccgcttctgcagggctgacctccatcagcggcacatgcttgtgtgctgccgcatggaacaccacagtgggatgatatgtttcaaaaacctcatccagacgctttttatcgcggatggagccaatgagcaccgttaccgggatatcccgaccgtacttctgctgcagctccatcaaaagctcataggcgcagttctcgtagatatcaaaaataagcagcttgccgggcttgaagcgcatcacctgacggcacagttcgctgccgatggagccgccgccgcccgtgaccagaacggtcttgccggtgaggtagccggagatctgatcggtatccagcgtcacttcctcacgggaaaggaaatccgccgggttcaactcgcggaaggctccctgctgcggtgtaccgctgcccaccagctgcgggtcactgagcagctgcaccgcacaatgggtgctgacgcacagatcgatgacatggttcagcttgctgcccttcagggtaggaatggcgatgatgatgctgtggatgccgtagcgcttgcacaggtccgggatatcctccagcgtgcccttcaccggcaccccgtggatggtctggttgagttttgtgggatcatcgtccaccgccaccaccgcgtgaccatattccttattggatttgcacacgttgatggcccatgcaccggcttcgcctgcacctacgatcatcaccgggcggttggggtccttgctggcagcgccgcgcagcttttcgcccagcgggtggttcaggaacagccgccatgccagacggctgccgcccaccagcaggaagatgagcaccgccgccatacagttggcggagttgaacagcacaccgtggatgcacagacggttgacacagtagacgacaacggtaggcacagccaccgttcccgccagacgcatcaggtcgcgttcaccggcatacttccacagtacggagtacagcccgctgaacagaaagctggcaatgtacaccgccacgatccatggcagattttcgtacagaagctcacggttatgcggccaccaggcagcttccactgctccgtctgcccgcagcagcagcgcaaaataaaagctgaatgcaacaatggctgcatccagcagcacaagcagcgcccggcgcgcaagcacctgcggtgtgttcttttcatctttcacaaaaaagtcctcttttacatacggcacaaaagccgcagttttggccggaaaagcttccggtttcacagagtatccggtacaccggacagccctatctttatattatactcagaacactgcagaatgtccagaaaatttgaatccgctgccaaactctctctattttttcggtctgccgggccggtgcgcagcccagagcgcggctgcttcctctccaaggcccagcggccatgccgccagcaggaacactcctgtggtagcgcagccgcctacgcccaacgcggccagctgcaaaggcagccgagccgcaaacccatccgcaagcagcttccgcagcgccataccagccgctgcagccagcacagctgccagtgccggtgcacccagccagcggcggaatgcatgctgcgtgccgctggaaaacagcagatgcccggtgttggccgcacaggtgtacaggctggaaagcaggatcactgccaaaaagcccttcatgccaaagcgcggcagcagcgccaccaccccgccaatgcgcaggatggaatcccacacgctgtagcggaaggccgccttctgctcccctacccctttcatggcaccgtccaccatgctttccagatacatcagcggcatggcaggagccagcgtttccagataaaacccggcatccgcactttggtacaaaagctgtgccagcggccgtccccacacccagaacagcacccctgccagcgcggaaaaatagccggtgagcctcaacatccggtccagaagtgttttgagccgttcggtctggcccagaatgtgggcctgcgtgatctccggcatcagcagcaccgaaagactgcccagcaggccaaatgggaacgtaagcagcggcagagccatgcctttcagttctccgtactgctccagcgcggcggtgcgcccgcccgcgttgatcagatagaccgcaaggcaggcgggcaccagcatattctccgccgtgtgcagggcgcttgccagcacccgcccgccctccaccggccacaggatctcccacagacggcgggccgggtctgccgggcggacggctttttgccccgcaaaggcactgcgggcatcccgccggtaaaaggccagcatacacagcgccgacaccgcttcgctgacggcggtagctcccagcaccagcatacagcgcacgcccaccgcaaggccctcggtgcgggtaagcgccagtgccaccagcgcgatgcgcaccgtctgctccgtaagctggctgaacacattgggagctacatgccgtcgggcgatgaaaaaaccgcgcagcaccgacgagaccgccatccatggcattcccagcgctgaaacgcgcaaagcaccgacggcgcggacatcgccaagccacaaccgggccgcaagatccgctgtcgtcagctgcagcgcggcggcaaacagccccagcacaagtcctgccgccagcagacggcgcagcaagccgcaggctgcaccacgggcggaagccgggccgctgagttcctcggccatgagccgggtagccgccaccgaaacgcccgccgttgccagcgtgacgaacagtgaatacaccgccagcaccagctggtaaaggcccatcccctcgccgcccagctcgtttgccagccagatgcgcaggcccatgccggccagccgcagcaccacgtctgaaccggtgagcagcgccgcatttttcaaatagctctgccgcatggcacacaccctcctgacagtcgcagtctcccttttcagcctatgcatctgcactctgaaaaagacgagcggcgcggcgggttgtttcctgagcgcttttatggtatagtaaaggggcggcctttgcagccgtattctgatcaaggaggaagcacacggccaatgcctctgagccagccgtgcgcaaaaagagaatgagcgaagaatgtacccatgactgctccagctgtggagcagcatgttcttcccgcgatgcagcgcccaagcacgatgcccccaaccccaacagcagcgtcaaaaaagtcattggcgttgtgtccggcaagggcggcgttggcaagagcatgaccagcgctctgctggcctgcgccatggcacgccgcggttaccactgcggcattctggatgccgacatcaccggcccgtccattcccaagctgttcggcatccatggccgtgccatggccgacgacaagggctgctggcccatccagagccgcatgggcatcgatgttatgagcatcaacctgctggtggaaaatgaggaagaccccgttgtgtggcgcggcccggtaatcgccggtgctgtcaagcagttctggaccgatgtggtctggaaggacgtggactttctgttcgtggacatgcctccgggaaccggtgatgtgcccctgaccgtgttccagagcctgccagtggacggcattgttgtggtggcaagcccgcaggagctggtgagcatgatcgtggccaaggccgtgaacatggctgagatgatgaaggtgcccatgctgggcattgtggagaacatgagctacatcgtctgccccgactgcggcaagcacatcaatgtgttcggcaacagccatgtggatgaggtggctgcaaagcacggcctgcccgtgctggccaagtgtcccatcgatccccagctggctgcgctttccgatgccggcatgatcgagacctacggcggcgaatatctggaaggtgccgcagatgcctgcgaaaagctgctgaagaagtaaaaatcgtttctctgccctgtgccgtttgcgtggtgcagggctttttgtttgcagaaaatatggctttctgcgcctgcgaaatgcagcaaaatggagaaaagacgttcttttccgtatttcttttgttctgtcagcgctttaaaaaacaaggttctgtgccgtttttttcttttatttttcgttttgtgaagcggtctcaacttttcatctgtttttttgaagcattttctgctttctcgctattgtcaaacccacagaaatgctttataataataaagcggtctgcagccataagcaggccggtgtgtaagaacggaaatccgggatcgtcccaaagcgttttagcagcgcgtccgctgtgcggcgggctgggcggtttcgtctttttcaaattttatagagtaattgggaaaaggagtattctactatgctgacaaatgaatacctgaagcgcgtttacgaaggtctggaaaagcgcaatgccaacgagcctgagttcctgcaggctgtgcgcgaggttctggagagcatccagcccgttgtggagaagcaccccgagtacgagaaggccgctctgatcgagcgtctggtcgagccggagcgcatcatcaccttccgtgtgccttgggttgacgatcagggcaaggttcaggtgaaccgcggctaccgtgtgcagttcaacagcgccatcggcccctacaagggcggcctgcgcttccatccctctgtcaatcagggcatcctgaagttcctcggctttgagcagaccttcaagaacagcctgaccaccctgcccatgggcggcggcaagggcggctctgacttcgacccccacggcaagagcgacatggaagtgatgcgcttctgccagagcttcatgaccgagctgtaccgccacatcggccagttcgtggactgccccgccggtgatatcggtgtcggcggccgtgaggtcggctatctgttcggccagtacaagcgcctgaccaacagcttccagggcggcatgctcaccggcaagggcctgaccttcggcggttctctggcccgtaccgaggctaccggctacggcctgtgctacttcaccgctgaagctctgaagtgcatgcgcaacgacagctttgagggcaagaccgtggtcatctccggttccggcaacgtggcgatctacgcctgcgagaaggctacccagctgggtgccaaggtcgtgaccatgtccgactccaacggctacgtctacgatcccaacggcattgatctggcctacgtcaaggatctgaaggaagtccgccgcggccgtatcaaggagtacgccgagacccacgagggtgtaacctatgttgcagattgcaccaaggtctggactgtcccctgcgacatcgccctgccctgcgcaacccagaacgagatcaacaaggagtccgctgaggctctggtgaagggcggctgcactgtcgtgtgcgagggtgccaacatgcccagcaccccggaggccatcgaggtctacctgtccaacggcatcctgtacggacctgcaaaggcttccaacgcaggcggcgtggccacctccggtctggagatgagccagaactccgagcgcctgagctggacctttgaggaagtggatgccaagctgaagggcatcatggagggcatcttccatgcttcctacgatgcatccgtggctgccggttccgagggcaacctgatggtcggtgcaaactgcgccggcttcctgaaggttgctaccgccatgatggcacagggcatcacctactaa

SEQ ID NO: 452 - DNA, 10960 bp, unidentified
  source 1..10960: mol_type = unassigned DNA
atggacactcaacaaatagatgttatggtagccgacgcctcacatgaggtttacgttgacactattttggaaactatcagaaatgctgccgccgtacgaggaacaggaattgcggaacgcacacacgaatacgtagcgacaaagatgaaggaaggtaaggcgattattgctctttgcggtgacactttcgccggattcacctatatcgaatcatggggaaacaagcagtacgtagctacttccggtctgatcgttcatcccgattttcgtggattagggttggcaaaacgtatcaaacaggcttctttccaactcgcacgtctccgatggccgaaagcaaaaatattcagtctgacctccggagcagcagtcatgaagatgaacaccgaactgggttacgtacctgtcactttcaatgaactgacagacgatgaagctttctggaaaggatgcgaaggatgtatcaaccatgacattctggtagcgaagaaccgtaagttctgcatctgcacagccatgctgtacgatccgacagacccgcggaacataaaaaaagaacaagaaagaaataacatttaaaagatacagcactatggaagaaaagaagaaaaaagtagtggtggcattcagcggcggactggacacatcgttcaccgtcatgtacctcgccaaagaaaaaggttacgaagtatatgcagcttgtgccaatacgggtggtttcagtgaagaacaactgaagacaaacgaagaaaatgcttataaactgggagcagtgaaatacgtaacactggacgttacccaagaatactacgaaaagagtctgaaatacatggttttcggaaatgtgctgcgcaacggtacttatcctatttcagtcagttccgaacgtatcttccaggcattggctatcgcacgctatgccaacgagattggtgcagacgccatcgcacacggttctaccggagccggtaacgaccagatccgtttcgatatgactttcctcgtattggctcccaatgtggaaatcatcacattgacccgtgacatggcattgagccgtcaggaagaaattgattatctgaacaagcatggtttcagcgcagactttactaagctgaaatactcttataacgttggtttgtggggtacttctatctgtggcggcgaaattctcgactccgcgcaaggactcccggaaacagcctacctcaaacatgttgaaaaagaaggtagcgaacagctccgcctgacttttgaaaaaggggaactgaaagctgttaacgacgagaagtttgacgacccgatcaaagctatccagaaagtggaagagattggtgcagcatacggtatcggccgtgatatgcacgtaggcgatacaattatcggtatcaaaggccgtgtaggattcgaagcagctgccccgatgttgattatcggcgctcaccgtttccttgaaaaatatacattgagcaaatggcaacaatactggaaagaccaagtagctaactggtacggtatgttcctccacgaaagtcaatatctggaaccggtcatgcgtgacatcgaagccatgttgcaggaaagccagcgcaatgtgaacggtacagcgatcctcgaacttcgcccgctttctttctctaccgtaggtgtagaatcggaagatgatctggtgaagactaaattcggagaatacggtgaaatgcagaaaggctggacagccgaagatgcaaaaggctttatcaaagtgacctccactccgctccgcgtttactataataaccacaaagacgaagagatatgattaaagcaggaatcattggtggcgcaggatatacagcaggcgaattaatccgtctgctgctcaaccatccggaaactgaaatcgtatttatcaacagcagcagtaatgccggaaacaaaattaccgacgtacacgaaggcttgtatggagaaacagatttaagattcaccgaccagttacctttggacgaaatcgacgtccttttcttctgtaccgcccacggcgacacaaagaaattcatggaaagccacaacataccggaagacctgaagattatcgacctctccatggactaccgtatcaaaagcgatgaccatgactttatctacggtctgccggaactgaaccgccgggccacttgcacggcgaagcacgtagccaatcccggttgttttgcaacctgcatacaacttggtttgcttccgctcgccaagaacctgatgctgacggatgatgtgatggtaaatgccattacaggaagtacgggcgccggagtgaaaccgggtgctaccagtcatttcagttggagaaacaacaatatgagtgtgtacaaagcattcgaacaccaacacgttccggaaatcaagcaatcgctgaagcaactgcaaaacagcttcgatgcagatattgacttcattccataccgtggagacttccctcgtggtatctttgcaacgctggtagtcaagaccaaagtagcacaggaagaaatcgttcgtatgtatgaggaatattatgccaaagactccttcgtacacatcgtagataagaatattgacttaaaacaagtcgttaatactaataaatgcctgatacatctggaaaagcatggcgacaagctattgattatctcttgtatcgacaacttgctgaaaggcgccagcggacaagccgttcataacatgaacctgatgttcaacctggaagaaaccataggactacgtttgaagccttcagctttctaaaaaacagaagaattatgaatttattcgatgtatatcctttatacaatatcaacattgtcaaaggtgatggctgcaaggtatgggatgagaacggaatagaatatctggatctctacggaggtcacgccgttatctccatcggacacgcgcatccccactatgtagcgatgatcagcaatcaagtatcaaaacttggtttctactcgaactccgtcatcaataagcttcaacaagaggtagccgaacgactgggaaagatttccggttacgaagactacagcctgtttctgattaacagtggtgccgaagcaaacgaaaatgccatgaagctggcttctttccacaacggacgtaccaaaatcgtatctttcagcaaagcgtttcacggacgtacgtctcttgcagtagaagcaactcacaatccttccattatcgctcctatcaacaataacggtcatgtcacctaccttccgctcaacgacattgacgcgatgaagcaggaattgtctaaaggagacacctgtgctgttatcattgaaggaattcaaggtgtaggcggtatcaaaataccgaccaccgaatttatgcaggaactccgcaaaacttgtagcgagacgggaaccatcctgattctggatgagattcagagcggatacggacgtagcggcaaattcttcgctcatcaatataacgatatcaaaccggacatcatcactgtagccaaaggaatcggtaacggcttcccgatggcaggtgtcctaatcagcccgatgttcaaaccggtatacggtcagttgggaactaccttcggtgggaaccatctggcatgtgcggcagctctcgccgtgatgaatgtcattgaacaggaaaatctggtagagaatgcaaaagctgtaggtgactatttactggaagaactaaagaaattcccgcaaattaaggaagtgcgcggatgcggactcatgatcggacttgaatttgaagaaccaatcaaggaactgcgcagccgcctcatttacgacgagcacgtattcaccggagcaagcggcacgaatgtacttcgcctgttgccccctctttgtcttagcatggaggaagcaaaagagttccttgcccggttcaagaaagtactctaaccgctcatttgattaataaacagccaacgataaaagcagcctctattagaaatttagttcttattctggctgctttttgttttttcgtaattaaccgttacctttgtctgtaacaactcattaaaaacaagcgtatatgaaaatagccattatcggtgcaggaaacatgggcggttcaatagcccgtggcctggcaaaaggaagtctgatagacgattcggatatcattgtatccaatcccagtgccggaaaactagagaaactgaagaatgaatttccgggtatctctatcacgaacaataatgcggaagctgccgcaggagcagatattgtcatcctcgccgtcaaaccgtggtttatggaacctgtgatgcgcgaattgaaactgaaaagcaaacagatactaatttctgtagccgccggcatcagctttgaagaattggctcattgtgtcgttgcaccggaaatgccgatgttccgtctgattccgaataccgctatcagcgaactggaaagcatgacgcttgtcgctgcccgcaacacgaatgatgaacaagacaaattcgtcctccggctattcagcgagatgggaacagtgatgctgattcccgaagataaaatagcggcagccactgcattggcatcctgcggtatcgcttacgttctgaaatacattcaggcagccatgcaagccggaattgaaatgggactccgtcctaaagatgccatgcagatgatagcccaatccttaaaaggagcggccgcactgattcagaacaatgacacccaccccagcgtagaaatcgacaaggtgactactccgggcggaatcaccatcaagggaatcaacgaactggagcataacggcttcacttccgctatcatccgagcgatgaaagcgtcgaaataacaataagactgtcagtaagttcaggcacggattacacggattacgctgttgctttatacaattataatactaaaaaccgtgaaatccgtgtaatccgtgcctgaataaaatgaaatcatttcgcaaaattactataactaatcacttataacttcaacaatatgaatgaccaaattaaacagatagcagaacgccttcgcggactacgtgatgtactcgaattgacttctgaagacattgcccgcgacagcgacatttctgctgaggaataccggcttgcggaaactggagagtacgatatctccgtcagtatgttacaaaaaatagcccgtacgtacaatgtagctctcgacgccctgatgtttggcgaagagcctaaaatgagcagctactttgtgacccgtgccggcaaaggtgtcagcatcgaacgtaccaaagcttataaataccaatcgctggcttcaggattcatgaaccgtaccgccgacccgttcatcgttaccgttgaaccgaaagcaatcgacgagccgatccattataacaaacataacggacaggaattcaaccttgtcatcgaaggacgtatgcttatcaacatcgaaggcaaagaaatcatcctcaaccaaggcgacagcatttattttaactctaaacttccacatggcatgaaagcgctcgatggcaaaacggtacgttttctggcagtaattatgtaataacatcatggtagaaagatttttatcacagacctctttcagttcacaagaggactttatcaaaaacttaaaaataaacgttccggagaatttcaacttcggctacgacgtagtagatgcctgggctgccgaacaacccgacaagaacgctttgctttggacaaatgacaaaggcgaaagccgccagttctcatttgccgatatgaaacgctatacagacatgaccgcttcttacttccagagtctgggtatcggccgtggcgacatggtgatgctgattctgaaacggcgttatgagttctggtatagcaccatcgccctacacaaactgggagcaaccgtcattccggctacccacctgctgactaaaaaggatattatctaccgctgcaatgctgccgatatcaaaatgattgtagctgccggtgaaggaatcatcctgcaacatatcatagatgctcttcccgaatgtcctactgtagaaaagttaatcagtgtcggtccggatattccggaaggtttcgaggacttccatcagggtatcgaacatgccgccccgtttgtacgtccccgccatgcgaacactaacgacgacatctcactgatgtattttacttccggcactaccggtgagcctaagatggtggcacacgacttcacttatccgctaggacatatcgttaccggtagcttctggcataatctggatgagaacagccttcacctcaccattgccgataccggctgggggaaagcggtatggggcaaactttacggacaatggattgccggagccaatatcttcgtctacgaccacgagaagtttaccccggcagctattcttgaaaaaatccaggaatatcatgtcacttccctttgtgcacctcctaccatcttccgtttcctgattcacgaagacctgacgaagttcgatttatcttcactcaaatactgcaccattgccggagaagcattgaaccctgccgtatttgaaacgttcaagaaattgactggtatcaaactgatggaaggtttcggacaaacggaaacaacccttaccatcgctaccatgccgtggatggaaccgaaaccgggaagcatgggactgccgaatcctcaatatgatgtagacctgatcgaccatgaaggtcgctctgttgaagccggtgagcagggacaaattgtaatccgcaccagcaaaggcaaacctctcggacttttcaaagaatactaccgggatgcggaacgcactcacgaagcttggcacgacggtatttattataccggtgatgttgcctggaaagacgaagacggatacctgtggtttgtcggtcgcgcagatgacgttatcaagagctccggttaccgcatcggcccattcgaagtggaaagtgcattgatgactcatccggctgttgtggaatgtgccatcaccggagtacccgatgagattcgcggtcaggtagtaaaagccacaattgttctatctaaagattataaagcacgtgccggcgaagaactgattaaggagttacagaatcatgtgaagaaagtgactgctccttataaatatccgcgtgtgattgagttcgtggaagaacttccgaagacgatcagcggcaagattcgccgggtagagattcgcgagaatgacaacaagtaagtagaaaatagtttctaatcaataagaaagcgatattatatgaactgtaatatcgctttctcagtttaaagagaatgatccctcatccgcctattttttcatcaagcgttcgatatattgtatctggaaacgataaaaatcacggctttcctgattgcctacggaactattcgccttatagagctgaagtattttctgcaattgcccgaaagaggaagattgcaacaacttctgattcaaaggaggaatgacaggcatacgcatggtggctgactgttcctcggatgcggcggaacagcagcagcgccatttctccgaatagaatgaatcggccaatccgattcgaagtccccccatgggtggttgtataaatcccgcattggtagccagtgcttcgatggctgccgcctgcattttcatctcagtataattgagtgcctgtccggcaatggtagattggaatatagtacgatagacgtcatccaaataagacgtgagtgtatagttgttctttgcgtctactacgcctccttcataaatacgttgcaaccgacgggcatcgtaaagtgttgccgcacctccttgaatcagaccgtcggcaccattcaagtcaaatccgaagcggattattttctccggtataatcagccaattgtttgcttcccgcagttggctgacaacccatttcatggatgcggactgttgacttttgggtacgaatacacgtacgccgtctttttctcctacacgattgtaagtatatacaactcctcccacataccccagtgtatgtcccaaataattagaatactgtccgacaatgctggcaaagtaatcttttaaatcctgataagtatctcccttcacgcccatccagtcttccaagttcttatagacgattttcagattgctgataccgtaatcacccgcctttatcgggtcattgcctaaatcttccgtttgggcggtcgggtcttcaataatccccatttgctgtaatccgaattggtacatcgggtcaccggctttctcttcaatccatttggctagaaccttagattgctctttgggagtcttattgcccggaataaggcgatatccccaattgatggcatatatgtcatacactcctaaaataggaggcgtcagtctcacgcctttctcaaagtcgccgggttgggcaacgtagttgttgcgggcatagtccatgatgctgggagtcgtaccgtatttctgtgtgaaagccggatcgcgcaatttctccacggggtaggaatggctagctcccatgttgtggagcaaacctaacgtatgtcctatttcatgagagatgacataacgcagtgattcgcacattacatcgtcaggaaacacattggcacgtacccgtttatctacggcaccggtttgtacaaaccgccagttgtgtacaagttggatgacattgtgataccaaatgacatcggctgtaaggatctctcccgaacgggggtctacgtaactggggcccatcgcgttcggtatcgcgtatgtggcatatttcacacaactatagcgcatatcatccggatcgaagttagggtcgttcggatacatcttggcttggacggcatttttaaatccggcagcttcaaaggcagtgttccagtctaagataccttgtatgattgtttcacgccatttttgagggaatgctgtatctacataaaatacgatgggttttatgggctctaccagctctccacggaaataggcttccctgtctttaggttccagcctccagcgatggataaaattataggtggttactttatcttcctgggtgtcgaataggttacggaatgaatggaaatatcccacacgattgtcctgaaagcgctgttccatcagcgtatccggcaattggagtatcgagcggttgagcatcagcgtgatgcactggccgttttgattgttgcggagattcatttgtgtgcgtacttccatattggacggaaacagtttgactcctttgataatggaagcgtccggtgcaaaggagtaggacttgcgtataccgtcgtgtatgggagagatgatgcgttggtcggtggtgaagaaatcggtaacatcaatcgtcaagttcccttgatatttgcttttcactttgaaggcagctaccacgggattggtaaagttcttatggaacgatggaagtacagggtccccttccggtacagcgaatacaagttggcgctgatgtatgtacacattgatgctgtcagtagagaaataaaagcaaagtggttcacactgcatttgtcccgccactcctaccccagtattactggtctccgccaatcgggtagccaacagataatcatgcttaaaggcttcggaaccgagttccagcagaagctttccctctttggtataagcgcagagcatgccttcctgccttttcatgccctctatcagtttgtcatattccgtttttttagggtcggcgggaggcgttacggcttctgttttaccttttttctttttggtcgttttcttgtcagacttaggtccggcaaatacaagcatggggatgcaaaatgccgccaatgacactagtagtaattttctcatacgatatactttcttttaagtttgaatattatttctttggattgaagcttgccagtagttgttcatagtatgctatgtatcggtagttttccgccgtcgtatttttgcgaatctcggaaaggcgtttcttcacccagcccgttatcatttttcgggtggcggaggtgattgttccgtttcctatgcgtgaagcccagttataaagaatcccatccgagacgtcttgtttgcggattgcttcgttgcaaatttgcgcatatttgttccagtctctttggtattccgccaccagcagatggttgcgcaacattatttcgtctcctttgaagagtgggaagcgggtcatctcttcgaaatagcgttttaacccttcttcatcaatcttatatacagagccttcctgtttaaagaagtcgcttgcatgtgccgaccacacttgatacaacttatcgtctaactgttgcggatcatattgggctttaaattcgtcctgatgttcctgcacgtagcggaaaagaggatgaaacggttcgcggatatagcggaagaaaaggtcgtaaagacctttgctctccaacaattccttctctttcccttccagcagctccaatgcaagttgcatagcctctttacgtttcatgtgttcatcgagagtcacaatatactgcaccataaattcttcactgcgttcccctccctcatacttcgtttgcaggacttccagcgttttgccggatagggtgcgttccgtacgttctataaattcgtcggctgtacaaccgcccacggcggaattcatcaacgtcccctctttggtcagatagagaaaagtaggaaaggcttttacgctgaactttttggcaagttccggcccctctcctttttccatgtctatcttggcgcatacgaagcgcccgttcagataatctcccaacttcttctgggtgaaaacctggcttaccatcattttacatggtccgcaccaagcggtgtagcaatctaccagaatcggtttgttggcagcctgcgcttgcgtcagcagggattgccatgcgggattgtcgaggaaagaaaccccttctccttgctgggcgtacgtgatggtagtccagcaagcaagtaatgttactatgatatgctttaacagtcggttcat

SEQ ID NO: 453 - DNA, 9348 bp, unidentified
  source 1..9348: mol_type = unassigned DNA
tttccctacacgacgctcttccgatctgcccaccacaatggcgatttgggtgcccaagtcgtgcgcggccttgatgcccgcgcagatggaggcgatggtttcctcatcaaagccggttcccttggggccggagagtgcctcgccgctgactttcagaagaatacgtttatactgaattgccataaaaaacaccacctgtaagtattttggcggtctaccctgccgtgcaggcatagtaaaccattctttttgtagtacattttacaataaatccgggataaagtaaagcggtggaggaaaaaaagaggccgcccaagctggacggtctgaaactttgttgtgttgtaggggccgggcatacccagcccgggcgcatacgacaggcatttcctactgggcggctataattttcagttctcttcgcagcaccagccgccgggtctgctgctcgactcggcgctccatcggggattccagcgtcaggccgtccagcggcggcgcagtgggcagggtgaagcagagttccgtgccaggcccctcccccacggccagaccccagcccatggcccgggcataggcggcaatcagcggcaggcccagcccgcccgcgtggagcagacggtcgctccactgtccgtcggtcaacagcgcttttgcgtcgggcggcagaccggggccgttatcgcggtaacagaactgccccggcgcacagaccagcgtgatggcggcggcccggtcaacagccagtgtgttggagacaaggttcgtcagcagaccgttgagcagcgacgcatcccccagcgtgggaagcacatccagccctgcggcctgcaattctatcgtgaagggcagcgcgtattgcgcggcttcctcccgcaaaatttcgcagatttcccgcagctgacccagcaggtcgatgggccgcggttcacaggtgccatgcagcaatgccgccgttgccgcgtccgatgcctggtcgcccaggcggcgcaggcagagcagctgcgcctgcaattcttccagcagcggcgtcagctcggcgcgttccgccggggtagccgtgtgatccagacggtcctgcaggacctcaaaggcattctccatgcagtcgaacgaacggcggaaccgcccgcgcagcccgccccgcagcgccagcagtgccgcgttttcctcctgatgaaccatggtggacaccttctttatttcatttcagtttcagggtgcggtgccgagccgcacggcaccggccgcaggggcgggtcccctatccgcccgcaccttataagtacggttccgtcttatcccgcaagtctttcagcagccctttgaacagctgcccattggagagtacaccgtccgccgggcggccgctgcgcaggcataacgtccggtaaggttcttcgccccgctttgccatggctgccgacatacgattcagcgccgaagtcacggtgccgatctcgatgccttcctccgcagccacgtattgctgcaggctgccgatctgctgcggtttgtccgcgtacagggcgtacagcagcatccgctcggcatagcggtagccgctcagcgtttcgggcgcgccgtaggcatccagcacatcgtcgcagcactggcgcaggtagtacagctggtgctcatcctcgttcgtgcccatgcggtagacctcatcaaagagatttttcatgccgtaagggcgcagcatgatctggtactgggagaacagccgcagtgccttgcgggcggcggtttcctccggcacagggaccaacaccagaaccgctggttccgggtcaagctgcatcgtgccgatctcctgcaagacctcggtcacgccgggcttggtcagcagcgcgtccagcaccaatacgttggggcgcagcccgccgtgcagcagttccagcacctcctgcccggtggccgcaatggccgccgcgcggacttcatcgctgtgggtcttggcaaacaggctcatcgtatcccggtccagccgggagctgaaggcgaacagcgccaccacagcagaggttttgggcaggttcgggctcttgcgcgtttttccgccggccgtccgcggccgttcatgcaacagtaccgccatcagcccaccgccgatccacagaggtcgtacaggacagcgggcacctgcgcgggttccaccgcattttcatacagaaaacgtgtgagcatcccgacgcgttcctcccctgtatcacacaccatgcactccaccgccggggctgtgtcccgctgggcacggatgcagtaggcatcggcttcgcgcagcagcgtgtaggtcactgtcccggcatcttgcaggtctgccagcgcggacagttcccgccggtagcttgcaatcagtttggctggcataaaggctccccctcacatactttcgcagcgtaaactgcgatggttttattaccctactataattcaaccgatgtgcgggattcaatccacactgcgtatacgtttttatacggcaagtgcaagatttgtagtattatagcattttatatagagatgtgcaagatagatacgaaagtggtgctatgacaatataaaatcgtatgttacaggatatgtccgccttcgcacaacaaaatttgtgtttcacccttgacatttcccgcaaaaaggggtaaactaatttagtcaaatgacgtgggcccgtagctcagttgggagagcgttcggttcgcatccgagaggtcaagggttcgaatccctccgggtccaccataaatcctcaccgtgttgtggtggggatttttatttttaccataagattgcacaaatttttaaaggccgctttgcacaagatttacaacaccggcagtaggcaaaatgcctgctgccggttttgtgtattgacttttggggaataaatagttataattagaaccgttctaaattgaagcattgcaaaggaggtcctgcgcttggtcccgattttatcctacgcgcagcactacaaaaagtactatactgtgcagtttgagggcgcggcggccgcgtatgggctgaatcagctggaaatcgacattttgctgttcctgcacaataacccggagctttgcacggccagtgacatctgccgctaccgtgcgctggcaaagtccaatgtgtctgcggcggtggagcggctgcgcagccgcggggtgctgaccgtctcccctgcaccgggcaaccgccgccagcggctgctgggctttaccgacgaaggctgcacgatggctgcggcgctggccgagatccaacgccgcagcatcgagccgctgtttgccggcttcacgctcgaggaacagcaggccttgcaggactatctgcgccgcatggatgccaacatcctgcgctgcttacaaaaggagtaatcgtatgacataccttatcaagtttaccgtctgctttgcggcaggcatcggcgcggggctgggcaccggcttcgcgggcatgagtgctgcggcggtcatctcccccatgctcatcacgtttttgggcatggacccctacatggccgtgggcatcgcgctggcaagcgacgtgctggcaagcgcgatctcggcctacacctacggcaaaaacggaaacctggacattaaaaacggcgccgtcatgatggcggctgtgctgggctttacgctggtgggcagctataccgccagcctgatgcccggcacgacgatgggcgggttctcgaccttcatgaccttcttgctgggcgtcaagttcattgtgcggccggtcatgacgacgaaaaacgccatgaacgctgtcagtgcccaaaagcggttcgtgcagtcgctgctctgcggcgcgggcgtgggctttatctgcggattcgtcggcgcgggcggcggtatgatgatgctgctgctcctgacgtcggtgctgggctatgaactgaaaaccgccgtcggtacgagcgtttttatcatggcattcacagcgttcaccggctcggtcagccactttgccatcggtggcgcacccgatctgttctgtcttgtctgctgcgttctcagcacgctgctgtgggctcgcatcgccgcaaagttcgccaacaaggccgagcctgccaccctgaaccgcgccaccggcgtggtgctggtgattctgggcgcagtgattatggcggtgaattatctgtaagatttcctttgtcccataaagcacaaaaatccatctcaagcttctcgcttgagatggatttttctttcctgttatttttgtggcaacagtacccgcagggtgaaccactcgttctcccaatgcagggtcaaggtgccgccatggttctcggcggcggcgcgcacgctctttaaatcgtacccaccatgggcgctgcgtttgggcagaccgtcggcggccagctctaccgggctggcgcagtagttttcaaaccgcagcatcacaaaaccgttctgtgcataaattgccacgcggatgagccgtttttccgggtcaggctcggcggaaacgctctcggtggcgttatccagcgccgttccgacgatcgtgcatatttcccctgtcgagaggaaatccaacagcttgccgtcggctacgcaggtcatattgatgccgtgttgctggcagtacaggcttttcgcggtcagcagcgtgtccaaaaccgggttgccggtcttgttctcggcctcatacttgcggatgccgctctccatctcggccagggccgcgtcctgtttggcctgatcgcgctcggcacggatggccgcaatctgcattttcagttcgtggtagcgccggttgataaggcggatgttttctttgctctgtttgtactgctcgtactggcggcgcaggacattgtccatggcggtcagctcgctgtgcagggcattctcccgcagctgctcatgctggacgctcaaaatcagcacgcctgcaaagtccaccagcgtgcggatgtagaaaacgctcatcgttgcctcgccattggagacaaaactcagattgctgactgcaaagaccgtgaccgccatgaccaccgccatcagcatggctgccgtggtgatggtcagccgggccgccgtagctcggcgctgttcaaacagatacaaaaatccatatagtgccgcatagaccaccgccagcagcaccagcgagagcggcttgcccgccccctgctgcggccacaaaacgcaatgcagctgccattccacgctggcggccagttcggccaaaatgaacgctcgggcacagctgtacccggcttccagcaggttcatggcccgcgtgccccacaagtagagataaatccacccgatggccgccgccatgcagggtatccaccacaccagcggcacgtcgccggtcagctgcaaaaagacagccagcagccccgaccaaacgacggtaatgccccagcagagacgtttgtccatgcgcggtggcatggcctgggcatacaaaaccgccgccagcacctctgccaaggccgtgtacaggcgcgggatatccggcagtgtcgtcatgcgccgttccctccgatgtaatcggccagcgcttccaaaaacgccttgcgccgagggcggctgacctgcagctggtgcgggccgacctgcacggtgttcatctgcacgctggaaacatacgccaaattgaccagatagccgctgttgcagcgggcaaagccatggggttccagcttttcctcccaggctttcagtgcgccaggagcggagaaatcaccgtcctcggtgtaaaaatggatgcggtggccctcgctctcgatgtaatagaccgatgcttcatccagccgccgcataccaccgtccaccggcacggccagataccgccgcgcccgccgggccagctggcctgcggccttttgcagctgctgcgagaaggcaaaatacggcaccggcttcagcacgtaatccagtgcgccgacggcgtaccccttgatggcgtactgggccatgttcgtgatgaagatgagcagcacgtcactgtccaatgcgcggatgcggctggcggtctccatgccgtcgaggtgctgcatctccacatccaagaaaataatgtcgtagacaggccgatatccttccagaatttccacaccgtcggtgaacatcgtcacctcgatctgggcgtcgtactggcgcatatagcgctgcacatagcccatcagctggtcgcggacagcggcctcatcctctacgatggcgacgcggatcattgcagttcgttctcgcagcgatccagcacagcggcgatgacctgatccatgtcgtagtatttgtactcacccaaacggccgccgaagatgaccttcggctgagcgtcggccagcttcttgtactcggcatagagtgcgccgttcttggcgtcgttgaccggatagtacggctcgtcgccgggcttccactcactgctgtactcgcggctgatgatggtcttgggcaggtcgtttccgttctcgtccttgccgaactcgaaccacttgtgctcgatgatgcgggtccacggtgtctcgcggtcagtgtagttgacggcggcattgccctggaagctgggcttgtccagcagctcgttctcgaagcggaccgagcggtactccagcgtgccgagcttatagccaaaataggcgtcgatagggccggtgtagacgattttgtccgccagtgcatccagttccgccttgttctcgaggtaatcggtgttcaagcgaacctcaatgccatcgagcaggttggcaatcatcttggtgtagccgccgatgggaatgccctggtacagggcattgaaatagttgttgtcgaaagtcaggcgcaccggcaggcgcttgatgatgaaggccggcagatccttacagtcgcggccccattgcttctcggtgtagcccttgatgagcttttcgtagatatcgcggcccaccagggagattgcctgctcctcgaggttctgcggctcgtgggtgatctccttgcgctgctcctcgatttttgcagcggcctcctccggggtcacaacgccccacatcttattgaaggtatacatattgaagggcagcgagtacagctcacccttgtagttggccaccggcgagttcgtgaagcggttgaactcagcgaattttgtgatgtagttccatacttttttgttgttggtatggaaaatatgggcaccgtacttgtggacgttgatgccctcgatgttttcggtgtagatgttgcccgcaatgttcgggcgcttgtccacgacgagaacgctcttgccatgggctttggcttcgtgggcaaaaatggcaccgtacaggccggagccgactacgagataatcatacataactttttctcccttaatcgcggcggaaaaggtcgcgggtgtaaactttttcttttacatcgtccaggcaggcgtcatagcggttggcaatgatagcctgggactgcgccttgaaggcatccaggtcgttgacgacccgcgagccgaagaaggtctcgccgtctttcagcgtcggctcataaatgatgaccgtcgcgcccttggccttgatgcgcttcatgacgccctggatggaactctggcggaagttgtcggagttcgacttcatcgtcaggcggtacacaccgattgtgacaggcttttcctgcgcttcgtcgtactcgttgtcctcgccgtagccgtagtaacccgccagccgcagcacgcggtcggcaatgaaatccttgcgggtgcggttggattccacgatggcctcaatcaggttttccggcacatcggcgtagttcgccaacagttgcttggtgtccttgggcaggcagtagccgccgtagccgaagctgggattgttgtagtggctgccaatgcgcggatccaggcagacgccgtcgatgatctgccgggtgtccaggcccttgctctcggcgtaggtgtctagctcgttgaagtaggccacacgcagcgccagataggtgttggcaaacagcttgacggcctcggcctcggtaaagcccatgaacagcgtgtcgatgttttccttgatggcaccctcctgtaaaaggcccgcaaaggtgtgggccgcctccacaaggcgctcgtcgttcaggtcggtgcccacgatgatgcgcgaggggtacaggttgtcgtacagtgccttggactcccgcaggaattccgggctgaacaggatgttgtccgtgccgaatttttcccgcacgctggccgtgtatcccaccgggatggtggacttgatgaccatgatggcgtctgggttgtactgcatgaccagcttgatgacggcctccaccgcggaagtgtcaaagtgctgggtcttgctgtcgtagttggtgggggccgcaatgacgacgaaatccgcaccggtataggctttctcagcgtccagcgtggcggtcaggttcagcggtttctcggcgagatatttttcaatgtattcatcctggatcggcgacttgcggcggttgatgaggtcaaccttttccgggatgatatccacggcccagacctcgtggtgttgcgaaagaagggtcgcaatggacaggcccacatagccggtgcccgcgaccgcgattttcaagtttttgttcatggtatcgttcctcacgctttgcgcgtatttatggcatatcttttaaaagtataccatactttgcgcggaaagtccatcttcagcaaacaaaagtcttttctaccaatttttgcggcgatattttgttacttttacgcattgacgtcgaatgcggttggtttttatacttattttgtatggatgtatactttactaggaaagctgtgatttctatgcgtacctcccctgcccgccgccgcggtttcacgctggtggaactgattgtcgtgctgacgatccttgccgttctggccgccctgctgattccggcgctgaccgggtacatcgacaaagccaacgaggccaaggttttggccgaagcccgcaccgttctgacggcagcgcaggccactgtgtctgaggcgtatgccaaggagcagcttgtgtccagcgacggcgctatttatgataaaccggctgataaggctgctaatgatatggcaaagcaaatatgggagctttccgagcttgaccccaacaacaagaaaatcacctggcgttttacagtggcaggcctcaaaaaccctattctgacgccaggcgtgatcgatacgtttgaatactgcaacggtgcctaccgcatcacctaccatgccattggtacggatgaatacccctccggctgggacaacgcggagaaggcgacggcactgaagccgctcatccttgatgatggcggcaaacctctcttggagtccagtgactacgacccggagcattggcattag

SEQ ID NO: 454 - DNA, 21290 bp, unidentified
  source 1..21290: mol_type = unassigned DNA
atgaaaaagaaagcattgactgtagttcttacacttactatggcagcaaccatgtttgcgggatgtggtgataagaaaacaacagggacaactgaaacaacagaagctgtttcgacagaagatgaaaaggatgatcaggcaaaagcagatgaggtagcagcattgattgatgcaatttatgtgcaggaaagaactgatgagacagatgcacagtgtaaggcagcaaaagaagcatgggatgcactgacagatgctcagaaggaactggtatccggagaaaatgcagacccggattactttggaagagataccggagatgcatcaaaggatgatcctttaaatcaggatgatattggagagaatgagcttttggtagtaagctttggtacatcctttaatgacagccgcgcaacagatatcggcggcattgaaaaagcattacaggaagcaaatcctgactggtctgtaagaagagcatttacagcacagattattattaaccatatacaggcccgtgatgatgaaaaaatcgataacatggatcaggcattagagcgtgcggtagacaatggcgttaagaatcttgtggtacagccgacccacttaatgcatggtgcagaatatgatgaactggtagaagcaattgagaagtatcaggataaatttgaaacagtccgtatcgcagaacctctgttaggtgaagttggaagtgatgcaactgtaatcaacgaagacaaggctgccgttgcagaagcaattacagcagaagcagttaaacttgctggatatgacagcatggatgctgcagcagaagacggaacagcatttgtatttatgggacatggtacttcccatactgcaaatgtaacttatgaccagatgcagacccagttagaaaaactgaattataagaatgcattcgttggaaccgtagaaggtgaaccggaagataccgcatgtgaagctgttattgaaaaggtaaaagaagcaggatacaaaaaagtaattcttcgtccgttaatggttgttgccggagaccatgcaaacaacgatatggctggagatgatgaagactcatggaagagccagtttgaagcatccaaagcatttgacagtgtagatacacagattgaaggtcttggaagaatcaaagcagtccaggatatttatgtagcacatacaaaggctgctttagaggcagagccacttgcaacagcaggtggttccaattcctctgcagccttagaggatggaacttataccgtagacttcaacacagacagcacaatgtttcacgtaaatgaagcaaaagaaggcaaggcagaacttacggtaaaggatggaaaaatgacagcacatatcacacttccatctaagaacattgtaaatttatttgttggaacagcagcagatgcacagaaagatggtgcgaagcttcttgagcctactacagatacggtagaatacagtgatggaaccagcgaagaagtatacggctttgatgttccggttcctgcagtggatgaagactttgaccttgcattaattggaacaaagggaaaatggtacgaccacaaagtatctgtttctaatcctgaaaaaaaaaattagctgatggctcttatgaggcagaagtaactttagggggcggaaccggaagagcaacggtggattcaccggcgaaggttgtgataaaagatggaaaaattactgcaaccgttgtgtggagcagtccaaactatgattacatgttagtagatggaacaaagtatctgaatgagaacaagggcggaaattctacctttacgattccggtatccggctttgactgtgacattgcagtagtgggtgatactgttgcaatgagcacacctcatgaaattgaatatacattgaattttaaactggtaaaataaaatgcagaaaaaacgaattatgatagtgagcgttatctgtatacttcttctgactctttgtgcctgtggtacaaagaagcaggagaaaaaagcagataccgtagattttagttctctcagcaagactgggagtatggaattaaattatgcaacacagtatagtgtcgatgaatatgacgggtacaaaatgattacgatcgtggatgacggtcgttttttgcttattccggagggcgtggtggtgccgcagaatatcccggaggatgttacggttttacagcagccgctggataaaacatatctggtatccacttctgtcatggatttggtaagacagattgatgccatgtcagatatccggctctccggaacgaaggaagatggctggtatgtagaagaagccagggaagccatggaggaaggagacattttatatgcaggaaaatacagtgctccggactatgaaatgattctggatgaaggctgtaatctggcaattgaaaatacaatgatttatcataacccggaagtaaaagaaaagttggaagaacttggaatccctgtacttgtggagcgttccagctatgaatcacacccattgggcagactggaatggatccgtttatatggagtattatttgataaagaggaagaagcagattctttctatgaagcagaattagaaaaattagagccgattatgaagaaagaaagctgcaatgtaacagtagcatttttcagtgtgacagcaaacggaacaatcagtgtgcggaaatcaaatgattatgtagcgcagatgattgctctttccggtggaacctatgtgccggaacaactggcgggcgaagaagaaaatgcactttccacaatgaacatacagatggaggatttctatgcagatgcaaagaatgccgatatcttaatatataacagtacaattgaaggcgaaatcagtacgctggaggaattgaagcagaagaatgcactgtttgcagattttcaggcagtacaggatggaaatgtctattgtaccacaaataatttcttccagaaatccacggcaatcggagattttatggaagatctgaataaaataattcggaatacagatacagaagaagcaggatatttaaagaagctgaggtaaaagaaaatgaagcggtatgcagtctcttttataacaattattatattgctggtgggattaattttctggaatattggttctggaagtatttcgatttcctgggatgaactttggaatattttactgaaacagacagaagaaggtaccgcttatcatattatctgggatatcagactgccacggattctggctgctgtcatgctggggggagcattgtccatttccggatttttactgcagaccttttttggaaatccaattgcaggtccgtatgtgctgggaatttcttccggtgccaaacttatggtagcactggcaatgatttatcttctgggaaggggaattacaatcagttcttttggaatggtagcagcagcctttgccggctcacttctggcaatgggatttgtacttttaatttccatgaaggtacatagaatgtctcttctgattgtatgcggaattctaatcggatatatctgctcggcaattacagacatctgtgttacttttgcagatgattcgaatatcgtaaatttgcacaactggtcccagggcagcttctccggaatgaactggtcgaatattctgatgatatttatcctgaccttgctgtcctttcttgcggcaatgtttcttgcaaagccgattggtgcgtatcagatgggagagacttatgccagaaatatgggtgttaatataactgtgctccgggtaagcctgattctgttatccagcttattgtcggcttgtgtaacagcttttgcaggaccgatttcctttgtaggaattgcggtgccacatctgataaaatctgccacaggaacagcaaaaccactggtgctgataccgggctgctttctggggggagcggtagtgacactgttttgtgatggaatcgcaagaacactctttgcaccgacagaagtaagtatcagtaccgttacagcggtctttttagttccggtggtaattgtaatgatgctgcgcagacaggaggagcggggatgacaaaacagatggcaggaaaagcagagtacacagagaaagaacgcatggcaggaaaaatgaaatcttctgaaagaaaacaggggcttgtaacagacaaattcaaagttggatatggaaaaaaggtcattctttcgaatgttaatctgatggcagaaccgggaagggtattgacgttgattggcccaaatggttccggtaaatctacgattctaaagagtattgtaaagcagttgaaatcccttggtggtgtagtatacctgaacgggaaagcaacctcggaaatgaaagagacagaaatcgcaaagagcctttccatggtaatgacagagcatattcatccggaactgatgtcctgccgggatgtggttgcaaccggacgatatccctataccggaagacttggaatcttagataagcaggactggaaactggtggatgaggcaattaccatggttcatgcggaagaggtggcagagcagtcatttacaagaatcagtgacggacagagacagcgtgttatgttggcgagagccatctgccaggatacagcaatcctggtattagatgaacctacctcttatctggatatccgctataagcttgatattttaaacagcatccggaaactggcaagggaacgaaatatagcagtaattatgtcactgcatgaacttgacttggtacagaaagtatcggatatggtagcctgtgtagatgggaccaccgtcagccatattggaccaccggaggaaatctttcagggttcgctggtacagaagctttatggaattgaggaaaagaactttgattccatgcttggaatcatgcagatgccgggaaataaagctgccccgaacgtattcgtaatcggaggcggtggtgctgcaataccaacttattacagactgcagagagaacatattccatttgcagcaggaatcttatttgaaaatgacgtagaatatcctgttgcaacggcactggcatcaaaagtcattactgcaaaagcattttatccgatggaagaagcacaactggaagaagcaaagaaaatacttacgggttgtgaaacctgtatttgcacctgcgagaatttcggaccttataatatgttaaataaagaactgcgaagcctggcagaagaacagggaaaattgaaataaagaaattggaataaaagaaaagcccatggaatcaaagttgttttatgatttcatgggctttggtatattttactgttcagtgtcttccggtaagatgaattttccaacaagttcatctaaggaagttgcctgtgcagataactcctggctggtagcagaggtctcttctgcggatgcggagttggactgaactacctcagaaatctggtttacaccctgttctgcctgatccatggcatttgcctgagtcttagcaacatcactgatgtgcttggaagattctgcaatctgctggataccatttacaacgtttccgatagattcagcagcatggtctgcagcagtattaccttcagcaatctcctgaagggcaccttcgattaagtctctggtatctacagcagatttggttgtctgctctgcaagctgacgaatctggtcagcaacaacggcgaatccacgtcctgcttcgccggctcttgcagcctcgatagaagcattcagagaaagtaagttggtctgggaagcaatatcttcgatttcagaaataatatttccaatcttcttagaagtttcatcaatacgtgccatagcatcaaccatggctttcatttcagcactgctgtcttctgcttcagcagcatactgctttgcctgatcataagcaatctgagcctgatcagcggactgttcaatattacttgtaatatcagtgattgttgcctgaagctgttgtacggcaccggcctgctcagtagcaccttctgccatactctgggaagattctgcaaggttcatggaaccggcagaaacctgggaagaagcttctccaatcatctggatagtatgtaccattgcatcacgcatgccacgcattgcagtcagtaactgttcgaagtcaccgacatatttgtcggaatgctcggactgaatggtgtaatcaccatttgccatgccctccatcagaacacctacatcagtgatgactgcgttcagtgtttcagccatttcagtagaagtggctgcaatacttgcaacttcatcgttggatttcacctccgggaaagggtcatgtaaattaccctgtgcaaaagtgctaagacgattctccagtgcgactaaaggttttgaaattccctttgcaatggaaactcccatcttggaagaaacaaggatggatacaataataattacagcaatgataatgataaaaataagggtaacaacagaaagtgtatctgctaaatgatctccttctgttactttggtattcatcaagtccctcattccggaatagatttcgtcatataatggggctacttcatcaatcattatattctgggcttttgcactctgacccgggtcggttgttttgccggtatcaattgctttctgctcagtagtccagtaatcttccagcttggcatcaatggaatcatagatttcctgctctttgctggtggtagtaacttcatctacaatttcccaatactgttcaaaagtggcctttctttcgtcatgggtatcggacatctgactaatcagactgtcatcatcatatccgacaatagcacgggtggcagatctggtatcggtaaaggcaaccaatgctttgccgatgtcaccctgtgaaaaaccataattgttcagggcattcttatacagagtcatggttacaatcagcataaccacaccaaggacggctgcgatggagcaggttgtcacgataatacggaatgccttccccagacggtttctaattttaagattctcaaacataacgttcctccttcgttatatacaatggcactatggcaccaattgcgttatgcaacagtaaaagtaaaagcgaaaatctaaatatttatcataattttactactttatgggaaatatgtcaaaaaatattcagacaataagtgacttggaaactgattattcctcaaatttgtttaaacatatgaaaattgacatttttccggtgaaccgctaaaatgacgaagaacataaataaggcattaagggagaaaacagtatgggatgcgtatattttgtccggcacggacagaccatatggaatgtagaaaataagatatgtggtgcaacagatattgcactgactgagcttggacataagcaggcaattgagaccggaaagaaaatattagaagaaggcataaaggcggatgaaatattatattccccattaatccgggcaaaagatactgcattgcatatttcggaaattaccggaattccggcaagggaagagcttcgtttaaaagagcagaactttggcagatttgaatccacaccgcgggatggagcagaatttaagattgcaaagggacagtttatcacccgctatgacggcggagaatctatgctgcatctggcacagaggatttacaatcttctggatgaagtaacagcttccgataagacttatattctggtggcacacaatggcatatcaagagttgtgcagtcctatttttatgaaatgaccaatgaagaatatgctgcatttggcgtgaagaattgtgccatattaaaatatgaattctaagagacgaagggcaggaatgaaaaatgaaaccgaagtcggaaaagagtatagagctttatcatatcatgacagagcgggggtatccggaagaattctgtgatgtcattacccggaatctgaatacggattttacggcacagaggatgttatggtatttatcacactatgaatatctgccggagggtgaaattgtagatgaaatgcttgccattttaagtgaccggaatgcgattatgcagaaaaaagaattagaaaaaaccaatgctgcatggaatgaattcctacagcatggttttgaggaagaagactagcggaatcgtaaagacggagcaaagtgtcatgacaaagcaggtcttagaagcaaattccgcatcggaatggtagttttctgccatcatcggaatggcggacatggctggcatacatgccatcagggtaagaatggttgtttcggtcggagtaaggaaatgtgataccacggctgcaacaccaaccggaatcagaatcattttgacaattaccagaaagaaataatcataaataaagtcgagattctttaaggaaatataagaaagagttgcacccaggaaaatcagcgcaagactgaagcttacatttccaacagaggtaattgtatgttattccggcagcttttccaaggttgtggtacctgggcttcgtgtaggatttatgattgccaacaagaagattatagaacgtggaacactgttaaaacagtttaccgatgtacatacaaatattcttgtacagatgattgtttatgagtattataagaattatgatattaagaaacatattgcagaggtatccgctttctatgtgaaaaagagcgaatatatgtgcaaattaatcagggaaaagcttccaaaggagataaagtgtattgagccggatggcggaatgtttgtatggtgtaccgatacctctggtaagattaacatagcttgtcacatattggctatgagaaaagctttggctttctgaaaaatgaggttctttcttgtacttttattcataataaggtatactttagggaagtaatttgttgaattaaatatgtttgtatggaggattaattatggacatgaacattgtatgccttgatctggaaggagtattggtaccggagatctggattgcatttgcagaagcaagcggaatccctgaattaaagagaactacaagagacgaaccggattacaataaattgatgaaatggagacttggcatcttaaaagaacatggacttggattaaaagaaattcaggaaaccatcgcaaaaattgacccgatgccgggagcaaaagagttcttagatgaacttcgttccatgacacaggttatcatcatcagtgatacctttacccagtttgcaggacctctgatgaagaaattaggctggcctactattttctgtaattctctggaagtggcagaggacggtgagattaccggatttaagatgagaattgaaaattccaagctgactacagtaaaagcattacagtccattggttatgagacgattgccagcggagacagccacaatgaccttggaatgattgaggcaagtaaagcaggattcttattccgcagcaccgagcagattaagaaagaccatccggaactgcctgcatttgagacttatgatgagttaatggaagcaatcaagaaggctctttaattatggcagaggaaaaccagacaacccacaaacgcagggtgcgttacagtggaaaatatccgaagaaatttgaagaaaaatataaagaacttcagccggaaaaatataaagatacgattgagcatgtaataaaaaaaggaaacacacctgccggaatgcatatttccataatggtaaatgaaattctggatttcttaaaaatccagccgggagaaacaggctttgatgcgaccttgggatatggcggtcatacgaaagccatgctgcagtgcttaaaagggcagggacacatctatgcaacggatgtagacccagaggaatcagccaggacaagaaagcggttagaagaggccggttttggagaagatattctgacaatacgattacagaatttctgtacgatagatgaaattgcaaaagaagccggcggatttgattttattcttgcagatctaggcgtatcttccatgcagattgataatccgaagcgtggattttcttttaaagtggatggtccactggatttacggctgaaccaggaagccggaatcagtgcagcagaacgcctggctgccattacaaaggatgaactggcgggaatgctttatgaaaattcggatgagccatactgtgaagaactggcaaaagcgattaccgatgagattcgaaaaggcaaccggattgataccaccacaaagttaaggaatatcattgaaaagacgcttgattttctaccggaaaaagagaagaaggatacgataaaaaagacctgccagcgaaccttccaggcacttcgtattgatgtgaaccgtgaatttgaagtgctgtatgaattcatggagaaactgccggatgcattgaaaccgggcggaagagccgcaattttaactttccattccggcgaagacaagttagtaaagaaagcattaaaagaaggctatcgggcaggcatttatgccgattatgccaaagatgtaatccgcccatctgcacaggagtgtgcacagaacggacgggcacgttctactaagatgcgctgggcaattaaggcagagtagattattttgaaaatacaatgagatggagacgaaaacagtgaaaatgaaaagaaaacagattggtatgctggtatttattgcgattattgtgatacttatggtcgtaacaagccagacaccgggaacaattgctgatgctgacagctatcagtgcaaaacttatgcgacatttttagcattgcttccgccggttattgcaatcggactggcattgattaccaaagaggtttatacctcacttctggcaggaattattgtaggtggtttactgtattccaattttaaccttgaattaatgttaaataccattttattccaggaagaaggtggtatgatatacaaactgtcagatgcaggaaatgtgggaattttagtattccttgtcatgcttggcattttggtatcccttcttaaccgggcaggtggttctgccgcatttggaaagtgggcatcccggcatattaaaaccagaatcggagcacagatttctgttatgattcttggtgtattgattttcgtggatgattattttaactgtctgaccgtaggaagtgtaatgcgtccggtcacagaccgtcacaaggtgtcccgtgcaaaattatcttatattattgatgcaacggcagcaccggtatgtattatcgcaccaatcagctcctgggcagcagcagttacttcttctgttccggcagattccggaatcaatggatttgcggtatttatccagacaattccatataacttatatgcattgctgacattggtaatgttaattggaattactcttttgcgcgtggatttcggaccgatgaaaacccatgaaatgaatgcaatcaaaggtgatttgtttaccacaccgggaagaccgtatgaagataatgaagaggaagttgtaaaagaaaactcgcacgtactggatttgattcttccggtagctgttttgattgtaagctgtatcgtagccatgatttataccggtggcttcttcagcggaacttcctttgtagaggcattctctggctgtgatgcttccgtcggactggttcttggcggcgcagtaacacttgtatttacttttatctattacatgttgcgtgatgttttatcctttaaggaatttaccgaatgtattccggaaggatttaaggcgatgattgctccgattctgattctgactatggcatggaccttatccggaatgaccaatctcttaggagcaaaagtattcgtggctgatctggtagcaaattcagcaaatgcaatgcagggcttcctgccaatgattatctttctggtagcagcgttcttagcatttgcaaccggaacctcctggggaaccttcagtattctgattccgattgtccttggtgtattcccaagcggacagatgatggtaatctccattgcgtcctgtctggcaggagcagtttgtggagaccattgctcaccgatttcagataccacaattatggcatctgccggtggccactgtgagcatgtcaaccatgtagcaacccagcttccgtatgcattgacagttgcagcagtctgcttactgggctacttcctgattggtatcctgcaggcagcaggactggcaggaatttcatggctggcacttccggtttgtatcgtggtattaattggcgtattattcgtaattcgttccagaacaggacgggaagaaatttaaaagataaagaagaaaatgcgggatacggaattggtgtcccgcatttttgtacaatagaatctataataaaaataatttgaaaatttgaaacaaaagaaacataaaataacagaaaagaggaaagaaaatgttttgtacaaaatgtggaaatgcattaccggtaaatgcaaaattctgtaccaaatgcggaacgaaagtagaagcttttcagccgggagcaatccagccaaatccgacaccgcagagagcttcagtgccacagccacaacaaaaaaagaatgagaaagtaacaaaaacaaagaacagtgaaaaaatatcaaataaaaataagaatgaaactgagaagaaatccggctccggtgccatggtatatttattaatcggtgcagcagttcttattattattctgattgcaattattgtattgttatttatcaagggcaatcagccggcaaagcaggatgatattaccgataagccggtggttacaacggagcagaccacagagacggaaatgtctacagagcagacagataggaaagatgtaagcggacagcaggaagcatctgagaaaacttccgaagtaataaataaagaagatacaactggaaatgaggacatgggaacagacggagcagttggagaagaggaagcagaatatattcttccggagagtgccagccgattattaacggaagctgatttggagaatctgacccaggaggaccttcggattgccagaaatgaaatctatgcaagacatggaagaaaatttttagatgaaggactgcaggaatatttcaatggaaaatcctggtacaacggaaccattgaaccggacgatttcaaagaagatatgttatcggaaatagagagaaccaatgaggataccatcgtgaactatgagacaaagatgggctatcgttagaaataacattcaatgaaacaggaaaaggggtagaacagatatgccatgtacaactattttagtagggaaaaaagcttcttataatggagcaaccataattgcacgaaatgatgattccggtgccggacattttacacctaagaaatatgtggtaattcatccggaagaacagccgacaatctatcagtctgtattatctcatgtgaaaatagaattgccggagcatccgatgcgttacacggcaatgccgaatgcggtagacggggaaggtgtctgggctgcctgtggagtcaatgaggcaaaggttgccatgactgcaacagagaccataacttccaatccccgcgtcttaggagcagatcctctggtgacctaccatccggcagaaaatggcagggaagagattatcggcggcattggagaagaggatattgtatacattgtgcttccgtacattcacagtgcaagagagggtgtcattcgcctgggcagtttgttggaacagtatggaacctatgagatgaatggaattgcatttcaggataaggatgaaatctggtggcttgagaccattggcggacatcactggatggcaggaagagtgccggatgatgtctatgtggtaatgccaaaccagctgggacttgatacctttgatttagaggatgcccttactacacagaaggactatatgtgctcaaaggatttgcgggaatttattgaagaaaatcatctgaatctttctttggatggcagcttaaatccaagagatgcatttggttcccatgatgattccgatcatgtatacaatacaccaagagcctggtttatggagcgttatctcaacccacatacctataaatgggatggggagcaggctgattatacgccggcatccgatgatattccatggtgcttgaaaccggagaaaaaggtaacaatcgaagatgtaaaatatgtattatccgcacattttcagggaacaccgtatgacccatatggttcttatggggaaaaatccatgaaaggcgcattccgttccattggagttaaccggaatgattttctttctgtgattgaaatgcggccggagcaggcggacattaccgaaaatacaggaagcatcatacagtgggtagcatttgcatccaatgtatttaatgtgctggttccgttttacggggaagtggagacaacgccggaatatgtatccaataccaccggagaagtttctacagagaatttctactgggcaagccgtatgattgcggctatggcagatgcctcttatcacagatccctttttcacatcgaacgctatcagatgcatgtgatggcaaaagggcgggaactgctgcatacctatgatgcacttctggcagaagaaacggacacagcagatagacagaaactgatgcagcaggcaaataatgcgatagcagaaatgcttaagaaagagacacaggatactttggataaagtgctgtttgaattaagcagccagatgaaaaatgcatattcacgttcggatgcatgacagagaagggcacaatagagaaaaggagcgtaagtggaatgcagacagattttcatttattatatccaccggattatgaccggaacaaagccgttcccatgaaggattataaatttatccacgcattaaaaattgatgctatggtaatactgattaaggaaagttaccggggagtggcagacctttcactggaaaatttcttctctacagatgagcgggtattagagtatcgtctgggcgtagtagaagatctggtggaaaatccatcactttacgaggcattttgcaaggcggtatccattatttataatatcaatgatatgcgaagagtattaaacagtgattttacgacggattcagccctgcgttcggtgcgatatcttgaaatgtatcaggaaattgtaaatctgtttgcggatgtattggaaaaagcagagattcattcggaaggtatgcagaatttcaaaaaagaaattcactcaatcgtagcaagcagcgagtaccagagcctgaatgaggaacttccgaaaatggaactgaacttcgggcatatcaaaagcgtaaccgtaggtattaatcttgatggcaatttaagaccgaaagaagccggactgatttctgtcaatgaggagcagttccatccaggaactatcatggaccggcttttgaaaaaagggaaaaaagataaatggcatctgatgtcggcactctatccactgagccgggtgctgcacaatgatgaacaggatgctatagactattccatgaatgcagctttgcagactatttttgcaaagtcgctgagggagtttgaaccgctggtgcagaattattatcacattaatacaaatatgtttattgctttattggatgatatccgttttctgactgccggagtaaaatttatccgttccatgaaagaaaagggatttgccatgtgcagaccgaagattgcatccatgcaggagaaacgctgtgagttaaagcaagtatacaatcccatgctggcagtgaattccgtagaggaaacaattgtgtctaattcctttgagctggatgaaaaaggaagattctatctgataaccggcccaaatcacggagggaaatctatttttgcctattccatcggaatggcgcaggcgttattccaactggggctgtttgttccggcagaagaggcggtaatgagtccggtgtctggaatatttacacattttccatcctctgatgagaataattatggaatgggcagactggaaagtgagtgtgtaagactgagtgaaatcatgaaacaactgtcagatacggatatgctgttgatggatgaatctttttccagtaccagtggacttgaggcaggctacatagcatcagaggtgctgaccggaatcggaattatcggctgctgtggcctttatgtgacccatattcatgatttgacacaacagctggatacctataatgagcatccggagaataaaggcaaaatcgataatctggtggcaatgatggaaagtaaagaagagggtacccggagttaccgggtcatccggacgacaccggatggcttaagttatgcaagagatattgccaaacgttatggtctggatttggaagatattttaaaaagataaaagagaaaatccgtatcttactcctgttatatacgtatactatttgttggaagattgcaactaagatagcaattgactaacagggcaggtgaaaactacaataggagaaaaggaggaatttctatgcaggcattgtcaaaagcaacaccaggtgaaacctataccattcagtggatgtttggtcagccggaagtgcttgatttcttgcatagccactctgtagatgagggggaacgcatacagctcatccagaaaatgcgtgactgtgtaattattggggcaaaagacagcagatttgcaatgggaaatgaaattgcagaccgaatacaggtgtaggaaaatcgtataaacgcgggaaaatattttgtgggttatccgcataaaaaaagggaagcagttccgatggaacggcttccttttttctatcaaaggtccataagaatctattatgcttctttccagtaatccggagttacatccctgcctaaatcttctaacaatttccggtcacttcttatggtagcgcaggcaacggtagtcagcatatttccggtaatggttgcagatgcaccagcctgaaaagcagtttcaccatcgttggtaagcagtgcacggccggcagccagacggatatttgcatccggattgatataacggaagaatgcgatggtacgcagaatatcatcttcgcttaactgcggcagattttctaatggagttcccgggattggcattaaagcattgattggaatagaatcaattcccagttcagctaaacttactgccatatccagacggtcttcccaggtttcgcccattccgataataccaccggagcaggcgcacatgccttccgcttttactttctttaaagtttcaattttcatatcgtaggtatgggtggtgcagatatttggaaaattccggcgtgatgtttctatattatgatgatagctggtaacgcctgcctcatgaaggcggtgcagttgttcttcgtctaaaaatcccatggaagcacataaatcgattttgcattcccgatgcatggattcaaaggcgtgaagggctttttcaaactccggaccggtcagcgcttttcctgcagttacgatagaaaatcggtcaacaccttcgctttcgttcattttgcaggctttgataatatcctcctccggcaggaagtcatatacttcacagttggtatggttatgtgcagactgggcacaatatttacagtcttccggacagcgtccgcttcgtccgtttatgatagaacataaatctactttatctccgattcttgcagcacggattttgtcggcaccttcgcataattcctttaaatcgcaggtaagaaaaaaggataaatcatcctctcgcgtaatgcgtcgtccgtcaataatttcctgtgccagtgtcagtgcatccatggtttgtctcctttgtatctgtgtgaattttacagttctttatgataaacaaaaattaactgaatgtcaacctgaaataagatatgagttaacaatacgagaaacaggagaaactacaatggatgatagatgcatgaagaaaattgcaggaagaaagctgccaggatatgattgtagaaatagtggaaattggtataatgaaaagtaatgagataagaaaagggggattcaatttgaaagcaactgtattagtagataatataggaacggaaattgcaactggagaatgggggttgagcatttatatcgaacaggcaggaaaaaatatactgcttgatacgggtgcatcaaatcgttttctggtaaatgcaaaagcattggaaaaggatatcggggcagtggattatggggtattgtcccatgcccattatgaccatgcaaatgggatgcaggcattttttgaagaaaatgagaatgcgaaattttatcttcaaaagggaaccggtgaaaactgttattttaagaagtggtttattcataaatatattggaattccaaaacatatcttaaccagacagaaggatagaattgaatatgtgaccggaaagtacaaactttatgaaaatgtatatctgattccccatacgacaaaaggtcttgagacaatcggagccgccaataaaatgtatatcagagacggcagacgttggcgaccggacgatttcgcccatgaacaaagtcttgtaatagaggaagaggatggtcttattatttttaacagctgttcgcatggtggcgcagacaatattataaatgaggtcagcaaactgtttgaaaagccggcaaaaatgatgattggtggcttccacatttttcaaaagggggaaactgaaattcggcagttggcagaaaaaataaaggcaaccggtgtaaaaaagatttataccggtcactgtacgggaggaagagcttttcggattctacagcaggagttaggcgatatggtggagcagttaaaagttggtctcgtaatagaagcatagatatttcaaaagaaataaaggaagtaacaggaaaggaatcaacagatgaaaaaatacaaaatcacagatattattgaggatgaattcggctgtgaaggacggccggaaggggaagaaccgatggttacgattcttctggtggatgataccggaaaacagcgcagcatccgtatggcagataagctggcttatgaaaagaaactggatatcggagcggaaatggagctgccggaagaagagataatgacattaaacggaaaagaatataaagtgaaaaaactgcttggaaaggggaaaggcggctattcctatcttgtgacagatggggagaaggaatatgtcctgaaacagattcaccatgaaccatgcagttattatcagattgataataagttagaggctgaaaaaagggattataaacggcttatggaaattggaattaccatgccaaagctgcttgatatcgatgagacacaggaacgcattttaaaggaatacattccgggagacactgtctatcagcaggtggaaaaggacgcactgccggaaatctgtctgcaacaggtaaaagaaatgtgaacaaagttatatactgcacatacaaatattgattattttcctacaaattttatcctgtggcaaaatgtcctctattatgtggattatgagtgcaatgcctatatggaagaatggaattttgaaaactggggaatcaagtactggtctaagacaaaagaattcttagaatatgaacagacccattaataggacttaagagatttcctgaaaaagaatcgtgcggaggtagttgcgatgagtattttcgaatatgataaagtggaagaagaaaagcagataataaaacaaaacagcaagaccttttcttttcagaacccttgtggtattctgagagaaaaggtctttttatcagtttaagaggacaaatgaaaaatacaggagagagaaaaatgccagtttttgactttagtaatgcaccgggcgggaaaaagacagagtccatatgcacttatacaacgtttcagtccaacgagaaggagaagacagcggaggagccgattcttatactggacaataagagccgtcattggaaacatcattccggtggtgtgtttgcaaaccagagccagcagactgcttttgaatttaaggaagaaagcgagacttacagcgcagatattttaaaagtagatgcacgtttcgtcagcctgattaaatggctgggagaaaatcatatcagtgtgcgcctttccggagaaaaccgggaagaaggatatgctgtatacaagattcgggagacaacctttggtgcaggaaccaaattgtcggcagaggatggatttttacagtttatgatagagagacttcttgccagcagtgcaccgacagaggaaatggacgaggaagaagaggatgaaaatggagatgatatgaagctgaccagcttacagagcatttccgattttatgacctgtgccggcagaaccatgccggataatatccgcctctgggcgagaagaaaccttgcagtagcacgctcccatgaggtatcaccggaggaacgccgtcatgcccagagagcattgtctattatgatgaatatccagtggaagagcaattattttgaggcaattgatccggtagaagcaagaaagattctcgatgaagagttatatggcatggagaaagtaaaacagcgtatcatggaaaccatcattcagattaacagaacccataccctgccggcatatggactgcttctggtgggaccggcaggaaccggaaaatcccagatagcctatgcggtagcaagaatcttaaagctgccttggacaacactggatatgagttccatcaatgacccggagcagctgaccggaagctcccgtatctatgccaatgcaaagcctggaattattatggaagcattttccatggcaggagaatccaatctggtatttattatcaatgagttggataaagcagcatccggcaagggaaatggaaacccggcagatgtgttgttaaccttgttagataaccttggatttaccgacaactatatggaatgtatggttccgaccgtgggagtttatccgattgctactgctaacaataaagccgatatcagtgcaccgattttatcccgttttgcagtaattgatatcccggattataccgcagaagaaaagaagattatcttctcccggtttgcactcccgaaggtattaaaacgaatcggcctgcatcagggtgaatgtgttgtaacagaggatggactggatgcaatcgtagagcagtttaagcatacttccggtatccgtgatttagagcaggcagcagaacatttggcagccaatgccctttatcagatcgaagtagaccatgtgccatccgtaacctttgatgctgaaaatgtgaagaagctgtttgcgtaa

SEQ ID NO: 455 - DNA, 6794 bp, unidentified
  source 1..6794: mol_type = unassigned DNA
ttacttcagcagcgcgccggaaatgaccatcatctgcacttcgctggtgccctcgtagatctcggtgatcttggcatcacgcatcatgcgctcgatggggtagtcacgggtgtaaccgtaaccaccgaacagctgcaggcaacggcgggtcacatcgcttgcggtgcgggctgcgatcagcttagcctgtgcagcctcgacgctgtaacgaacctttgcgccatccatagcctgctgcttcttcagagcggcagcataaaccagatacttagcagcctcaacacgagccttcatctcagccagctcgaactgagtgttctggaaagcagcaatagcacgaccgaactgcttgcgctccttgacgtaagcaatggtctcctccagagcgccctcggcgatgcccagagcctgagaagcgatgccgatacggccgccatccagcgtagccattgccagctggaagcccttgccgcgcacgcccagcatacgatccttcgggatacggcaatcctcaaagatcagctcgcaggtagaagaaccgcgaatgcccatcttgtcctctgccttaccaacagagaagcccgggtcggtgcgctccacgatgaaggcggagcagagcttggtgggacggccgcgcttatccagcacgttatcggtaacggcaatgacgatgaacacatcagcaaagccggcgttggtgatgaagatcttggagccgttcagcacccagtaatcgccatcttccttggcaatggtctgctgaccctgtgcatcggtaccagcgcccggctcggtcaggccgaaagcgcccagccactcgccgctgcacagcttgggcaggtactttgctttctgctcaggggtgccattctcataaataggagcagcgcacaggctggtatgagcagagacgatgacaccggtggtgccgcagaccttgctcagctcctcaactgccatgacgtaggacaggacatcgccgcctgcgccacccacggaagtggggaaataaatgcccatcatacccagcttgcccatcttctcgacggtctctttggggaagtactcttcggcgtcaactttcttagccaggggcttgacttcgttttcagcaaactcgcggtacatcttctgtaccatctgctgctgcttggacagagtaaaatccatcgctatatcctcctaacgggtattttttcagttcctgagcagtgcttgtccgctcagtgcaaacaaattcctcccgaccgctttcccgcggccgggagaaacgtttttcagaaattacagctcatcaacaggggtcttggtgcggtctgcgttgtaaacgtagaagcccttgccggtcttgcagcccaggttgccgccgcggaccatcttacggatcagcgggcaagcacgatacttgctatcgccggtctccttgtacagaacgtccatgatggccaggcagatgtccaggccgatgaagtcgcccagctccaggggtcccatggggtggtttgcacccagcttcatagcggtgtcgatgccagcaatgttggagacgccctccatcttgatgaatgcagcctcattgatcatggggatcaggatgcggttgacgacgaagccggcagcctcgttgacctgcacggggttcttgccgatggcaacggagatctccttgatcttctcaacggtctcagcgggagtgttgcagcctgcgatgacctcgatcagcttcatgcggtctgcggggttgaagaagtgcataccgatcatggggcggctcaggcccttgccgatctcagtgatggacagggaggaagtgttggaagcaaagatgcactcgggcttgcagatcttatccagctcgccaaaggtggtctgcttgactttcatgtcctcaaatgcagcctcaacgatcaggtcgcagtccgcgcacaggtcctctttcaggcccggggtgatagcgccaacgatggcgtccactttctcctgggtcatcttgcccttagcgatcagcttctcgtagcccttcttgatctttgccagaccattctcggcccactcctgcttgatgtcacacagagcaacggtgttgccctcaacctgtgcaaatgcctttgcgatgccctggcccatagtgccagcgccaataacaccgatcttcataggatatctctcctttaaatatttgatgttaagtaatcttttcttacgctctcccctctcccggggaaagcttgaaaccggaatgttttagttgttggtgaacactgccttgggcttcggcttctcacgagagaggaagcatgccataccctcgacctgatcgtgggtctcgaagcagtcgccaaacagcttttcttccacttccacagccttttcaatggggaggctgatgccgtcattgatggccttcttgcagttgcgcactgcaatgggagcgttcttggcgatcttgccagccagcttcaggacattctccatcagctcagcctgcggatacacggcgttgaccagaccgatgcggtaagcctcgtcagccttgatgttcagagcagagtagaccagctgctttgccatgcccatgccgaccagacgagccagacgctgggtgccgccgaagcccggggtgatgcccagaccgacttccggctgaccgaacacggcgttgtcagagcagatgcggaaatcgcagctcatagccagctcgttgccgccgcccagtgcaaagccgttgacggctgcgatgacggggatgggaaaatgctcgatcatcaggaacacatcattgcccagtttgccgaaggcttcgccctctgccttggtcatggtgctcatagaaccgatatcagcaccagcaacgaagctcttgtcgccttcgccggtcagaacgatgcagcggacagtctcctgatcgactgcctcaaaagcagccttcaggtcagccagaacctcggggttcagggcgttcagtgccttgggacggtcgatggtaatgatctcaacagcgccctgcacctcggtttttacaaatgccattgtgaaaacctccatttcatacagttcagttttttcaaaacagcccccggaacgcaggagggctctccggttccctccggcgctccgggtctgtggttcagtcaggattcagagaaagagtgcttagtccatctcaacgatggtagcgcagcccatgccgccgccgatgcacagggtagccagacccttgtgagcaccacggtgcttcatagcgtacagcagggtgaccaggatacgagcgccggaagcgccgaccgggtggcccagagcaattgcgccgccgttgacgttcagcttctcctgatcaaagcccagagcctcaccgacagcgatggactgtgctgcgaatgcctcgttagcctcgatcagatccatatcagcaacggtcaggccggtctttgccatgactttcttggtagcagcgatggggcccagacccatgacttcgggctcaacgccagccagagcgcctgcaacccaggtagccagaggcttcacgcccagctccttggccttctcctcgctcatcacgaccaaagcagcagcaccgtcgttgatagcggaagagttgccggcggtcacgatgccgtccttggtgaaagcaggcttcagggtgcccagcttctcaacaggggtcagacgggggccttcatcggtatcgaacacggtgtcgcccttcttgcccttgatgacaacaggaacgatctcatccttgaacgcgccgtccttaatggccttgtcagccttgacctggctgttgtaggagaactcatccagctgctgacgggtgatggggctgtagccgtacttcttctggtaggtctcgttggtgcagacattctcagcggtcatgcccatgtgcttgttgaagccgcatgcatcccacagagcatcattgaccatggtgtccaccagctcgctcttgcccatgggagcgcccatgcggtagccgtagcggcccttcatcattgcgaacggagccatgtccatgttctccataccaccggcgaccacgatgtcagcatcgccagcctcgatcatctgagcagccatgttgacgcagttcaggccagagccgcagaccacgttgacggtgacggcgggggtctcgatgggcagaccggctttcagggcagcctgacgggcaacgttctggcccaggccagcctggatgacgcagcccatgtaaacatgatcgacctgctcgggagccacgtgagcgcggttcagagcctccttgataacgatggagcccagctccgcagcggggacgtttgccagggtgccgccgaacttgccaatggcggtacgacatgcagatgcgataacaattttcttcatgttaaaagcctcctgaatttatgttgggtgattttagagcctttgttattcaaaacgcccgtgggcgcttttgcatgggattcagagctttccggcttcccgcagggcgttcatcttccgttcgaccgccgcctccacattgggggtaacgaacttggagatgttgctgccgtagtgggcggcctccttgacgatggtcgaggagaggtagctccatttgatgctggtggcaaggaacatcgtttcaatgccaggcatcagcgcgtggttcgtctgggccagctggatctcgttttcaaaatccgtcacggcccgcaggccccgcaccatcaccgaagcgtgcttctttttggcaaaatccacagtcaggccgtcgaagctctccacggtgacattcgggatgtccttgcagcactctttcagcagctctacccgctcttcaatggtgaacagagggtctttcgcactgttgatgagcacagccacgatcagtttgtcgttgatctttgccgcgcgcttgatgatatcgagatgaccccgggtgacagggtcgaatgagccgggataaattgccgttaccatggtgtcctccttgtgcgcttgggtgaaaagcgcgttttggttctgccatgatcacactttccagtctccggggcaagcagcgcctcgttatatcgttaatttttaaacaattaacggtgcgcatccgcgcgcacacttgctacgatactagtaaaccatattgtcaaaattttatcaagaccattttctgaaaaatttgtttctgccgtaccaaactatcgtcacaaaaagctaagatttttagttaatttgccatcagctccgattttttcgcaacagggtattgattctgcaatttgttaatgttataactaagttgcatggcatcaggatatcactcccctgtgaaagtcatgtgtacagattgcatccatttggtaaatactctgtacattttatatcgttccgcagggaactgtaaggttatattgttccgcagggaattgtaagaatttacaatttctttatgttattatcggagaggatggtttataatggattttatggaactgtacgcgcagaaaaagatgactgccgagcaggctgccgctcaggtcaagagcggtgactgggtcgattacggctgggcggtcaacacgcctgtggctgtggacgcagcgctggccaagcgcctgcccgagttggagaacgtcaacttccgcggcggtatcctgatgtgggtgcccgagatcttccagatcgatgacccggctgcccacatgacctggaacagctggcatatgggcggcattgagcgcaaggccattgcacagggcttctcgttctactcccccatccgctactcggagctgccccgctactaccgcgagagcccggacccgctggatgttgccattttccaggtgactcccatggacgagcatggctatttcaactttggccccagtgcaagccatctgggtgccgtgtgtgagaaagccaagaagatcatcgtggaagtcaacaccaacatgccccggtgcctgggcggcatggagaactgcgtgcatatttctaaggtgagcggcatcgtggagggcagcaacccgcccatcggccagatggctgccgccggccccgcctccgaggtggacctcaaggtggcaaacctggtggtgcccctcatccccaacggtgcctgcctgcagctgggcatcggcggtatgcccaacgccatcggcagcctgatcgcacagagcgacctgaaagacctgggcgtccacaccgagatgtatgttgacgcgttcgtcgatatcgccaaggccggcaagatcacgggtgcccacaagcagctggacaagggccgtcaggtctacgcgttcggtgccggcaccaaaaagatgtacgactacctcgataacaaccccgagtgcatgtccgcccccgtggattacaccaacgatatccgcagcatctcggctctggacaacttcatctccatcaacaacgcggtggatatcgacctgtttggccaggtgaatgcggagagcgccggtatcaaacacatctcgggtgccggcggccagctggacttcgtgctgggtgcttacctttccaagggcggcaagagcttcatctgcctgtcctctacctttatgaataagaagaccggcaagctggagagccgcatccgccccacgctggagaacggcagcatcatcacggatacccgtgccaacctccactatctgtgcaccgagtacggctgtgtcaacctcaagggcctgaccagctgggagaaagccgaagccctcatcagcgtggcgcacccggatttccgtgagcagctgatcgccgaggccgataaaatgcatatctggcgcaggagcaacaagcgctaa

SEQ ID NO: 456 - DNA, 7797 bp, unidentified
  source 1..7797: mol_type = unassigned DNA
ttaaaactccgggtcatccccgatgcggatagggattttctccacagtttccgccgcaatccgttccagctctgccaggccgggcattccggcttcggcggcttcgatctccgccaggctgggcttggttttggggtgcgacggggtaaagatggtacagcaatcctcatacggctcaatggaggtatcaaaggtgccgatcttgcgggaaatagcaatgatctcggtcttatccatgccgatcagcgggcgcagaatcggcaggttctgcgcggcgtcggtgcaggcaatggcctgcatggtctggctggcaacctgtgctagactttcgccggtaatcaaagcttccatctcgctctggtcggccaccagtttggcaatgcgcagcatgctgcggcgcatgagcacggtaaacaacacatcaggcgcattatcgcggatatactcctgcggcttggtatagggcaccacaaacagctggcagttgccggtatattctgccagttcgcgggccagggcgcgcaccttcagtttggcgcgcaggctggtgtacggcgggctggcaaagtggatgtggtgcagtgcaagcccgcggcgcgccatgcaataagctgctaccgggctgtcgatgccgccggaaagcaggttcagcgcacggccgctggtgccaacgggcaggccgcccgcggcttccaccttggggccatggatatatgcgcctttatcgcggatttccaccatgatttccagctgcggctcatgcacgttcacccgcaggtgggggtgcttgcccagcaggtaagcgcccagttcgcggcacagctccgggcttttcatcgggaacgttttatccgcgcgcttggcttccaccttaaaggtgcggatgccgcgcagcgtttcgccaagataagcttccgccgtggcgcagatctcgtcaaaatccttgctgcaacaagcagcgcggctcattttgacaatgccaaaaattttggaaatacggcggaacgcttcgtccatgtccaggtcatcttccagtggctcaatgaacacggtggactgcgcctgggtcaccttgaatttgcccaggtcttccagccggtagcggatgcttttggccaggcgggcttcaaatttgctgcggttcaggcctttcagggtcatttcgccctgataggcaaggatgatttctttcatgtttatggcaaacctttcgtgtctggtgttatggtttcattcaatagcgttatcttttcagatgtgctgcaactctttcaggccgtctttcaggccgtccagcagggcctgcacatcttcgggggtattgtccccgcaaaagctgacgcgcagcgccgtgcgcacggcaaggtccggcgcgcccatcgccatcagggtgtggctcggctcgcccttatcgcaggcggagccgccggaaatataaatgtgccgcccgctcaaatattcaataaaggtctggctgttgacacagttggtggaaaagttcagcacctccggcacggcatccgccggggagttcagggtgatgggtgcctgctgggccagctcttccagcccggtgcgcagctgggcgttcagggcgcggatatgcgcattgcggtcgctcaggtttttggccccctttgccgcagcaaggccaaggccaacgatataaggggtattctcggtgccggggcgcaggccgcgctcctgatggccgcccaggtagggcgggcaaagcgtctggcgcacgctgtcccggatgaacaaagcgccgattcccttgggggcatgcactttatggccggataccgagagagtatccacgttcttccactttttcaggtcaatggggatgcgcagccatgcctgcacggcatccacatgcaccgcacagcggctgtttttggccttgacggctgtggaaagagcggcaatatcctgcaaagtgccggtttcattattgaccgccatgcagctgaccagaacggtatttttatccacctcggcagccagtttggcaacatccaggtgaccgtctgcttcgggcaggatttccaccacctcaaagccgcggtctttcagtgcacggatgggccgctgcacgctggggtgctcaaaaccggaaaccacaattttgctgccccagtttttgcgtgccatggcaaggccctgcacggcaaggttgttgctctcgctgccgcatgaggtaaaatacagatccttggcctggcagcccagggtgcgggcaatctgcccgcgggccgtggtcagggcttcatgggtttctaccgccggttcgtacaggctggaggggttcgcccactcctttaataatgcttcatggatggcacccgcaatctccgggtccaccatggtggttgcggcattatccagataatgcagttcagggtccaacagcatgagaaagcctcgtttcgctacgcgtaaaattaaatcaaattaaaaaagaataatgaataaagaataatgttggtgcgccgcccgcggcggcgcagataaaacaggcagcaaactctggcatgcaacagccctgccagagcgccgaacctgttttcaatgtgatgccgtgggcatcacacagccattattcattattcttttttctctattatttttcttcgctcttttccatagtaatacatagtaaattatacacaccacacccgcaaaacacaagtagcgccatacaaaaaaggcgtgcggggttggccgcacgccggagaggcttcttttgtgttatcttgtgtgccggtcctttacttcgtgggcgtggccgattacggcgctgcgcttatggaacagcaggcccaccacggcaaacataccgccctcgatcaatacagtaaacagccagtcccccgttaccaggtagctgcctgccaggcaggtcagcagggtggggatcggcatgctgatgcagacagccgcaaagaactgtttcggcttcatgttggcgtgagcggcggcatagggaatgatgccgttgggcagccccggtgtgataaacgccagaatggtataaaaccaggggttcttgctgttgcgcacgctgttcagcaacttattcgccttggggctgttcgctgtgagcagttcaatgacttttgccaggcggcgcgccagcagaaacaccagaaagtttgccgccaccgatgccgaaaagctggtcacaaagcctttccacggcccataggcgatccccgccgccagttgaaccggcatagccgggattaccagcgataccacctgcacgaacgccaggaaccacagcgtcaaaaagctgcgcagccgcccctcgcttgtcaaataatcgctcagagcctgttcgtccccgctggaaaatgcagtccataaccccggcaacagcaggcggaatgtttcaataatcagcagcaccataaccagaattacggctgctgccgcaataacggccaggcgcttggtgcgttcggggggctgttgtttcatgcaggggtactccttaattctaaaatataatgtttattcgccgaaatcctgtgccacttttttgagcatatcccggatgggcaagttatacgggcagcgggtctcgcacttgccacagccaatgcaggcaccggctttcaccgtcagggtatcgtaccgttcgtgtgcccagcccgcaaggccataacgctccaggtagccatggaacaagaaacagctgggaatctggatgcccaccgtgcagggggcacagtaattgcagcggcggcagaactgggtgccaagggtatcccgcactttctggcaggcggctttctcctccggggtcagcggggcagtgttggcgctgcccgccacattctgttccaattcttccggcgcggccatgccagggatggatactgtgactgccgggttggaaagcacataccgcagcgccagccgtccatcctcaatggcaccaccggccagcggcttcatatcaataaaggccttgcccttttccgcacagcggtcgatcagctctttgccctgctgctccacaatattataggggaacataatggtttcgatttcgtccaccttcagcgccttttcaaacgtctggctcaggtgggcggtaatgccaatgtgccccacaacgcccttggccttggcttccagcagggcttccatggcgccgccgggggccaggattttatccaggttttccgggctggggttgtggaactggtacaggtcaatgtgatcggtgcgcagttttttcaggctggcggcaagctcggcttccatctctgccttggtcagcgcacggcacttggtggcaaggataaattcatcccgcaggcccagttcctccagcgcctggccgatccactcctcgctgacggtgtaagcgcgggcggtatcaatgtaattgatgcccgcctcatgcgcggctttcagcatggcgcgggtgccaggttcatcaatgcgctgcaccggaatgccgccaaagcccaggcgcgaaacccgcagcccggtgcggccaaaatcaacatactgcatatttcattctccctttttgcggcgggggtgccctgccccgcctggacggttgtgcaaagtatcactattatagcaggcaaggctttacttgtcacgttttttggcagttttttattgactttacacctgctgtgcgttaggattagactattcattgggtatttgttggtacattataaaggatatacatgttatagtagagggaggaaattcctatgcgttatggttttatcggctgcggcaatatgggcggtgcggttgcccgcgcagtgtgccgcggcgttgggccggaaaatgttgtgctggccaaccgcaccccggccaaggctgaagccctggccgaagcacttggctgccgcgccgccaccaacgatgtggtcgcgcaggactgcgatgtaattttccttggcgtaaagccgcagatgatggccgatatgctggccggcatcgcccccatcctggcaaagcgcagcgggcgttttgtcctagttactatggctgccgggctgagcatggcccgcgtgcgcgagatggccggcggtgcatatccgatcatccgcatcatgcccaacaccccggtttcgctgggggccggtatgacccagtactgcgctgacggcgtgagcgatgaccagatgttcgcctttttgggtgccatggccccggccgggcggctggatgccatcccggaaaatttgatcgacgccgcctgctgtgtttccggctgcggccccgcgtgggtataccagtttattgaagcattggccgacggcggcgttgctgccggattgccccgcgccaaagcccaggaatatgccgcccagacccttttgggcagcgcccgcatggtgctggaaagcggtagccaccccggcgtactgaaagatgctgtgtgcagccccggcggttccaccattcagggtgtgcgcgtgctggaagagcacgcgttccgcggcgcagtgaccgatgccgtcctggccgcctatgacaaaacaaaggaaatggggaaaaactgatgcgcattgttgtcaagatcggcaccagcacgctggcccatccgggcgggcggctgaacatccgccacaccgaagcactggtaaaagtgtggagcgacatcaaaaacgccgggcacgagctgattattgtatcgtccggcgcaaccggccttggcgtgggcaagctgcagatttcccgccccaaagatatggtgacaaagcaggccgccgcagccgtgggccagtgcgagctgatgtatacttacgacaagctgtttgccgaatacagccacaccgttgcccagctgctggtgacctgggaggactttgaccatccccaccggctgaacaacctgcaaaacacgctggagcgcctgatccagctgggcgctgtgccggtcatcaacgaaaacgacccgatttccaccgaggaatactccctgggcgataacgaccgcctgggtgccctgattgccaaatacacccacgccgacctgctggtgctgctgagcgacattgacggcctgtacaccgccgacccgcatacccacccggaagccacgctgatccaccgggtagagagcgttacccccgaaattgagcaactgggcggcggctccaacagcggccttggcaccggcggcatgtccgccaagctgaccgccgccaaaattgccaccggtgccggtgttgacatggtcatcgccaacggtgccaacgcccatgtgctgtacgacattgtggacggcaaggatgtggggacgagatttgttggaaaaaataataaataataatgaataaagaataatgttggtgcgccgcccgcggcagcgcggataaaataggcggacagctccggttaggatattggtttaccggagaaatagccctaattgaaatgtgacgccgcgggcgtcactcaaccattattctctattctttattcattcttaattacaaccaaaggagttctgctatgactacgcatgaaattctgttagcggcgcaggcggcaaagctgccgctggcgctggcggataccgataccaaaaacgctgcgctggaagccatggcagttgccctggtggaaaacagcgatgcaattctggccgccaacaagcaggatctggccgccgcacgcgggcgcatcagcgatgtaatgctggaccgtcttgccctgacccctgcccggctggccgccatggccaagggcatgcgtgaggttgccgccctgccagacccggtgggtgccgtgctacgcaaaattgtgcggccgaacgggctgctgattgaaaaaacctcggtgcccatgggcgtgatcgccattatttatgaaagccgccccaacgtgacttccgacgccgccgcgctggccctgaaagccggcagcgcctgtgtgctgcgctgcgggcgcgatgcctgggccagctgccatgccattgtcaacgctctgcgctgcggtctggcccgtgccggcctgccggaaagtgccgtcagcctgattgaggacactacccacgcttccgccaacgagctgatgacggcaaacggtctggtggatctgctgattccccgcggcggtgccgggctgatccgcgcctgtgtggaaaacgccacggtgccctgcatccagaccgggaccggcatctgccatgtatatgtggacaaagccgccgacctgaacatggcggtggatatcattgagaacgccaaaaccagccgccccagcgtgtgcaatgccgaggaagtgtgcctggtacacaaggatgttgccgcagggtttctgccgttgctgaaagcccgcctggtggatgcccgcgcagctgccgggctggttccggtggatctgcggctggatgagcgcgccgccgccatcattcccggaacacccgccggcgagcaggattttgacactgaatttttgaactacatcctggccattgccgtggtggatgatgtggatgctgccattgcccacattgcccgccattccacccaccacagtgaggccatcatcacggcggacgataccgccgcagaccgctttaccacctgtgtggacagcgccgccgtgtatgtcaacgcctccacccgctttaccgatggcggagagttcggcctggggtgcgaaatgggcatcagcacccaaaagctgcatgcccgcggccccatgggcctggccgagctgtgcagctacaaatatatcatccacggctccggccagacccgcggcggctccgcggcaaaattgcagaatccgtgtaattga

SEQ ID NO: 457 - DNA, 8200 bp, unidentified
  source 1..8200: mol_type = unassigned DNA
acagatgccataccgaaagggaaagagtatgattacagccttccggcggtgcagagaaaacagttccgtcttgaaaaggagaagccgatactggatgcattctggaattggctggatcaacagcacccaaacaaaggaacccgtttggcgaaagcggtgaactatgcccaaaatcggaaaggcaccctgatgacctacctggaagacggacattgcagtctttcaaataatctcagtgaaaatgcaatcagaccattcacggttggccggaagaactggctgttcagtgccagtcctaaaggagccactgctagtgctattgtgtatacaatggttgagatggcaaaagcggactgtcaaaactaaaataaagtaaaacgcttgcatctatcattttggtgcaagcgtaattcatgagtaacgtagcaatatttttcacttacattagattaacgtgaaaataagaggataactttatggcaaaattacgagctgataaaagaaattataaaaaagcgtttacagttcatgcaaattcctatgataattggaatattggaagtccttacagtagacgtttattattatgttattgtgttgaatgtggattgaaatgcttgatcatggagaatgataatatatatacgatttctcaggcggatgatgagacagcgaaaattttggggtcacatgactttagaacgctgttaaagagagttggtcaggctggaacttatcgatttaagagttttcctacggagtatggaaatacggtaggaacagcggattatcatcagttgtgcaggtatttgattgctcctgcagagcagaatattacatatttgcaggaatttgatcatacgctggctgagattaaagaatggctgaaagaggtggtgtaaattatgaggttctatacatggaaagatattgaacgatatattttaatgcatcatgatgagtggaaagatgaattatacgatatagaagtttatccgaatgaaatggttgtatacccaaaatcagaacagggtacgctgcagaatgctgtattaaagaaactttttccgaaaaatattacacctgataatttaagtataaaattggatggtcagggagaagatttgatgattttatatgagtacgagtacagtccggttacggtaagaacgttgccattgtttaaaaaggcgatttatgaagattccatatatccgacggagcagttggcggatcttagctgtccggtttttgcatttcattcttataaggggggagttggacgaacactgtcgcttattgcatttgcacgggcatggaccaatcttcagaagaatccggaaaacagcaaacttttaattattgattctgatctggaggcaccgggacttaccttaatccagggtgatctaaatgatagtgcttttagttatttggatttattaactttgattcaggataacagcaatgtagaggaaattgtatcaacggcaggaaatttaatggggacgattaccttgccaatcgaaaccagccaacagagagtagaacatttctttcttccgacatatcgttatgaagagcaattgtttgatctgtatgcaagtccgcaaacaatcactgccagtcgaaataaagaatatattttggcagaagtactttcaaaactggcaagtagtttagggacaacagcagttctggtggatcttcgtgcggggatcagcgaatattcagcaccattgttgcttgatccgcgagtgaaaaaatattgtgtaacttctacttctcttcagtctgtaatgggaacaaagcaggtattaagttttattgcaaaaggtctgaagataaaggaagatacgcttctgcctactgtttttctgggtatgattccggaaacttttccaagaagagagaaacaggaaatcaaggaaaatttactcggatgttttgagactacagaggtaaaagaggaacttcttgataatatgatcgtggagcttccgtttgccagtgaattaatacatttaacagaatggaagcagattttaaatgttttaaaagacagagatatgtatgatgctgtcaaagaattagtaaaaccttactgtatatcagaagaaccagaaagaggaatttatacagaaaaacagcatcagatcattacaaaacaaatttgtgactttgcgaataatcagatcacggctgaagccaatggagcggaagaactattattaaccgaaccgattaaaaatctttgtgctcgtttcaatcaccagattccggtaacggttgttcagggagcaaagggatctggaaaaacattcttgtatcgtcagttgatagaaaagaaaaactggaattcttttttttctgaaattactcataaaaaaatcagtaaggaaaatggctattttatccctgttttagcaccgcagaatatttcacagattcaaacggttctgggacaatgtattgactgttttaatgaggcattgccttttgcagatgtttcacagagtatctacagtgacaattcttacagactggatcttaaagcgaataaagaaattgactggatgaatttttgggaacaattgtttgtaaattccgttaataaagagtttacctcatttgctcaactgaatgaaaaattaaaagaagaggaaaagacagttatctttttgattgatgggctggaagagatattaaaagcagtatcttcaaataaaaatcagcaaaaagcgatagaagttttatgccagggagttttgaatacgatcagtgcgagatatgaaaatattggtcttattatttttatacgaagcgatatggcacagaatgcaattacagttaattatgagcaattcaggcagtcatttgcctatgcagaactgaaatggtcttcggcagaagctttaaagttggcagtttggctggtaagccatgcaaacagtgatttttatcgggaaagtattccgattgaaaatgcgtcacaggaaataatcgataaatatctggaagaactctggggattgaaattaggaaagaaggattcaaatgaagcgtattcatcacgttggatactggcagctctttccgattttaatggacaacttcaggcacgtgacattatccggtttttgaaatatgcagcagggcagaatatgaaaaaaccgccgtatgatgatcggatattaatgcctgcagagatacgttatgcagtaccaaagtgttcaaatgccaaaatcagtgatattaaggcggaatatgaaaatttaaagcctatttttgaaaagctggaagatttgccgacagacgaaaaaacacttccaatgaatctggaaaataatatatttacatcggtagaagaaaagtccatgacacaatccggatatttgaaacgtgatggagaaaaactttatttaccggaaattatacgtcatgcactgggatttcgatatgaaaaaggtgcaagaccgagagtattgtctttgcttcttaaacattaaaaacatggaaggttaaaagaaagactccacaaatcaaagaaatagtggtatgatagatagactttagatttattggctatccgcatgcggtgaaatagtatcttccggattacatggggttgatttttgagaagatgtgtcaggattatctgctctattattcagataatcttctcgttgagctgagtgaaatcggtcagtggtgggggacagaccggaagaagaaaaatatcttttcaaaaggagattttacggatggacttcttcaggcacaggagcacggtgaagtccggctggtaacgctggaggatctctacagatagagggagatttttgaaaaatttttttgagttattatggaaaagagaaacataaggattgtctgaagtatttgatttttgataagagcaaatttcaaatcattttattcagaaaaagtggaggaatacattatgtgtggaattgttggttttacaggagaacatcaggcagcaccgattttattggatggtttgtcaaaactggagtaccggggatatgattcggcgggattggctgttcgagacggagagaatctggcacaggttgtgaaggcaaagggacgcttgagcaatctggcggagaaaacggacgatggtcataccttaaaaggtacttgcgggatcggtcatactcgctgggcaacgcatggggaaccgagtcagacaaatgcacatccgcatgtgtcgggaaactgcagcggttctggctcaggtatggtagaatccgaggttgttggtgtgcataatggcattattgagaattatacggagctaaaggaaaagttattaaaacatggctatactttttacagtcagacagatacagaagttgtgatcaagctggtggactactattataagaaatataatctgggtccgatcgatgcgatcgcgaaaacgatggtgcgtgtacgcggttcgtatgctctggaactgatgtttaaggattatccgggggagatctgggtggcacgaaaagacagtccgatgatcattggtattgcagacggcgaaacttatgttgcttctgatgttccggcaattctcaaatataccagaaatgtttattatattggaaatctggagttcgcaaaactgactccgggagaggcacatttttataatcttgatggcgatgagattgaaaaagaaacaaccgagatcaagtgggatgccgaagcagcagagaaagccggttttgagcattttatgatgaaggagatccatgagcagccaaaagcaatccaggatacgctcaattcggtcatcaaagaggataaaattgacctttcaacagtagaaatcacggacgaagagattcagaattttgatcagatctatattgttgcctgcggatcggcatggcatgtgggtatggcagcacagtatgtatttgaagatctggcggatattccggtgagggtagagctggcatccgaattccgttatcgaaaaatgccattaaaccagaaagcactggtgatcgtagttagccagtccggtgaaacagccgatacactggcggctcttagaatggcaaaagaaaagaatattaccacaatggcgatcgtcaatgtagttggaagcagcattgcacgcgaagccgataaggtattctatacacttgcaggtccggaaatctcagttgcgacaacgaaagcctacagtgcacagttagccgcaatgtactgcttggcagtgcagttcgcaaaagtcagaggaaagatttcagaagaacagtacagctattacatttccgagatgcttaccatcccggataaaatgcagaaagtcctggaagataaagaacggatccagtggtttgcttccaaatatgcaaacgcacatgatgtattcttcgtgggccgcggcattgattatgcagtctgcctggaaggaagcttaaaactcaaagaaatttcctatatccattccgaagcctatgcggcgggagaactgaagcatggaaccatcagcctgatcgaacagggcaccctggtgatcggagtcctgacacagagcgaactctatgagaaaaccatcagcaatatgctcgaatgtaagagccgcggagcttacctgatgggtctgacaacctatggaaaatacgaaatcgaagatcaggtgaactttaccgtttatgtaccaaaagtagatgagcattttgtcggaagcctggccgtggttccgctgcagctgatcggatactatgtcagcgtggcaaaaggactggatgtggataaaccgagaaatctggcgaagagcgtgacggtggagtgatatcaggtgcggtatgacctgcaaaaaaggcgcagcagcactgaaagatttcagagaacgtaaacaatactatatatcaaggaggtgcagcactgcatgagtaatgtattacctgttgaggatttaagtaaaacttacctggaacactctatggttatcaacaattttgttatcaaaatcggcagtcagattaaagacagtctgtgtcgtgtctttggtgatggtgtgcagtatgaatggcgtgcgaacgatgataaagtaatgattccggatgtatccattatctgcaacttgagagatcgaaagaatatttcttttacaggtattccacgttttgtgatggaggtcttatccaatgctacggaagaatacgacaggcacgaaaaaatgaatatttactgcaaagtcggagtttctgaatactggatcgttgattggagaaaaaagtccgtagaaatctatctttttgacttcgaagaggatggaacaggatatccgtatctttataaaacagttactgcacagaataaagaggagttacaactggtgatgttcccgaatttgaaaataacctttgaggaattgtttgatcttggagaatattgattttacatgactctccggtgcagtcagggaatgatttcagcttttcagtttgacttagtaaatgctatgagttatgatacttaaaagaagtaacttgtgagccagtcgctcatgagcataattagtggaggaaacagcatgaaattttttgtaacaggtgtcggcggacagcttggacatgatgtaatgaacgaactgatcaagagaggacatgagggtgtcggttctgatattcaggagcagtacagcggtgtggaagatggttctgaggtgacaaaagcaccttatctttcactggatatcacagataaagaagcagtaaagcgtgtcattgagagcgtaaaaccggatgcggtgatccactgcgcggcatggactgcggttgatatggcggaagatgatgacaagattgcaaaggtccgtgcgatcaatgcgggcggcacacagaacattgcggatgtctgcaagaagctggactgcaagatgacttacatcagcacagattatgtatttgacggtcagggcacagagccatggaagccggactgcaaggattataagccgatgaatgtctatgggcagacgaagctggaaggggaattggcagtaagccagacactggagaaatattttatcgtccgtattgcatgggtatttggcttaaatggcaagaattttatcaagacgatgctgaatgtcggcaagacgcatgacacggttcgtgtagtcaatgatcagatcggtacaccaacttacacttatgatctggcacgtctgctggttgatatgaatgaaacagaaaaatatggttattatcatgcgacgaacgagggcggatacatcagctggtatgattttacgagggaaatctaccgtcaggcaggttatacgaccagggttctgccggtaaccacagcagaatatggcttaagcaaagcggcaagaccgtttaacagccgtctggataagagcaagctggtggaaaatggatttaccccgcttccgacctggcaggacgcactgagccgttatctgaaagaaatcaaagtgtgatttcggatacattttaaatgataagtacaaaaaataagaagtgggagtcttctccgactaagataaaaagatactgaacagttgcagaaggagataaagaaaatgggacagatcaaagttgagaaaaatgtaggcggcatcgaaggcctttgtatcgtagaaccggccgttcatggtgacgaacgtggttatttcatggaaacctacaacgaaagagatatgaaagaggcaggcattgatattcatttcgtacaggataaccagtccatgtccacaaaaggagtattgagaggcctgcatttccagaaacagtatccgcagtgcaagctggtccgtgcggtacgcggaacggtatttgacgttgccgtggatctgcgttccgattccaggacttatggaaaatggttcggcgtggttttatctgcggaaaataaaaagcagttcctcattccagaaggatttgcacatggatttctggtgctgagcgatgaggcagaattctgctataaagtgaacgatttctggcatccgaacgatgagggcggcatggcatggaacgacccggagatcggcatcgagtggccggaagtgaagggcgagtacaaaggcagtgcatctgcagaaggttatacactggcagacggtacaccgctgaacctgagtgataaagaccagaaatggctgggattgaaagatacctttaaattttaa

SEQ ID NO: 458 - DNA, 9056 bp, unidentified
  source 1..9056: mol_type = unassigned DNA
atgactaagatagattctaaaataccggaaggaccggtggctgagaaatggaccaattataaagctcaccaaaaattagtaaaccctgccaacaaacgccgtttggacatcatcgtagtaggaaccggacttgccggtgcttccgctgccgcttctctcggtgaaatgggtttcagagtatttaatttctgcatccaagactctccgcgtcgtgcgcactctattgctgcacaaggtggtatcaatgcagcaaagaattatcaaaacgacggtgactccgtttaccgtttgttctacgatacagtaaagggtggtgactatcgtgcccgcgaagctaacgtttaccgtctggctgaggtatcaaacgctatcatcgaccaatgcgttgcacaaggtgttcctttcgctcgcgaatacggtggcttgctcgacaaccgttctttcggtggcgcacaggtttcacgtacattctacgctaaaggtcagacaggccaacaactgttgttgggtgcatactccgcactgagccgccaggtaaacgtaggtactgtaaaactgtttacacgctatgaaatgcaagacgttgttctcgtggagggacgtgcccgcggtatcattgcaaagaaccttgtaaccggtaagctggaacgctttgcagcccatgcagtagttatcgccaccggtggttatggaaacgcatatttcctctctaccaacgccatgacttgtaactgtacggcagctatttcctgctaccgcaagggtgcatggatggctaaccccgcttacgtacagattcacccgacatgtatccccgttcatggcgacaagcagtctaagctgactttgatgtccgaatcactgcgtaacgacggtcgcatctgggttccgaagaaactggaagatgccaagaaactgcaagaaggcactctacaaggaaaagatattcctgaggaagaccgcgactactacttggaacgccgttatccggcattcggtaacctcgttccgcgcgacgttgccagccgcgccgccaaagaacgttgtgacaaaggcttcggcgtaaacaataccggcctggccgtattcctcgactttagcgatgcaatcaaccgtctgggcaaggatgttgtggctcaacgctacggtaaccttttcgatatgtatgaagaaatcaccgacgtaagcccctatgagaacccgatgatgatttaccctgccatccactacacaatgggcggtatctgggttgactacgaactgcagacttctatcaagggcttgttcgctatcggtgaatgtaacttctccgaccatggcgccaaccgcctcggtgcttccgcattgatgcaaggtctggccgacggttatttcgtattgccttacactattcagaactatctggctgaccagattaccgttccccgcttctctaccgacctgcctgaatttgcagctgcagagaaagccatccaggagaagattgactggatgatgaacatcaagggtaagaagtccgtagactctatccacaaggaactgggccacgttatgtgggaatacgtcggtatgggacgtacagccgaaggattgaaagaaggattgaagaaaatgaaagaaatccgtaaggaattcgaaaccaacctcttcatccccggcgacaaagaaggcatgaacgtagaactcgacaaggctatccgtctgtacgacttcataacaatgggcgaactggtggcatacgatgccctgaaccgcgacgaaagctgtggtggccacttccgcgaagaataccagacagaagaaggcgaagctaaacgtgatgacgaaaacttcttctacgttgcttgctgggaataccaaggctctgatgaaaaggctccggtattgctgaaagaaccgctggtttacgaagcaatcaaggtacagactcgtaactataagagctaatcgggaagttgaacatttaaagaattaaagaaaatggataaaaatatatcatttacgctcaaggtatggcgccaaaagggtccaaaagcaaaaggcgcttttgaaacataccaaatgaaagatatcccgggcgatacttcattcctcgaaatgctggatattctgaacgaacagctcattagtgaaggtaaagagccagttgtattcgaccatgattgccgcgaaggtatctgcggtatgtgttctctctacattaacggacatccacatggccctgcaacaggtgccactacttgccaaatctatatgcgtcgtttcaacgacggtgacacgatcaccgtagaaccttggcgctctgccggcttcccggtaatcaaggacttgatggtggaccgtacggcatacgacaaaattatgcaagccggtggttacgtaagtgtacgcaccggtgctcctcaggacgccaatgctatcctgatcccgaagcccatcgctgacgaagctatggatgccgcttcttgcatcggctgtggcgcctgtgtagctgcttgtaagaatggttctgccatgctgttcgtttctgctaaggtaagccagctgaatctgttgccccaaggcaaaccggaagcattacgtcgtgccaaagccatgttgagcaaaatggatgaactcggtttcggtaactgtacaaatactcgtgcttgtgaagctgaatgtccgaagaacatttccatcagcaacattgcacgtctgaaccgcgacttcatcatcgcaaaactgaaagactaaccgtactttctacatcttagacaatataggatacggcttcggataaacctctggacaagctcaagtttatcactttgctttcactatatttgattaatatcacaaagaactcttctgtcgggaaaccggtagaagagttttttattacatagaaactactgaagctgagaaaaggctgtcccaaaggattatcatatcgtcagcatatattccccattgaaatcaggatgtcaatcgtgtgcgaaaacagtgaataacattaaaagataattaaaagaaattccgaaaaagagtaaacatttggaagatatacaaagaaaccatacatttgccatgtgatttttttcatagtattagatttaaggttaacaaaggttggagtacagcggtactcctttttttatgccaataaatgatatactcctccaaccaacgttttcaccactcctttcatttccagttcaaagagcaaggcactcatgcggtttacgggaatatccgcctccaccacaagtgtattgatatgcaagtcaccctggcggaccaatatacgcaccacagcctcttcctcttccgtcaactccggaaacaaacttcgctggatgccctctgccttaaccgacggttccgtatcagtccaacccatcattttcacaaactcccctgcactttgcacaagcgccgccttattatcccgtatcaactgattgcaaccgatagaagccgtatccgtcactcgtccgggtatggcaaagcaatcgcgatgataaccatcagctaaatcggctgtaatcaaagaacctcctttagcagcagactccactacaattgttgcatcacacattccggccacaatacggttacggctgacaaaattatgtttatccggattagtttcggtgagaaactccgtaagcagcccgccatttgccagcatatcaacagccgttttgcgatgaagcgaggggtaaatgcggtccaagccatgagccaagacggcgacagtggaaatatcattggccaaagccgcacgatgcgcatgaatatcaatgccataagcaagtccgctcaccaccagcacatcgggaagaagcgcggacaaatcgtgtaggaaatccgcacaaaactgcttaccgtattccgtagcacgacgcgtacctaccatattgatgacatgcagacgattaagatcgacattccctttaaaaaacaggacaaccggagcatcttcacattcacgcagccgggcaggataggcctcatcctgcaaggtaaggcaagtcaggcgattcttttccacaaaccccatttcgcgttcggcacgaataaaagcggcaggacagtcaagagcagtaactatggagggatttacaccgggcaggagtttcggcaactctttacgctgtctgaaaacgttgacggcacttcccgcaccgtctattaaacgctttgccccgatatgtcctataccggggcaaagcgtaagagctatactacaaaggcgttcgtcgttattcatggtcgaggtaaggggcaaagacgttatcgaataattcgctgtcgcttaaacgtccgttaaccacacataccgtttcaaccaccgccttaatggctactttattatcactctctctgaaaatatcctgataaaacacatatttgatgccttctttcttcatagccagcttcgacacaaattcgtcaccgcttttcaacggtgtcttgaaagccatattgatacgtgccactaccggatccacaccctgttcatgcagcgcggcaaagctgacacccgtactcaacaggaactcatgccgcgtatgctccagataatgctgatagttggcattgttgacaatgccttgcaggtcacactcatagtcgcggaccttcattttcagttcataaatataattcattttgatatttacggtttattcctacgtgataacacgtcttttatctctgacacatagatatattgacaatcgacgatcgggcaatcagccgcgtttgttttctatatccaagcctttgaacttcttcagttcctccacagaaaccagcttgtagagtttgtcactgggacgtattttatctgctttcatcgagaaatgctgccctttcctaacagtctgcacaggcttcaaatccacgcgtgcttcttccagggtagtaaagacagcccctgtcgtgggcccagttatcaacagtttgtcacccacgttgacttcagcggcttccaccagaaactccgccacaccgatattcgagaaatagcgaatccctttacccacatagattttgcgttccgtagcggccgagccataattccgggtccattcgcccaaacgttgtcccaaataatagccatcccaaaatccgcggttaaagacggttttcagacgttcatcccagacagctatcttttcatcggtgaatgtaccttccacgtacgaacggatggcttctttatagcattccactacggtacgtacatactcaggaccgcgggcacgcccttcaatcttgaacacgcgcacaccggcatccagcatcttgttcataaaatggatagtcttcaagtccttaggcgacatgatatattggttgtcaatatcgagttctacatccgtctctttgtcgcgtaccgtataggaacggcgacacacctgcatacaggctccccggttggcagaatggttcatctcgtgcaacgaaagataacacttgcccgataccgccatgcacaaagcgccatggcagaacatttcaatgcgtatctgctcaccacccggtccgcagatattctcttcgcgaatatggcggtaaatctctgccacctgttccaagttcaactcacgcgccagcaccactacatcggcaaactgtgcataaaagcgcaaagcctccacattcgaaatattcagttgtgtggacaaatgcacctcctgccctatctgccgggcataactcatcacagccacatccgctgcaatcacagccgaaataccggcgacttttgccgcatccacaatggtgcgcatcagaggaatatcattatcatatataatggtatttaccgtaagataacttttcataccatgctcatcacaggtctgagcaatctcccgcaaatcgttaatagtaaaggtattggcggaacgggcacgcatattcaggttctctataccgaagtaaatagagtccgcacccgcctgaatggctgcggcaagagactcgcgtgaacctaccggcgccattatttcaaaatcagtgatagaggacataacaaatctatttgtattattacattcgtaccttatttttcgcaaaggtagccttttttccgtatttttgcagccaaatcccgttagattatgaagattcaaaatatagacctcggcaagtaccctgtattgcttgcccctatggaagacgtgaccgacccggctttccgcctgatgtgcaaaaacttcggagcagacatggtatataccgagtttgtatcaagtgacgcactgatacgttccgtcagtaagaccgagcagaagctgaagatcagtgacgaggaacgtcccgtagccatacagatatacggtaaagatacggacacgatggtggaagctgcacgaattgtagaacaagcacgtccggatattctggacatcaacttcggatgtccggtgaagcgtgtagccggcaaaggagcaggagccggaatgttgcagaacattcccaaaatgctcgaaataacccgctccgtagtggatgccgtaaaaataccggtcaccgtaaagacccgtctcggttgggatgccagtaacaagattatcgtggacctggcagagcaactgcaagactgtggcattgccgcccttaccattcatggccgtacccgcgcccaaatgtacaccggcgaagcggactggacgctgattggcgaagtcaggaacaatccccgcatgcatatccccatcatcggcaacggcgacatcaccacccctcaaagagccaaagagtgttttgaccgttacggagtggacgctatcatgataggccgcgccagcttcggccgtccttggatattcaaggaagtgaaacattatctggagacaggcgaggaaatgccgcccctcagctccgaatggaagctgaacgtgctccggcaagaagtggaagacagcgtaaaactgctggacgaacgaagaggcattctgcatgtacgccgccatttggcggcaagtccgctattcaagggtattcccaacttccgggatacacgcatcgccatgctgcgtgcagaaacgaaagaagaactatatcgcatctttaacgaaatagcaaaattgaacatcacctgaacatcggctgcgcaaaccatcgcttgaacatccatgtaaccaccacatagagaacgatggcagagaaaaagcccacaatggcatcaatcaggtaatgagcctgaatatacaccgtagccccacacagcaacaaatagaaaggaagcagtccggcaaacaaacgcttgctaccccgccatgccataatcatcaggatggtggacatgccgacatgcgagctgggaaaagccgccgtcgggcgctcacccacttgttgcgaactctccaccaaattataaaagaaaccatgttcgtatcccggtccgggaagcaactcctgattatggttgaaataatcgccgatagaaggaaatactcctcttgctacatactcctcgccaatggccggaaaataaaactgtggtcctgccaccggcacgaagatataaaacagataataaataaagaaggcagtgactatgacaaacgagactttctcaaaaagctcaaaacgatagaggaaataccacaccaccaccaaaaggatcatcggatagtaaaagaagtaacccatattgaacggttcactgacccacatctgcgggaagcgcaaacagaaccatacggcaggctgcccgccgaatacccattgctcggctgaggcgaagacatggtcgagattgggaaagatgcgattgaactcaaatgtgtcaggataccagtaagaaagcagcgacatctggatagctatacggataaaagcagaaaacttacaaggcgcaagccggtaaagatacatcagtagaaacgtcatacccgcaatcacgacgcgatcgacaagcatctgcaccggatgatccatttcttggaaaagaaacagtatgagaatggaagtcaacagattatatatcagcgtgatcttctctaccgcaaaaagccctttacgggtttctactctcttgaataagtctaaagccatcctttatctttataccaggcaatggtttctttcactccccgttccaaatcatattcagggcggtagccaagttccttgacagccggagttatgtcgcattgccagttgcgttgtttcattattctatacttgtccgaattgagcgtactggtagtgttccggcatttcgcccaatattcagcgagcaaagatacaactttcaatataattaacggacatctcagacgaattacaaacggatttcccaattctttccgtatcaagtcggaaaaagcgcgactctgatacaccttgccatctgccagaaaataagcgcgacgggatatttgcttctcgattccaaggaacacagcctgcacaatatctttgacatagacaaacgtcaaatcctgccggcggaagcccactgagaagtcggtgtgttgtcggatggactttgccatcaggaaataatccttctcacgcggcccatagacacccgtaggacggtaaatgacgtacgggaaatcaggtatactttgcaggtaagcctctgccttcaacttactaaggccataagccgtattgggcaacggagtatcctcttcccttatcggagtatatgacttttcgtgtaccggaccgaacacacttagcgtactgataaaaacaaactgtccgggaatcatatccaagtttcgcaacgtatccgcaaaatttctggtttgcaaataattcacccggtcgaaatcgttcttgtccacgcactttgtcgccccggcgcaatggatgatgtaatcgaacttgccattggcttccttatgggcggacaactgcgcacaaagcacatcgggatgggcaaagtcgagttcaagaaaatgtatcctgctatcttgcaaatactcccggctgctggacgaacgaatacccgcccatacgccaaacccgcgtttcaacgcttcctccacgatgaaacttccgataaaaccacttgctcctgtaactaaaactgacttcac

SEQ ID NO: 459 - DNA, 21329 bp, unidentified
  source 1..21329: mol_type = unassigned DNA
ttaaactttagggattttgcgtccacataccagctgcaggccgtattccgccgcaagctctgcggattgcacggtgggcatacttttgcttaccagcaccggcacccccgcgcggatggccttgcgcaccatatccagcggcacccggccgctggtgtacagcacacattctgccagcggcagccctgccagcaccgcgcagcccacggccttatccagcgcgttgtgccgccccagatcctcgcaggcaaaaacaatttctcctttgtgcagcacaaagcagctgtgcaccgcccgggtggcgcggtacaacggcagtccggcgtgcatggcggcggtcagggtctgcacccattccggctgtagtgccagcccgggcacagggcgcaggggctgcagctccaccggactgcccagcgcgatattatcggtgcagcagctggcaacttcctgcgcggcggcgcggcgggtgggcagcgggtggcgcagatatacctgcacctttgcaccctcggcgcagacggcaatctgctccacctcgtctgcagatgcgatccacccttcggtgagcagccgccccaaggccagctgcggcagcagcgccggggtgcataccacccggaaggcgggctgctcgtttacatagatagcggcggcgtgctctgccggtacggcggcttcggtgccgtccggcaggcgcaggctggcaaaggccgcctgtgcgccaaagcggtcagtgatctgcaaaggggtcgtgctgcgtattttcataaagttaccttatattataaatgcaatgctgtgtggcaaacggacagtaccaacataccggttcggcggcaaaaagtcaagagcagcttgcgctgcgatgggagacgggacgacccggaagggggcttgctgcacctgtgttttgcaccgccaacgcaaagcagccgccgcacggcaaggtgcagcggctgttttgactttgtgcagaaaggcttttatgccatatcgcggcaggtcacaatgtctgccccggtgtcgcagacgttgtgcagcaccacatcacccacatggatgggcgcgtgcagcaccacgctgtccagcgcggcgacaacctcggccatctgtcccttgggcacgggcttggaggtcttgaccgggcagcgggagtgcaggctgccctcggcgcgcacggtgctggtaatgatgcgggtggggtgggtcagctcttccttgccgtaggcgatgccgttggggcagccgttgccggtcactttatagccgttggcctcatccacctgcagatggcagccctgcgggcagcaggtgcaaattacttccttcatatcgctcatgcctcctcgatctcaatggtcacttcgtccacgggggctctgtccagcagcactctgggcagggcaatgtgctccatctcaccgggggcaaggcggtcgcgcttgaagcgtgcgatcaccgtgtcaccgctcttgacaaggatggtgctcctgctgcagatgcggcggacgcggaaggagacgttggtgctcttttccacgccttccagacggatgcgctgcggcagggtgtagccaagatctgcaccgggcttcacggtcagcacgcgtccctcggctacggggccgttctggacgtagctggcagcggccgcaccggccagctcgctctcaccggaaacaaagtccaccagatcgtgcacctgcaccacgttgccgcaggcaaacacgccgggaatactggtctccatgttttcgtacacgatggcgcccttggtacgggggtccatctcaataccggcctgtttggtcagctcgttctcggggatcagacccacactcagcagaatagtgtccacatcaaactccatctcggtgccggggatgggcttgcggtcggggctgatctcggccacgatggccttttctacgcgatctttgccctgaatatccacgatggtgtgggagaggtacagaggaatatcaaagtcgttcaggcactgcacgatgttgcgggtcaggccgccggagtagggcatcacctctacgcaggccagcacctttgcgccctcaagggtcatgcggcgtgccatgatcaggccgatgtcgccgctgccgaggatcagcacccgcctgcccaccagataaccttccatgttcacatagcgctgtgctgcaccggcggtgtacacgccggcagggcgggtgcccggggtgccgatggcaccgcgggtgcgctcgcggcagcccatgcccagaacgatgctcttggcttcgatgatctgatagccgtactccttggagacgcagtgaacctttttatccggggtcacttccagcaccatggtgtccagctgcacctttacgccggtgtccttgagcatctcaataaagcgtccggcgtactccgggccggtcagctgctcgccaaagcggtgcagaccgaagccgttgtggatgcactggttcagaatgccgcccagctccttgtcgcgctccagaatgaggatgtcgcgcagaccgctttcccatgccttgcaggcagcagcaaggcccgcagggccgccgccgataatgaccagatcaaccattgctctttcctcctaccttcgtttcgctgaccagaacgttcgagccgttcttgtcctgcaggatgtccaaggggtctatgcccagctcacggctgatcagctccagcacgcggggaccgcagaaaccgccctgacagcggcccatgcctgcaccggcgcggcgcttgacgccgtcgatggtggtggcgggcacctcgctgtggagggctgctaagatctcgccctcggtgatggtctcgcagcggcagatcacccggccataggcgggctgttccctgaccagtgccgccttttcctctgcggaaagctccttgaagcggatatggcggcggccgtccttgtaatcggccttttcagcgcccagaacaccgcgctgctgcaggatggcaacagcttcctcagcaaccgccggggcagcggacaggccggggctcttcatgccggcaaggtcgatccagccgggtgcttccggctcttcgccaatgataaagtcgtccacgtccagattggcgcgcacgcccgcaaagctgcggatggactcgccaaagttgatgctgggcacgctgcgctgggcagtggtcttgacgaattccagaccgctgctggtgcaggaggtgtcgttgccttccaccggctctgcgttggggccaacgagcaggttgccgtgcacggtaggtgctaccagcacgcccttgcccagcgcgttggggcactggaagataacgtggctcacgcgggtgccctcgctcttgtccagcaggtagtactcgccccgggtgggaatgatgtggaagttggcgggctccaccatggagtgtaccttgtctgcccagataccggcagcgttgatgacgcagcgggtctctaccgtgccgccgggcacggtcaggcggtaaccgccctcgatggcttcggcatcggtcaccttgcagctgcggcgcagctccacgccgttgcgcactgccacctcggtcatggccagtgcgtactcccacgggttcacgatggcggcgctgggtgcccacagtgcgccgcagaccttctcagagaggctcggctccatggcaagggcctcttccttggaaaggatcttcatgccgggcacgccgttggcggtgccgttttcgaacagatgctgcaggtggggcagttccttttcgtccagtgccagcaccagcgagccgcactgcttataggagacatccagctttgcgcagatctcctttgccagtgccacgccgcgcacattcagccgtgccatgcgggtgccgggggcggggtcgtagcctgcgtggagaatggcgctgttggccttggtggtgcagtctgccacatcgttttcggcctcgaggatgaccaccctgttgtcgtagcgcgacagcgcataggcggcagcagcaccaatgacgccacagccgatgatcgcgatatcatacattgttcttttcctcctgtctgttctgccttggcctgcgggagccgggcatctgttggttgcacaaaaaaagagcgaaccgaaacaaaggcaactgcccttgtccgtttcgctcatatctcttgaaacaaacagcacttgtttgcttttatgataccctgtccctgcacaaaaagcaaggtattttgcactttttgtgaaacccttacaaaaaacacccgccgcttttgcgcagaatgcggatcacatatcccacaccgcctgattggtggtggaaatagcggtggcaccggcttccagagccgccatcacatcctccttgtccgcgatcagcccgccggtcagcaccggcaccttggccttggcgcagacgcggcgcaggatcttgggcatagcgccgggcagcagatccagacagtccggcaggtttgcggggattttgtccagactttccagcgcgatggaatccagcaggaatacccgcaggatggcaaccagccccagctccttggcgcggcggatgaaggactgccgggtggagatgatgccgtccgcttcggtggtattgcggatgaagtccaccgctacctccttgcccgccagcccggcaataagatctatgtgcaccacggcaaagcgccctgtttcgtggatgcggcgcacgatggaggagatattgcagatatctccatataatacaaagaccacccggatattctcgttggtcagcgcgctgcaaagtccggcatcgtccttgacggcagcaatgaccggcatttcctgaatggcgtccatcagctcctgtttcatgcttttcctcctgcacacgaaaacgtcttttacagttaaagatattatgaatgctttgacagataaaatcaatgattttcagcaaaaattccggtgaaattgcggcagcctccgcaggcagcgccatcatcaaggatatcaacgccatgcagggctttggcaacatggatgtgctgtgcatggacaagaccggcgctctgaccaacgagagcaggtgcttatctgtgcagcgccggccggtaaggcttgtttggcgatgggcctatcgtcctgaaatctgttcttgacgtccgcacgaataagcggtacgatacgagcatagcgatgaaaaggcaaacggatgcggaataagcagaacagaccgcaggcggatgacacagaacgatcaagtacaggagggcgcttttgtgaatattgaaaagatcacgcaggggaagaacctgaccgataccgagcagacggtgttggagtacattctggatcatctggacacggtgcagacggaaggcgtgcgcggggtagcgcgggcgaactatacctccacctccaccattatgcggctggcgcgcaagatggattacagcggctttgtggatatgtgctacaagctgcgctcctttaccgagacaccgcaccagacgatgaaggaggaagaaaactttcttaacagctttggtgtggattcgctgctgaactacaatacctatacgcagcttaaagcctgtgcggaaaaaattctggagcagaaggataagatcgtctttgtctacggcaccggcttttccggtacggtgtgcacctacctgacccagaagctggtcaatatgggtattttgtgcgtcagcgccacaggctgcgcttgtgaagcgctgtcccggatatcccccatttccataaggtaaactgaagggctgctgcaccgcaatgtgcagcagcccttttgtgcagcggacgcatattgcaccagcagagctggacgggcagaccctgctggtgcccggctttgccccggatgcccttgcaccgctgtgccgttttttgcaggagcggctgaagttctgaaaaaaagaagccgctgcacaaaacgctgtgcagcggcttctctcagaaacgcattttacgcggccagagccttttcgatgttggacagaatggtgtcgtgatcctcagcgcagaccagaaccacctcgccggtgggcgctacggtgacggtggcagcctttgcaacaaggtactgatcctccagataatgctccatggactgctgttcgctggcaacataggcttccagtgcagcctttactgcatcggtcttgccctcggcgggctttacgatggcaacagcatagctgcgcaccatcatgctggaaatgctggcggcaaaggcggtgtactggtcgtcctccagattcagcagcggcatcaggatatcccggatctcttcgtccagctggtcggccttgtactcggagctgtaaccgtcaatggcggtaaacttgccgtcctcgcccttggtaaagatcatatcgtactcgttgtcctcgtcgctgcgggcatcgtggatgatctgggagtagtctttgggggtggagctgtcggccttgctgccgccggagcagcccaccaaggtaaacagggtcagccctgccagcagggcggcgatgaatcttttcatagtattaaagttcctttcatagtgctgtgtgtggaaggtgcagccggggcgcacacgctacaggtagtgtgtgccggttttgggctgctattctggatacgaatcactgcacagcagaattgcagggaaaaagtaacagttttatgaacagtgcccgcttacagcatcaaagcgtccagatcgccatggttcaccggggtggacaggatgatctgggtgctggtagtgcccagcttctggaactgcagaatcagatgttccagctgtgccatgctgccgcagctgaccttgaccagaaaggtatatgcgccggtaacgtggtagcactgcagcacctcgcggctgttctgcagcagctccagaaaggcatcctgcttggagggagccaccgaaaggctgatgagcgcatccacatacatccggtctgccggacggttcagcgtgacggtatagccgctgatgatgccgtctgtctccagcttgtggatacggctggaaactgccgggctggtaagagatacctgctctgcgatttctttgacgggcatccgcgcatttttggccagaagagtgaggatcttgcgatcgagatcgtccatataaaagtctccttaaaaaatatgttggattgtataaaattttctgaaagtaaagtttttatgttgtgcaaacccacagaaatggaataaaatttcgtttctgaaattctatgttaattatataaagtttttgcgaaaaagtaaagtattattttaaagcaaaatccaaaaatattgtttgacaagaaaagaaaaacgggtataatacatcatgcaaggcagcgcactgcacaaaagcctgccgctgatattgagattcaccactttatatactttcccacccctctatacacaaaaacccgctgccaggcgggtttttgtgttttatgcgtttttggggaactatacaacatgaccccgcgttttcacgcggggtcatgcttttatgcagaagggttttacagaaaacgaaagaaaaattattctgcgtacagagagatgatgttcagcacaatctcagtgcagcggtccatccgttccacggtggtgcactcgcacacgccgtggaagttgaagccgccggtgcccagattggggcagggcagaccattccagctcagggtagcgccatcggtgccgccgcgcacgggcacctccaccggctccagaccggccatgcgcacagccttgcgggcggtctcaatgaggtggaagtggggcttgatcttttccagcatattgcggtagctgtctttgatctccacttctacggtgcctgcgccgtacttgccgttcaggtaatcggcaatgtcctgcatattgtccttcttgaactgcagtttggcggcatcatggtcgcgcaggatgtagcccagctttgcggtggtgacgtcgccgtacatctggcacaggtggtagaagccctgacgcccctcggtggtctcgggacgcgccattacgggcagagcgccgtggaactccatggcaacgttggaagcgttgatcatggtgtccttggcagagccggggtgcaccgagaagccgtggatagtcacggtggcagcagcggcgttgaagttctcgtactcgatgtcgccggcatcgccgccgtccaccgtgtaggcaaagtctgcaccaaaaccggggatatcgaacagatcggcaccctcgccgatctcctcgtccggggtaaagccgatgcacagcttgccgtggggacggccctcgcggataacggtctccacggcggtcatgatctcagccacaccggctttatcatctgcacccagcagggtggtgccgtcggtggtgatcagggtctcgcccttcatggaggcaaggaaggggaaggcagagaccttcatcaccttgccggtggcgggcagcaccacatcaccgccgtcatagttctcgtgcaggatggggttcacgttctcgccgccggcatccggggcggtgtccatgtgggcgatcagacccagcgcgggcttttcctcgcagccgggggtggcgggcagggagccgtagacgtagcagtgttcgtccacccgggcatcctccacgcccagagccttcagttcctccaccagcttgtgagccagatcaaactcccgcgcagcggaaggatgggtgccggactccgggtccgaggtggtgtagaccctgacgtaatcaagcagtcgttcataggcgcgcataataaagcacactcctttagcaatattgaaggatcacagcccgtgatccagcttctatcataccccgtttttcctgttttgacaaccttttttgcccacttgggacagaaagcacgggcgcaataacaaaattcaacgtaaaaagttgtccgtcagtcataaacgtgctacaataaagacacccttataaagaagcgggcgcaccgcacagcagaaagatcaggaggagattttatggcagtcaaagtgtttttctacaccctgcgcccctacgatgagcagggcatcgtagaggaactggcaaagcagtatggcatcgagtacggttatactgaggtgtatcccaccatggagaacgcccagctggccgcaggctgcgatgcggtatcggtgactccctgcgatatgagcgcacccatgctgcagcgcttccacgatcttggggtgaaagccatctgctgccgctccatcggctacgaccatatagatctggaaaaggcacgggagctgggcatgaagatatccaatgcggattatcctcccgagggcgtggcgaactttgccattatgctcatgctgatgagtctgcgcaaggcggggcacatcctcaagcggggcgaagtgcaggactactccctgaagggcaagcttggacgggatatctcccactgcactgtgggcgtcattggcacgggacgcatcgggcagaccgtgctgaagcacctgtccggctttggctgccgtctgcttgcctacgacttgtaccagagtgaagaggtaaagaagatcgcggagtatgtgccgctggacaccctgtttgccgagagtgatgtcatcaccctgcacaccaatgccaccgaggaaaaccatcacctgctcaacgccgaagcctttgccaagatgaagcccggcgtgaccatcgtgaataccgcccgcggcaagctgatcgacagcgatgctctgctgaaggcgctggaaagcgggcaggtgggtgctgccagtctggatgtgctggaaaacgagaacggtctgtactattacgaccgcatgggggatgtgatcccgaacccggaactggctgcgctgcgcgcgatgcccaacgtgctcctgaccgaccacacagccttctacacctacgaggctgtaaagagcatggtgctcagtgtgctggaaagcgctgccgcctttgccgagggcttgcccacccggcatgatgtgactgaccgctgagaaatggtgaaatgcaaaaatcggacagaccgcggtctgtccgatttttgtgctatttatccatagtatcccaacgcaaattggtgctcagcccagacagacgcccatgcggcgcgccacgctcagcagctcgcagttttcaggcacattgcgggtcttgccggcaatgtctgccagacggttctcggtcacccggcggttcaccatggccacggttacgccgtagcgctccacctccaccagctgtgcggcatagctgccgaactgggtggcaagcacacggtcgtaggcgctggggctgccgccgcgctgcatatgacccgggatgcacacgcgagtctccatgccagtctttttctgtaccgcctgcgcaatgcggttggtggcggtggtgccaagccctgcctcagcacgcttggccatccagtccttgcgcttcatgcgggcttcctcggtgttgatggcaccctcggccacggcgaggatggagaagttcgagcccttcttcgcacggcgctccacggcctcgcacacgcggtcgatatcgtagggcagctcaggcagcaggatgatgtccgcgccgccggcaatgccggaatacaaggtaagccagccggccttgttgcccatgatctcgatgcacatcacgcggctgtggctgccggcggtggtgtggatgcggtcgatgacgtcagtggcgatgtctacagcggtatggaaaccgaatgtcacatcggtgccgtagatatcgttgtcaatggtcttgggcaggccgatgatgttcagcccctcctgtgaaagcaggttggcggtcttatgggtgccgttgccgcccagacacagcaggcagtccagcttggcagccttgtaggtctttttcatggcggcgaccttatcaatgttgtcgtcctccaccacacgcatcatcttaaagggggtgcgcttggtgcccagaatggtgccgcctaaggtcaggatgccgcggaagtcgtcctcggtcatctcgcggtaatcgccgttgatcaggccgctgtagccgttggcgatgcctacgatctccacgttatcccccatgcgggcgtacagtgcttttgcaacgccgcggatggtggcgttcaggcccggacaatcgccgccggaggtcaggataccaacacgttttttcattcaaaagccctctttccttatcattcaggcaaagccgaaccgcccggcaaaggatgccggagcgcccggggtcctacctttttatagtattagagtattccgaaaggggagtgctgtcaagagaaaaaccaaaaatttacaagcctatgtacaccgggcggccgctgcgaaaacttttgcagaaaaactgaaaaaatggttgacaagcagcccgccggcgtgtataatatcccttgtcagcaacgcacggcgcggctgacacaaccgaatattggggatttgcatagtggtagtgcggtagactctgactctacttgtgggagttcgattctctcatccccaaccagaaaaccgcagtctcaactggctgcggtattttcggggcatagcgcagttggtagcgcgcctcgttcgggacgaggaggccgtgggttcaaatcccgctgctccgaccaaaaaatgcacgttgattcgctaagaattttcgtgcttttttctttattcggcagaatgacgagccggttttgaaaaaaagcgccaaaaattatttcaggcgcaaacaggaaatctgttggaggctgactctgacagacttttttgtaaagctgaacgaggaaaatgtcgaggacagttccaccgggtggtgggactgtctttttttgtgtggctgctggcaagcagaagttgacgccagattgacaacttattcgagcatgggggatcggctgggacgtttctccttaaaataagcgtgttgttataagcgtgttgttgaaaagaaacgcttcatgcaatgttattatctgagaaaacccgctctgtttatattgatttccctctgcatccatgataaaataacaggagaattcgtacaattatgtcgaaaatgattgcaatggaagctacccttacggagatctgaatactccttgtgtcagctgtatggcagatggttataaacggagccgatgattggcttgacaaaaagtgcccggaagaagtcaggcaaaaacagtaattgcatcacaacttcagaacgagcggaaaagttggaaaagataggaattatgtgggatactatggagcaaaagaagggcaatcggccatgaagaaggttttgctgatcgcaacaacacggcttaccatggacggtttgacagagatcctgctccgggtagcccgcatagcggcacgggaatatttggtgggctttgcactgggtgaaggctgcagtgcggatatccagccgcagctggaagcaatcggcagcgtatatcagctgccttcccgtaaaaaaaagctgccctgctatatggccgcactggcagcattggtcaagaaaaaaggctgtgaagttgtgcacatccatggcaacagtgccacgatggcatttgacttgctggctgtatgggctggcggcgcgacagtgcgcattacgcattgtcataactgtgcgcaccagcctgcccttaagcaagcgacccttggcagactgctgaaccgtttggttacggatccggtggcgtgttcgcgtgcggcgggagagatgctatatacccggccattccgggtacttgtcaatggaatagactgcgagcgcttttccttttccccgtccgtacgagaacaaatgcgggcgaaattggggctgcaggactgctttgtggttggccacattggccgtttcagccagcaaaaaaatcatacccggcttttccgcatcttcaaaacagtcttgcagcaaaagccacaggcaaggcttctgctttgcggccaaggagagaatttcgaacaatctcagcaggaagccaaggcgcttggcattgcggagatggtgctgttttgcggtaatgtgaataggccggaagattatctgcaggcgatggatgtatttgtgatgaccagcctgtttgagggattgcccattgtgggtgtagaagcgcaggccagcggtctgccctgcatttttgctgacacgatcacgcaggaagtgaagatcctgccgcagactcagttcctcgcacttacacagcctgatgaagcatgggcagagcgtattgtccagacaaagccgatggaacgcagccttgcgggacattgcgtagagagtgctggatttgcagaagaaaatctggacaggcaggtctgtgcgctgtatggaatggaggaacatcattttgcgaatatcagtggtcgtgaccacctataacggaaaaatgcatctggaaaagcagcttctgtcgttgttgcagcaggagcgtgcaccagatgaggtgctgatctttgatgatggctccacggatggcacaattgagctggtacagagcttcatccgcaagaattgtctggagagctggcagttttatgtcaatgccaagcgcaaaggctggaagcaaaactttatggaggggctgcgaaaagccgcaggggacattcttttcccttgcgaccaggatgatatctggtacccgaggaagcttgcagaaatgaccgcagtgatggaacagcacccggaaatcaaactccttgcctgcgattaccgtgtgatctacgagtctggagccctaaaagcaacggtttacaagaaaacacctgaagaaacgcagggcctgattacaagatatggatttaccaaacatttctttatgaacccttatccgggctgtacttatgcggtgcggcgcgacttttttgatgcggtcaaagagctgtggtttgatggctcgccccacgacgaatttctatggcttatggccgcagtgcaggacggcgcatggttttacaaccgtgtgctgatggattatgtgcggtattctgataatgcatccggggtgcgctacaaagatgttgccctgcaaaaagaaaacctgcgctatatccacaaacagctttgtgccctgcaatcttttgcggcagagcacccggatgctgtgccggtagaacgctgcaaaatgcttgctgcggcgcagatctggtgtgcaaagcggcagaagctcatggaaacacgcagtccgctccgctggctggcactggcgccgtggtgggggtactacaattcaccaagaaactgcctgagtgatttgtggctggtggtgtttgggagttttcaacgtcgcagaaattagaactgccaaaggagaaaaaattgagacgacttggagtttttgtattttatgatcctcaaggagttgtagatgattatgtggtgtttcttttggcatcgatgcgaaaggtttgtacggagattgtgaccgtttgcaatggcttcctgacagaagaaggacatgatcggctttcccaatggagtgaaaccattttttgtagagaaaacaccgggatggatgccggagcactaaaagactttttcacaaatcttcggtcaagagagtattggaacacatttgatgagctggtctggttcaatgatacctgctatggccctctagtgccgatagacaaggtctttgaggagatgaagcagcgtgagccttgcgacttttggggaattaccatccatgcaaggtctaatgctaaatggccaggcagtaaacagcccggaattgctgaacatttacaatcatattttattgtaatacggcaaccgctgctccaggatgagcggttttatctattttggaaggatatgaagatatccgataatttcaatctcacggtgtcaaattatgaattgtctttaaccaaaacgtttgcatcatggggttatatttacgctgctttttgtgataccagaaagctggatacgaatccgaattgcgtttgcaatccaacagctgatgcaatgtatcggctggtaagccagtatcactgtccctttgttaaacgcaaaaattttattcgaacaaatgcagaagccacagtctccaccaatggagagcaagtcatgcggtccatgagctacatccgcagccataccacatatgatactgcactgatctatcggaatcttatgcggctatacgaccaagaactgtggaagggaaacctatgcctgaacttcactttgccttcagaatattctgccaatgacccgactccgcctgcattgatcctggcagaacttgatcatgaagattcgattcacgagttatcggagagcctatgcagcctttctgaatcttgcgatttgaacgttataacgcgtcgcactgaactcattcctacaatcaaaaagttttttccatcttgtaacatcacggtttcatctaatcgaccgcagggacttgcttccctatttttggtgctgaaccagatagaaaccgataaatataagtatttctgtattcttcaggagatgtggggaaatccatcaaacggtctgcatatttcagaatcttcgattcgttttagtatgtacggtaatttggtcgcaggaccacactttattcggaatgtgattcatacgtttgagtcagaacctctattaggaattctaaatccgccgatctttccgcaaagccgcagtgcaatggttgctcatttcaatttaaagcaagctgcaaaagattatggaattcctcttccgcaacgcctgtgtgattacgaggctttttgtcagccctcgctatggtgtcggaaagaggtagtattagctgcgcttgaaaagttgaacgatcagacatctccgctggaccccggcgttttggaacatctcctctgctatattgcacttagcagcggatatagttgcggtgaagtaaaggaaagccgtcaggcggcctgcttgcaagaatcgcagcaagggcttatcaacggtttttattctggaaatattgacttaaatctctttcagaaacgtcaaaagtttcaggctgtggctgccattcgttcaggaaaatgcaaaccagaagagacgaatattacaccatcggcattgcgaaaacttctatgggaaactgtaatttactggtttgaaaagaaactgaacccgcacatatcctcttctaaaaagaatacatactttttgggagcccgtgatgtatacgatgtatatcgcagggttgaaaaggcacggcgccattcttctgaaaaatagaaaaggacaaacaaaatgaatttcgaaaaggcgaaaaagttgctgacacagttgtcagtgttttattttctgcttgcagcaatgatattctttgtggccggagatggctttcgacatgaaattgtaaacggttccgccttatctcccagctctgtgatcggtgaaatcgttgacgggatggtcgttgaacagcgattgccgctgggagctgaccatgttgaagcattaaatcttcaagttgccacttttggcagacaaaatactggtatccttcacgttgatatctatggcgaagacggcaccttgatctcctcagcacaaggaagacttgaggatatgggggacaatcaggtgatacgcttttcgtttgcagagtcgcttgatggaatgcgcaaacagtatagcacggtaaaaatctggtccgaaggctgtcagcccggcaacgcaataaccgtttattacggaaacggcattcaggcgggaaagtatacgcttcagaagggcattgcatcagaagatctgtatcaggtggatggcacttcgggcagtggaactctgtgtgcatattttaatggttacaacgacctgattttttataaggtatactggctgctgatccttttcgtgtatgcagcggttgccgtagtgattagaagatggtggaatcaggcaaagcagggaaaatgcaaccccttgacaacattttacgcaatggtggttcaatatggctttttgacccgccagttggtgagccgagactttaagacaaagtacaaaagaagcctgctgggcgttggatggagcatcctgaaccctttgctgaccatgctggtgcagtatgtggtattctcaacgctgttcagtagcggaacaaaaaactatcccgtgtatcttttaacgggaatagtgttttttaacttctttaatgaagcaatcaatatgggaatgacctctatcacgagcaatgcagcattgatcaaaaaggtctatatgcccaaatatatttaccccgtaagccgcgtgttttcttctttgatcaatcttggaacctccttgataccgctgcttgcggtcatgctgttaacgcgtatttggcccaagtggtcgttgctgttgctggtgtttgatattctctgcttagttgtctttgtaatgggaatgagcttgatcctttccacctgcatgactttctttcaggacacgctgttcctgtggggcgttgtgagtatgatttggatgtatctgacgccgattttttatatggatacgatcattccagaaaagtttttggcactttaccacatgaatccaatgtaccaatatatcaactttgcgagaatttgcattattgatggcgtttctcccaatccgatctcttatctgtggtgtatccttacggcggtggtggtgtttgccattggtgtatcggtattccgcaaaaatcagaatcgttttgttctgtatttgtgaggtgggggcgtattatgggaaaaatgattgaagtgaacaatgtttccatgcgttttcgtatggcaaacgaccgcgtgtccagttttaaggagtttgccattcgaaaactgaagggcgatttgaaatattcagagtttgaagcgctgaaaaatgtatcgttttctgtggaaaaaggtgaagtggttggtttgatcggccacaacggcgccggtaaaagcacgctcttaaaggtaatttccggcattcttcagccaaccgagggaaatgtggtcgtacatggcaatgtggttcccatgttggagcttggaagtggctttgatatggatctgacaggcaccgaaaacattttcctgaacggtgccattctaggctattctgaggactttctgaaagaaaagtaccagcaaatcgtggatttctcggaactgggtgcagagtttctcgatatgcctttgcgcaactactcttctggtatgctggcaagattggcgttctcagtcgctacggtagtggagccggaagttctgatcgtagacgaagttttggcggtaggcgatgcagatttccagaaaaaaagcatgaaccgcatgatggaactgatgagtggcggaactaccgttctgtttgtgtcgcataatattgagcaaatcgagtctatctgcaaaaaggccgtatggcttgagaagggaactgtaaaattgatcggatctgtgcaagacgtatgcggggcatataaaaataattaaaatgcattttacaataatttgaggtgtgaacgggatggaacaaaacaaggtatatcattattcgctggatgatataaaaaagattgtacagcaggaaaagattaaagtggtgagctttgatctttttgataatttgttggtacgacctagtatgagaccaaccgatattttctatctgcttgaagaaaaagtgcgtcgagaatacggcttggactttgtagggatgcggcttcatgcggaagaagaactgcacacggatgatgcaacgcttgcggatatctggaattacatcgggaaaaagcatagcttgaaccttggcgtagtaaatacgctgatgaatttggaaattgagctggagaagcgtttgctgacagtgcgtccagagatgctctccgtattgaactgtgcgaagaaagccggaaagcgtgttatcatcacgacagatatgtatctcggagcgaacgttctttctgacatcctagcatccaaaggcgtcacgcacatagatgctatatatgtttccagtgatcttcatgccagaaaaagcgatggaaaactttatgctctcattgcagaaaaagagaagatcgaaaatccggcgcagatagtgcatattggtgataatttccggtccgattatcaaatggcgctggatgcaggtgttacaggtgtttactatccaagtatctgggaagacgcttgcggtagcggtagaccttgggaacgtgtgcttggcgcggattcttctgaagacccctatattcgccttatgacctcctatgcgatttacgatacgtatctgattcgcggtcgaaaatttgatagtaaccgatgtctggataatctgggtgatgttgcttctcttttgttaggaaatgttctgctcgctattgcattcgatttgctgaacaacgaacagattcagcaggattatgatggcgtgttcttcgccgcgcgagacggatatttgccaagaaaaatctacgatatcattgcttctgaagtaaagggtagccttccatcgcattattttcaggcttcaagacaggctttgagctatactagctatccgggattcatagagcagtttgacgatatctccgctggaacgataaatcagccttaccgactggaaaactacataaaactgatcattgtcgataaatctctggttcaccagattttgtcttctatgaccgatgaagaaaggtcgattgacctttctgagcatttactggaagcgcgcagtgtattggtacgctacaaagaaaggctggatgcttatttttctgtgcagcgtgagttagctcaaaaatactacggaaacctctttcctgagcaggaaaagcgctatcttatctttgattgtggttatagcggctctgtatcgattggtttaacgggtgcccggaaagattgtgacatcaaatttgataaatattatatctggcagacaaaaacaaatcaaaaacgagatcgagagaatggaaccaaaacgttctgtctaagtccgagtgatgatttcgcaggcaccaatttggtttttgaagagtgtttttcaccgttggaaggctcctgcatcggatttgagatgcaaaatgagaatgttgtcggcgtacaagattccttgtctcctgatgagaatatgacacggtctctatatgaaatccaccacatctgtgaagactatgccagacattttgttgatttgttcaaaccgtatttgagctgttttaagttggtagaccgggacgtgcttacgcgtgctgcaaacgttgcttttgtgagatctccctacatggaggcttccctgttaaaacctattcgctttacagactctcttaacggcggcgttccgattgaactatccaaaaagctctatgatagttatgagctcatgtgtaaatacccaacggtttttcatgggacacagttcttgaacccggaggtatttgcgattccaagacgtgaagtcagcacaaatttgaaaatcggcatccatctgcacattcactatctccatgtattggaagagtttctctgctacctgaaggattttccggcaccgtttgatttgatcattaccattacagacgctaaagcagagggcgcaattcaaaatctgtgtgacacgctgttaccgaatttgaaaaagttgattgttcttgcagtagaaaacagaggacgtgacgtggccccttggttggtagccacacggctctaccaaaaggactacgaccttttttgccatctgcatggtaaagcatctgtggagtacgaagctggagctgggacgacatggagacgatatctgctggacaatctcattggacataacgcagcatccgatattattaaaatgttcgatagcgattctgatttaggatgtgtattccctaattatgatgaatacgtggcaaaaatcatagtttcaaatcaaattccccctattggtgaatttggcgaacaaaaaatgattgaagaactgatgcagaaaatgggaattgataggctgttttctcgggatgatatgctatactcttgcggaacgatgctgtggtatcgaccgaatgcgatgaagccgttatttgatttgaagcttacaacagaagatttcccgccggagcccattatcaacggtggtacgattgcccatgcaattgagcgtgtgcctggtcttgtgacgatgtcccagcattatacggttaaaatctataacgagatgcagccgcagatgctcgatccgctggcaatgttgccacctccagcaccggcagcagttgcagtgcctaccgggatacctttccgtacttggaaaggacacccgataaagtggtacattaaaaagattgcaaaatcaattttcccatacggcgtaattcgtctttggcagagaatttactacaaatattga

SEQ ID NO: 460 - DNA, 9605 bp, unidentified
  source 1..9605: mol_type = unassigned DNA
ttaagttctttccgccatttcccgataccgctgataccgtctgccggcatcttcctctgcctttgcaaacagtgccttcgcttccttaggatactgcgcttcaagcaccgcataccgtaactggcttcttaaaaattccgtaaaggaagcctttggcggtctggaatccagtgcaaacggattttttccttcctttataagctgcggattataccggtacagatgccagtatccggcatctaccgcctgtttcatgcttgccatgctctttcccatgccttccttaataccgtgactgatacaaggtgcataagcaattaacagggaaggaccatcataccgctcggcttccagaatcgcttttatcgtctggtttttatccgcgcccatagcaatctgcgccacatagacatttccgtaggtcatcgccattgcgccgatatctttttttgccgtccttttaccgtcggcggcaaattttgccacggctgctgccggtgtggactttgatgcctgcccgccggtattggagtaaatctccgtatcaaagacaaggacattcacatctgcaccgctggcaaggacatggtctaatccgccgtatccgatatcatatgcccagccatccccgccaacaatccactgtgagcgtttcaccagaaaatccacccgcttctgaatttccgacagtctttgaatctgccgtgacgtccgttctgcctgttccgataccgccaccggtacatctgaccgcgttaccgcctctttcaacccctgcgccagcttctcacgcacctcttctgccgccgcagtgcaggctgtcggattatcacgcactgcaagccagtgttccagcgcttctgatatcccgcttccgctgtctgcaatgccgtcattttccacgccgctttcacactccctgacaaattcttctgccagccgtatcagcgtttcccgctgtttttttgcaccgagcagcataccgtagccgtattccgcattgtcctcaaacagggaatttgcccacgcaggaccttttccgttggcattgcacgtatatgccatggatggtgcggaagcactccagattgaggaacagcctgtcgcattggcaatcaccatgcgttccccgaaaagctgtgtcacaagcttcatatacggggtttcaccacacccgccgcacgcaccggaaaattccatgagcggccgtgcaaactgactgcctttgaccgtttctttggtcatcagctccggtttatccgccaccgcactgacagcaaacgcccagttgtctgcctgttcttttatctgctttgcggcaggctgcatgacaagcgccttttcctttgccgggcagatgtccgcacagttgccgcagcctgtacagtcgagcggactaacctgtatcctgaacgtatgccctgcaagctcttttcctgccgccgccttgctttcaaaattctttggtgcaagcgcctgttccttttcatttaacagaaacggacggatacacgcatgcgggcagatatacgaacactggttgcactggatacagttcttttcaatccattcgggaataaatgccgcaataccgcgtttttcatatgcggttgtaccggcaggaaatgtgccgtccgccagcggataaaaagtgctgacgggaagactgtccccctttgccttttccataggtcttaaaatgttttcaataaattcgggttcctgcacattttcccgttcttctcttgtggactggagcaattcaacaggcacaagctttgtttcccgaaaaccgtattccgccgcctttatatttttttctacaatgtctgcacctttttttccgtatgccgcctgtatggaatttttcagacaggcaagtgctttttcctgcggcagaatcccggtcagatgaaaaaatgcgccctgcataatcatattaatgcggtttcccagtcccagactgtgtgccagctttcccgcatcaatcagatagagccgtgcatttttttcaatcagcgcatgaaccatttctttgggcagttttccgccaatctgctctgcgccatactgcgtattcaatacaaatatgccgttttctttcaagccttctgtcaggtcatatccgctgtttaaaaaggattcattgtggcaggcgatataatccgcttcctgtatcaaatattccgagcggattggtgtatcgccaaaacgtaggtgggaaaccgtaagtccgcccgactttttagaatcatacgaaaaatatccctgcacatagggctttgcatattctccgatgattttaaccgcctgcttgtttgcacccaccgtaccgtccgagcccagcccccagaatttgcactgcataagccctgccggtgtctgtatcggaaaatccggatgaacggcaagcgaatgatgtgtcacatcatcttcaattccgattgtaaaatgatttttcggctgtacgtccgtcaggttgtcaaaggccgcggcaatctgcgcgggtgtcgtatcctttgagccaagtccataccgcccgccgataaccagcggtgcatttttctttccgtaaagcgcgccgcagatatccagatacagcggttctccaagtgcgcccggttcttttgtccggtctaacacggcaatccgctccacgctctccggcagctcctttaaaaagtcgtctgcactgaacgggcggaacagatgcacctgaatcatgccgtatacaccactgttgtcctgcatgatgtcgtcctgcataccggaactgccggtatcacaatccgtatctgcacagttcatctgcggcaggatttcccgtatggtttcacacaccgaacccatggcaatcactacgtactttggatttttagcgccgtaatactggaaaaagcggtatgttctgccggttcttttctcaatctgtgccatatattcttttataattcccggaattttttcataaaaaagattcgcagcttctcttgtctggaaatagatgtccggattctgcgccgttccacgcataaccgggtgatttggtgacagcgcgcgttccctgaacgcctgcaccgcttctttgtcaagcatttcttcataatcttcataggacaatgcttctatccgctggatttcgtgggacgtgcggaagccgtcaaaaaaatggataaagggcagtcttcctttgactgccgataaatgtgctacggcggcaaggtcgcagacttcctgcaccgatgacgatgcgagcatgacacagcctgtctggcgtactgcacagacatcctggtggtcaccaaaaatgctgagtgcctgtgccgccagcgcacgtgcgctcacatgcagtacccccggcagaagttctcccgccattttgtaaagagtcggctgcattaacagcagtccctgtgatgccgtaaatgtagaagcgagtgttcccgactgtaaaatgccatgcattgcgcctgccgctccggcttcggactgcatttccaccacatctgccgtttcatcaaaaatattttttctgccctgtgctgcccagttatccaccgtttctgccatcgccgatgacggtgtaatcggataaatcgccgcagtctgtgtaaatgcgtaggcggtataagcggcggcagtatttccgtctactgtcataattacttttcccataacatcctccatttataaccggctgccgttatccacccattctttggcatggagggcagcattttcatcaatcaccggaacttccgccgccgtatctgtttgttttatatcgttttgggctgtatttttttcacccgctctttcctgtgtactgtgtaaccgtgcattttttctgccgtcaagtgcctgctgaatgtcttctttcatcgcattgcttcctttcgatgtttttatgacattcagtattgcctgtgtgccgccgattattcaccatttacggcttattttctccgtatcctgtggaactgcggctttactgtgatttccgtcactaccagcccctctctttgtgccagtgcaaatgccgccgcttccgccacttcttcgggcagcaggtatgatgcttcttcttctccttcacaaaagtctgcattgcggtacaaatcggtctttgccatatccggctgtatcgtaatcacccgcacaccgtatttgcgcacctcgtcaaacaggctctttgcaaagccggacagccctgcctttgtcgcaccgtatgcacagccgtgcggattggactgcgctgccgtaacagaggatatatttaagactgtccccctgttcttttttaatgttcgcaaaagctgctgtgtcagaatcatcggtgcttccagattcgtgcgcaccattttctgaatctttttcggatttaattcttcatgcagaccgtaataaccgacccccgcattattgaccaacaccgtgacacggtaattcttatcaatctctttaatatgcgcacacaatgcctgcgtgtccgtaatgtcacagaccaccgcatgaaatttttccggctgttctttgcaaaactcctgtgcttctgctctttcaaaatttcttccaaaaccaaaaacttcatacccatttttgacaagcatacggctgagtgccagtccgattccggaagacgatcccgttacaaccgccgtatctgccacatttgccatatccgtgttctgctctattcttcccataaaaatatcctttcttttggcagtcttttttcaagctgtccggtcagaaatccctccatgcgcgtcagcagttccggcggatactgatacacaccgcccacattggtatacggaaactgcaccactgccgcatgcggctctttcttccgcatattttttaaatattcctttgaaatgcggaaacttccgacacttacatccaccagccgtttccagtcaatctgttcgtcaacgcattgaagcatttctgcataaacattttcccagtccttacagtaaatcatcgggtcaaatgccagacgcacggaaaatccccactgtactgcttctgccgcacacgcaatccgcgcctgcatatccggcgtaaaatgttcatatgccgcaatgaccggctgaggcgacatggtaaatgcaaatattacccgctctgtgactgcctgctgtttaaaataatgcacattggcgctttttgtccgcacttcaattgtaagattttcatgttccgtcgtaaaccgcatccactctgccgtataaccgatgaccggttcgaccgcaagcaaatccgtatcatacgacacacacaggtaaacgctgtgctgttctaacaaacgctccacttctgcaaaaatgtcttctaaatttacaaatagcactacatttgcagaaggatacatgcctttcagatagcagtattcgcaatcgtaaatgcagttcatcatgcaggacgtataataaaaccagtgattaccaaagctttggcagaccggcgcgccctgataaatgagattgtttttcttttctgccagaatgagattctgcgttttatgctgtctgaccacgctctgtcccctgcggcagaagacatctttataatgatgtaccggtatcacctgtgcctgcggaaagcgggacagaattttttgtgttctcggatgattccaaaccgcttcttccacataaatatgcgaaaaccgtctgttataacaattcttttctaagctgttcaagacaccgcttcccttcttttttatccttgcacggcagacttcctgccgcataaccgtcccggattatgtcttcataatctatacccgataaccggcagtactttaacagctggaacagttctgcttccatgacggcggaacagtgcatatcatgactaagacgttctgcctgccgctgttcctcttgtgataacacctgctgttcccgcgcataatctctttctgccgctgcaaaccgttccacggcttgcgcaatctgtccaatctgtgcctgcaccagttcacgcacggtatctgcggacattttttcctgtacaccgttatcggatatgatttttataaaaaacatctgatgcggaccgaaaaaatgatgtgccgcctgataccccgccgccgcttccatgtcatataattctatattatataattccgtgtcacataatttcaccggatttgccgtatccgtattttgcggcatatccgctttctgacatacatgttcctctgacacacttgctttccgccgcacgttcattcctgttacaaccgcagcttcgggaaacggatgcctgtataaaatatccgggtaaaatgtcttttgtgtcgcttcttccgtaattttgctgcacagataagccacaccttttttctgttctgcgcctgcgcatatgccgcactgcacaaagatatctcccgctttcacatgtcccattgcacagacagccgcgacaactgtcgcggctgtaatttctcccgttcccgtaattgtaaggcatatctgctgttcctcacagcgatacatttcaaacggaagggaatttatttcttttttcattttgtaatactgcaaaaacggataggcttcatcatacaacgctgtaaataaataaatcatcgcttctcctcatttttgatttcttactaattctgtgccttaacctgttcaaatttttcaagcacttcctgttccggtcctccggttacaaggctgacaacaacaataactgctacagctacgataaatgccggaagcagttcatagattgcaaatacgccgccaagctttgcgatgacatatttccacaggaaaatcatgacaccgccggataccatacccgcaagaacaccgtaacggttcgcacccttccagaataaagataccagtacaaccggtccgaaggttgcgccgaagcctgcccatgcaaaagatacaatatcaaatacagagctgtccgggttgcttgccataaatacaccgataacggcaatcacaacaacggtgattcgtgccactacgatggacattttctcggtaatcttaatgtgaaaacaatcttttacgaggttttgtgatactgcggaagccgccgccaaaagctgtgaatctgccgtagacattgttgccgcgagcataccggcaagaatcagtccgccgataatcgccggaatcgcaccgtatgtactcaataaatgtgccacccgtacaataatcgtttcagaattgctgcctgtcagcacttcaattgcgcctgcctttgacatgctgtaacctacaataccgataaatacaccaattgttaaagaaatcacaacccagacggttgccacacgtcttgaaatctttaatttattttcatcttcaattgccatgaagcgaagcagaatatgcggcataccaaagtagcccaatccccacgccattgtagaagcaatacttaaaaagctgtatttttccgcagattgtgtttctaccgaatagctgtggaagaaatccagataacccggaagctgccttgcattatctattaccacatctaatccacccgcaacattgataccgaataccactacaaccaccagcgcgattgtcataacaatactctgaatcaaatcggttgtacttgctgccagaaatccgcccaatgcacagtagccgacaatgactgctgcactgattatcatggctgccatataattcaccccaaacaggctggaaaacaacttgccacaagctgcaaaaccggaagccgtatacggaatgaagaagataataatcatcagtgccgcaatgcctgtcaggattcctttcttatcaccgaatctttttgcaaagaaatccggcacggtaaatgcctcataggctttggaatacacacggattcttctggctacaatcagccagttgacatatgtaccgattgcaagcccaatggctgtccatgctgcacttgcaacaccggaaagataggcaacacccggaagtcccattaacagccagctgctcatgtctgatgcttccgcactcatcgctgttacaaacgggcctaattttctgccgcccagataaaaatcatcgacgctgttattctgcttcgagcagtaaaaaccaacacctaacattgccgcaagatatataagaatcgcggccataataataatttgtgacataattctacctctttttttcgatttaaaccataaaattataacacaaattaaaatttcagtaaataaatattcgacaaatcaacaaaaaagctgccgcttttcaatctgtgtatctgaatttccgactgtgttctgtccggatttcaggttttgattgatgaaagcagcagcttttctattttattctattactttttatgtattattcgtataatggatacttgtctgttaatcccttaaccagttccatcgcctttgccttatttgcatcgacatcttctacaagcattgcgattgcatctgctacaatatccatatccgcttcattaaaacctcttgttgtaacagctgccgtacccagtctgataccgcttgttacaaacggagaagccgggtcattcggaatcgtgttcttgttacatgtgatgttggctgcatctaagagcttttctacttccttacctgtaactcccttactgattaagtttacaagcattaagtggttgtctgtaccgccggaaacgatatcaaatcctctgttcattaatccgttgcagagtgcctgtgcattctttacaacattttctgcatacgtcttaaagcttgggtctaaggcttcctttaagcagactgccttacctgcgataacatgcatcagcggaccgccctgaataccagggaatacgctcttattgaacttgaacttttcagcagcttctgctgaacttaaaatcataccgcctcttggtccgcgcagtgtcttatgggttgttgttgtaacaacgtctgcatacggaatcgggcttggatgtgcaccacctgctacaagaccggcgatgtgtgccatatctaccattaaatatgcaccgacttcatcacagatttccctaaacttcttgaagtcaataacccttgcatatgcacttgcacctgcaataatcatcttcggcttgcactcttttgcgattcttaatacttcatcatagtcgataaagccttctgcggttacaccgtaaggtacgatgtggaaatacttacctgaaatattaaccggtgaaccgtgtgataaatgtccgccgcagtcaagactcattcccataacggtatctcccggctctaccatagcaaagaatgctgctaagttagcctgtgcaccagaatgtggctgaacattggcatattcacagccgaataacttctttgccctttctattgccagtgtttctactacgtcaacatactcacagccgccgtaatatctctttcccggatatccttctgcatacttattggtaagcggactacccattgctgccataactgccttacttacgagattttctgatgcaatcagctcgatgtggcttctctgtcttgcgagttcgtcatccatcgcttttgcaagatccggatcaaaacttgatacttcattgaatgaatacat

SEQ ID NO: 461 - DNA, 10588 bp, unidentified
  source 1..10588: mol_type = unassigned DNA
  misc_difference 7781: note = a, c, g, or t
  misc_difference 7782: note = a, c, g, or t
  misc_difference 7783: note = a, c, g, or t
  misc_difference 7784: note = a, c, g, or t
  misc_difference 7785: note = a, c, g, or t
  misc_difference 7786: note = a, c, g, or t
  misc_difference 7787: note = a, c, g, or t
  misc_difference 7788: note = a, c, g, or t
  misc_difference 7789: note = a, c, g, or t
  misc_difference 7790: note = a, c, g, or t
ttaccgaaggttacggctacgcttacggcggctcaggacagccccgccgagcagcaggacgctgatgcttcccagcgcgccgcccagagaggaagcgcaaccggaagcggaagaatccgccgcggtagtggtcggttcctgaagcgtgctgctgtcggcaccagcaccggaagttccggcgacagtcccggttgcagtgccgggaaccgactgggtagaggaatccgtctcagtgccggtcacgggttcagtcacaggttcggtggcggtttcggtcgcggactccgtctctgttccgccggaggtcggcagaggcaggataaactgcgccgagccgatccactcgccccggtcgaagctgcgcccccggacgatcaggcaattctcgtacagatagatgtagtagccctccgagccgacaatgccgacattggtcgcgatgcagctgtcatcccacaggtacgcgcaggacgcggtgctgacaacggaaggcagcgagccgtccgccggcttgaccgtatgcgcggactccattgtccagtggctgtgaccggagaacagcacgacctccggatactgccgcaggatacggcgcagctgagcggactgcttgacaccgtgccagttctgatactggaacgtgcccgcgacggtgtccatcagcccctgatgcaggaacaggaacgtgggacgcccctcgacgcgatcctttgccaatgtctcttccagccatgcaagctgtgcgttcgacaggtcggcgtgcagtcctgccgcctcaccgcccagaaatacaaagtggtaaccggaaatccaggtgtcgaaccagatggtttccgagctgtttccggttcccttgaggaagcgccggatctgccccttggcgtccagcccgccgtcaaagtcatggttgccgatggcacacagaacaggcggcagtccgtcgcctgcctgcgcgatgagccggttgaatgcctcatactcggcaacctgcccgtggtcagcaacgtctccgttgacgaaaatccccatactgttcggggaaatcgcccggatgtccgccagcgcctgggcaaagtgcttgttgtgcaggtggtcatccgagggattgatatggatgtcactcatgacctgcatctcgcccagcagggtaccgggatcaaaatccgccgcgccggcaggcaggagcgcctccgtgccggtcgcagagcaggcaccccgccgctgcgcaaaaacaagcagacggtcggctccagccgggatcagggtgttgtccgccagccgggtggtcgtggtagcgcccgtgcgggcaaaggtcgccgccgcgctccagccgggcagcacgccgtcggcatttgcccagtatgcaacataggacagcggcttggcactccccgcaccctcggtgacagtcagcttgccgtccgcacgcccggcaccaacgccgtcagatgtgtagacggcggaggcaggcgcatccggcacctgatccggcgccggcttcacggtaaatgcaacctgcgccagtacggtgtaaccgtcattggcgcacaggaacatgacataatccccggcaggaatctccaacagggaaccgcggtcgttccggaactccgcttcccgtatgttcttctgctcgccggacttgttaccgtcctgtgcgacatggtaccagtagatggacacctgcccgccgccgggaacaccgtcgccggcagcatacagtccgacccagtccgcaccggatccggtcgcggtcacaaggatatcctcgccctctgtgtacgtggttttatccagcgtcagcgtcccagcctccgccgtcacgggtactgccgacagggtggctgtcagcatcaggagcagcgcaagcagtacggctccggttgtctgtctgcgtttcatagcaaatcctccgcaatagttttatcgtttatgcgcagtattcagtcgttgtcggaaccggcaatgtgccgcgccacgaacacgccggacgccgaagcgtgcgagagcgagtgcgtcacgccggagcagtcgccgatgacatacagccccctgtggcgggtctgcagggtatggtcaatctcgacttccatgttgtagaacttgacctccacgccgtacagcagcgtgtcgtcgtttgcggtgccgggagcaatcttgtccagcgcataaatcatttcaatgatcccgtccagaatgcgcttgggcatgaccagactcaggtcgcctggcgttgccgacagggtcggctcgatgaatgcctcctcaatacgtccctgcgtactgcgctgtccgcggatgaggtcgccgaaacgctgaaccatcacgccgccgcccagcatattggacaaccgcgcaaccgattcgccatagccgttggaatccttgaacggctccgaaaaatgcttggaaaccagcagggcgaagttggtgttggcggtatgcttggcgggatcctcgtaggagtgcccgttgaccgtcacgatgccgttggtgttctcgttgaccaccacgccgtgcgggttcatgcagaaggtgcggaccagatcctggaatttctctgtccgatagatgattttggactcgtacaactcgtcggtcagatgagcgaacacctctgccggcagctcgacgcgcaccccgatgtccacgcggttggagcgcgtggggatctgcaggtcgcggcagaccgtctccatccacttactgccggagcgtccggcggaaatgacgcactgtgcgcccgtaaacacctggccgcggctgacgatggcaaagccttcctccgtcttgcggacctcctccaccggcgcattgaaatggaactccactttggcggacagctcctcgtacaggttcttcagcacgatatagtttatatcggttccgagatgccgcaccgaagcatccagaaggtgcagtccgttctgaaggcacatctttttgatgtggctgttggcagtggagtacagcgcggttccctgccctccgtgggaaaggttgatctcatcgacatatttcatcaggtcgatcgcctgctttttgccgatatactcgtgcagagtgccgccgaactggttcgtgatgttgtatttgccgtccgagaatgcgcccgctccgccgaagccgttcatgatggcacaggtcttgcaacccatgcaggatgtcactttcaccccatcaatggggcatttccgcctctccagcgggtttccggcttcaaaaactgctatgcgcagttccggtctgagtcgggacagttcataagcggtgaaaatgccgccgggacctgcgccgataatgataacgtcgtattggttctgatgattcatggtgggctgcctttctggattctatccgttctgttcgccaggtgcgccttggcacaacttattgtactttatcacagatatatcacaggaacatgacagaaatcaggacaatttgtaaatttacctacggtgggaagggctgccgatgccgcgcggggcaagccccgcgcggcacttgctatccctgccactgtggaaaacgcattggggggcttgccccgcgcggcatttgttatccctgccccgggggagaggaccatctcaaacgccgaagttcctctcccccggtcccccctctccttggctgccggcactaccaatagaaaggcggttctgacggttttgcgccaaactggcgacgccgaaggcaagcccccgccgggaaccataccggcagtgtctgtcagtgccgtaagcggtctgatgccggggtgccgggggctccgcccccggcaaaataaacttatagtctcccccttcccgctggaaaggggggtggagggatgggggcagacaaataagataaaggcagcgtcggcaggcgacaaagaaggtaagtcccccaccgggaaccatagtggcagtgtctgtcagtgctgtaaacggtctgatgccggggcgccgggggcggagcccccggcaaaataaacttatagtctcccccttcccgccgggaagggggtcagggggatgggggcagacaaataagctaaaggcaggataggcaggcgacaaagacggcaagccccccgccgggtacagcggtggcagggcgaaccggcgaaaaaagcggatcccgccaccgcaaaataatcgcaacaagggtagacaatgcgcaaaaactgtgatatactgtataggaaaacagagacacaggagaatataccccatgcactacacacaagccctgcgcggcttccaatgctttctttttgacctggacggcacactgctggactccatgccgctctgggacaaagtctacctgcaaacacttgcccactttggcatatccgttccggcagattacctcatgcatgtcaaccacctgagcgtccgcgacggtgccgtctatacagtgcagtcgctgggactggacacaacccccgaggagatcatccgcatttgggcttcgctgggaactgcggcataccgcgacagtatccagctcaagccgcacgcagccgacctgctccgcctgctccgggcggacggcaagacgctcggcattgccacagcgctgggcaaaggcttttttgagtcatgcctggcacggaacggcgtgctgtccctgttctcggactccaccagcgtggaggaggtcggcaggggcaaggatagccctgccatctacctgcgtgcgtgtgaaaaagccggcgccgcccccggcgagactgttgtgtttgaggacagcctgaccggtgcgaccagcgccaagcaggcaggcttttttgtggtcggtgtgtacgacgcttccgccgaggcacagcgcgccgacatgatccgcaccgccgatctgtacatcacggattaccgggatctgctgtatgactgaccgtaagcgtgccgccctcgcccggctgatgctgtttacaggcgcaatcctgtggggcagttcttacttcgtgctgaagaatacgctggacgaggtgccgctgttcctgctgctcagcatccggttctttttcgccggtctgatcctgctggctgtccgggcaccttacctgcgcagactgaaccgccgctgtctcggcaccggtgcgctgaccggtctttttctcgcgctggcatatatttttcagacagtcgggctgacgaacaccacgcccggaaccagcgcattcctgaccacggtgtactgtgtcctcgttccgtttctcagctttgcattcacgaaaagacgccccgacggctacaacatcgtcgcggcgattgcctgccttgccggcatcggtctgatcagtctggacacgggactgcgcttcacattttccggcgaagggctgacgctgatcggcggcgtattctttgccctgcagattgccgctgtggaaaaatggtgcgcagacgaggacgtcatcctgcacacagccatccagttcctgacggcgttcgccgtttgctttgcctgctcgctggctacggaaacgccaaccgtgaacttttccgggcgcacgctgctggcgctggtctacatcaccgtcttcgtaaccgcgctcgcctttgtgctgatgaatatcggcatcaaatacacgaccgcaaacacttcgtcactcatcctgagcacggaggcggtgttcggcgtcgctttctccatgctgttctatcgggaacgccccagcctgcaggaaatgatcggctttgccgttattcttgccgcggttctgctgagtgagctgaaaccgggcaaaaagacccccggacgctgagcggctggcgtccggggattggatccgggggagatgaggggagccggcaggcgggaaccgccatcaccccttcctccacacgaagcgattcacgacctcggtgtagctttggatgatgcgggcaaccttcacagacacattttcggcagtataatccggcacgggcgtgccgatactgccgtttttctgcatacttacggcaaggtcgattgactgcagcagctgctcggtccggatgccggcaagcacgaagcaccccgcgtccagcgcctcggggcgctcggtggacgtgcggatgcagacagcggggaagggcttccccaccgacaggtaaaagctgctttcctcaggcaatgtcccgctgtcggatacgaccgcaaacgaatgcatctggaggcagttataatcgtgaaatcccagcggttcatgggcgattacgcgcggatccagccggaagccggttgcttccagccgtttcctgctccgcggatggcaggagtagagaatcggcatatcgtacttttcagccatggcgttgatggctgtaaacagtgcggcgaaattggcgtccgtgtcaatattctcctcccgatgggcagacagcaggatgtactgccccttggtcagccccaaacgctgatggatgtcgctcgcttcaattctctccaggttggctcgcagaacctccgccatggggctacccaccacaaaggtgcgttccttcggcatgccgcactccatcagatagcggcgtgcgtgctctgaatagcagagattgacgtcgctgatgatatccacgatgcggcggttggtttcctccggaaggcattcgtccttacagcggtttcctgcctccatgtgaaagatcgggatgtgcagtcgctttgcaccgattacggacaggcaggagttggtgtcgcccagaaccagcaccgcatccggctttacctgcaccatcagcttataggagcgctcgatgatgttcccgattgttgcgccgaggtcgtcacccacggcatccagataatagtccggcgcccggagaccgaggtcgtcaaaaaacacctgattgagggtatagtcatagttctgaccggtgtgtacgaggatctgctcgaagtaccggtcacagcatttgattgtggcagacagtcggatgatctccggtcgcgtgccgacgatagtcatcagcttcagcttccccatgtctaatgtctacacctcctcaaagtaggtatccggtcggttcggatcaaagcattcgtttgcccacatgactgttaccagcgtgtcggtatcgctgaggttcgtgatgctgtgggtataccccggcagcatatggacagcctcgatgcgctcgccgctgacctcgaattccagaacctcatccgagtccagccggcgttcgcggatcagtccgtgaccggcaacgacaatgaaaaactcccacttgctgttgtgccagtgctgtcccttggtcacgccgggcttcgtgatattcacggaaaactgtccgcagttccgcgtcttcagaagctccgtaaagctgccgcgcgcgtccgcattcatctgcaggggaaacgcgactttttcctgcggcaggtaggaaagataggtggaatacagcttcttttccagactgcccgcaggcatatccggaagcagcagcgtctcgggctgggctcggaaactgcgcagcatcgcgacaatcctgcccagtgtcacgcggtgcgtcaccggcacatggcagaagcgctcaccgggaaccggcgtcagtccgtcatactcgcaacggtgtgcctgcccggacagcgcgcccagcagttccgcaaccagatcgtcgatatagagcagctccagctctgttgccggatcgctgaccgtgatcggcagatcgcgggcaatattgtggcagaaggtcgccacggcagaattatagttcgggcggcaccatttcccgaagacattggggaagcggtaaatcagcgcctccgcgccggtttcggcggcatgggcgcgnnnnnnnnnncagccgctcctcgcaggcacgcttggctttgccgtattcactgcctgcgtaacgcccgacaagcgacgcctgcgccgagcttgccagcatcacgggacagcggttgcctgcctgcttcagggcggtcagcagtatttccagtgagccggtgttgccggggaggtattcctctgccgttttcgggcggttcacgcccgcgagatggaacacaaaatccgctgttttgcagaaatcggcaagctgctccggtgtgttgtcggtatcgtacccgcagatatcccggatttccagttccggatgggtgcgatccttgccgtcgcggatagctttgagcgcctccgtcagattcttccccacgaatccgcgcgcacctgttatcagaatgttcatcagcaggaacctccgaacagcctgagcttcagcagtaattgcttcatttcctccacacacagccggctggtattgtgggaggtgtacgccccgatcctgccgagttccggatttcccttgctgaaatagttgtcatagttcaggttccggttgtccgccggaatgcggaagaacccgggcagatcctccgcccgaagcatctcctctgccgtcaccagcacctcaaagagcttctcgccgtgccgcgtcccgatggtcgttatgcccagatccgcatgcttcagctccagcaccgcctgcgccaacgtcccgatggtcgcggcaggggctttctgcacgaacaggtcaccctgctcgccgtgctcaaaggcgtagagaacaaggtcaacggcatcctccaacgtcatcatgaagcgggtcatatccgggttcgtgacggtcaggggctttccctcgtcaatctggtcgcagaacaggggaataaccgaaccgcgggacgccatgacattgccgtaccgcgtcaggcacagaacgggatcccctgccagcatctgccgggagcgggcaatcacattcttctccataacggctttggtcatacccatggcgttgatcgggtaggctgccttgtcggtggacaggaagattgccttccgcacatggttggcaacgcaggcagagatgacattgtccgagccgaccacgttggtcttgaccgcctccatggggtagaactcgcaggatggcacctgcttgagcgcggcggcgtgaaacacgtagtccacgccgcggaacgcgtttacaatcgaggtataatcccgcacatcgcctatgtagaaccggattttctccgcatactccggcatggtggtctgatatgtatgccgcatatcgtcctgcttcttctcatcccgtgagaggatgcggatttccgcaatgtcggtggtcaggaagcggcgcagaacggcgttcccgaaggagcctgtcccgccggtaatcaggagcgtttgattctggaaggatatcatctggtcttactcctctgtgtgattattttttggaaacgccggttgcttgcgggcgccgaagcggtgccgctgccccggtcagcgttcccttgctttccccggcagtacgccgcgcaagagaacggcatccagcatcagttttgcgttcggacgcagtgggcggatcagcgccggaagcaggatcgtggtggatacctgcgtaatcagggatgccgcggcagccccggacgcgccccacagggggatcagggcaaggttcagcacaacgttgagcgcggcggcgctgatgtacagatacttgaggtacttctgctgattctcgcacaccatccatgcgtttctggcaacgccgagataggagaacgccgtgtaccagaccacaatgcgcaacggcatgacagccgccaggtatttctccccgtacagagtcacaacaaagggctttgcaataaggcatatcagaacggatacgaacagggatgcatatataacgattgcgtagagctgtcggttcttcctttcgtagcgcaggcgatccttccggaagctctgcacgatctcggggtaaagcgagtcaatgaccgccgagagtaaaaaagcccacgaaacgctgaccgttgaggcaagagagtaatgcccgacggcatcagccccgagcatctgcttgagcatcagcttgtccgtgcaggcgtaaacagacaccatcagaccggcgataatgaagctgtaactgctttgcaggagttcccttgcctttttcaaggagcaacaaaaccgcaccccgccgttccggaaataggcaatcagcaaaaataccgccagcacgatgtaatccagcgcgcttgcaacggcgaaccactccacgctttttccgagcgccagcagaataatcttgtacgcggacatcgccgcatacgacaccagctcggcaatggcagaatatttggactgaagccgggactggaaccaataattcagcgtatcaaatacctggaagacaagtccgatgctgtacagtgccacgaccgcaacggtcagcggctcccccttgtccacaacgcttacgatgccgacgatagtcaaagccgagaacaggctggaaacagcccgcagaagcagggttgtcccgattgtttcgccttcctgctccggatgatccacgaagtttttgacgaggatgctgttgatgccaagcgtgcagagggaggcaaaaaaggtcgcatacgccgccgcgtaattgatcagaccgtaattgcccggtcccaggtagcgcgccgcaaaaacaccgaccacaaaagccagcagtttgtttgccaccttgccggctataatccagcccgcgtttttgacgactttattctttctgagcgtctgtagcaa

SEQ ID NO: 462 - DNA, 7509 bp, unidentified
  source 1..7509: mol_type = unassigned DNA
ttagaaatctgttaaatcagcagctcttctctctaagaaagcagtcataccttctgttttgtcatgagtagagcaggttacgccgaataagtttgcttccatctcaacagcgttcttgatgtccatatcataaccgttgttgattgctgcttttgcaacggaaacagcgtagcttcctttggagatgattttcttagccatagcttttgctgtgttcattaactcttccggagcaactactttattaacaagaccgatgcggtaagcttctgctgcatcaacggaatcgcaggtaaagatcatctcttttgcgcgtcccatgcctactaaacgggcaagtctctgtgtaccgccgaatccaggaatgattccaagacctgtctctggctgtgcgaaagtagcgttgtcagatgcgatacggatatcacatgccatggaaatttcacatccaccgccaagtgcaaaaccattaacagctgcgatcgttacctgacgcatgttcattaatttgaagaatggtacggaagctctcataccgaaagctcttgcttcagctgcggtaaagtttaccatctcagaaatatcagcgcctgctacgaaagatttgaattcgttgcctttcttgtcaggaccgccggttaagattacgactttgatgtcgtctcttgcttcgatctcagttaatgctgtgtttaactcgtctaatgtctcgctgtttaatgcgtttaatgctgctggtcttgaaattgtaagaacagcaatctcctcagcaacttccagttttaaattgttaaaatcgctcatcgtttggaaccctcctgaatagtttgataaaaaattaacaatatacgttattaatagcgtacagcttttccctgaatttgtcaatagattatgggaaaaattcactataaatttggtagaaaaagtgctatgataggtggtatgatattttgacaaagacacagaaaagaggaaaaaccatggacacaagcaaatcatacttatctaaggtagtaaaggagatgccggattcagggatcaaggacttttttgatattgcaaatacgatggagggagcattgtcacttggtgtcggcgagccggattttccgacaccggaacatgtcagggaggcagcgattgcttcaatcaaaagaggtgagacaaagtataccgataatcgcggtacggtcgaactccgtgcggcatctgcagagtatctggaaaagtttggacttcattatgacagagaaaatgaaattctgatcacaatgggggcgagtgagggaatcgatcttgcactccgcgcactggtggatccgggggatgaggtgttagttgtagaaccttgctatgtttcctatattccgtgtgtggaattgtgtggcggcattccggtttccatcccgttaaaggcagagaataaattccgcctgacgaaggaagaacttgaagaaaaaattacagataaaacaaaagtactgctgatctcattccccaataaccctaccggagcgatcatggaaaaagaggatttagaagcaatccgtgaggttgtgaccgcacatgatatttttgtgattacagatgagatttatgcagagctgacctatggcaaaaagcatgcatctattgcggcgctgccggatatgtatgagcgttgtgtggtattaaatggtttttcaaaagcatttgcaatgaccggatggcgtatgggtattgcagcgggtcctgcggaagttatttttcatatgaataagattcatcagtttacgaccatgtctgcaggaacaacgtcacaggtggcggcgcttgaagcactgacgagtccggttcgtgacgaagagatcgatgtgatgcgtaaagaatacgatgagagacgaaagatcatggtggacgggttccggaatatgggactggatgtgacagaaccggaaggtgcattttatgtattcccgtcgatcaaaaaaacaggacttaccagcatggaattttgtaaccgtctgctgcaggaacagaaggtggcagtcattccgggagacgcatttggaagttgtgcagagggttacatccgctgctcttatgcttattccaaagacattattaagaaatgtttagagaagatcgcagtatttgtcagccagtttgacctcaaataaggtactggtttgaaaaaaataagcgcagacatgaaggctgctatataacaaagaaagtttgagacatacatgttaaaagattacgacttaaagcaacttgtatccccattattgcaatggtttttaaatcatgcccgtgtattgccatggcgagaggaaccgactccataccgggtgtgggtttcggagatcatgctccagcagacgagagtggaggcggtaaagccgtattttgagcggtttaccacggcactgccggatgcaaaggcacttgcagtgtgtccggaggatgaacttttaaagctttgggaggggttaggttattataaccgtgtcaggaacatgcaaaaagcggctgtggaagttgtggaaaattatggtggacaacttccggcagattatgagaaactgttgaaactaaaggggatcggccattatacagcgggagcggtcgcatctatcgcatacggaatcccggttccggcggtcgatggaaatgtgctccgtgttttaacgcgcgtttctgcggatgatacggatatcatgaaacagtcattccgtaatgagatggaaaaattattagaaaaattgatgcatggggcagacggcagaaatgaaaaaaatgtatttccatggatggaggatgcagatgatctgagggcaaaggtatatcatcagaatcttgccggtgcgtttaaccaggcactcatggaacttggagcaacgatctgtgtgccaaacggtgcaccgctttgtaccgaatgtccatggaaggatttttgtgaggcaaaaaaacaggaactgatcggacagataccagtcaagagcaaggcaaaaccgcgaaagatcgagaaaaaaacggttctgattttaagggatgatgagaaggttgcaatccggaaaagaccggcaaagggacttttggcaggactgtatgagcttccgaatgtggaaggaaatatgggacaggaggaagtactttccatggtaaaagagatggggtatgcaccgatccgtattcagccgttaggtgaggcgaaacatattttttcccatatcgaatggcacatgacaggttatgcagtccgtgtagaggagccggaaatgcatccacaggtgcagtgtgaaaaaaatcgtgcagatggattattatttgtggaagcagaagatgcaaaagaaaaatatgctattccgtccgcttttgctgcgtatgcgaaatatatgaacattcttcttggaaatgaaaagaaagcttaaaagaaaatatttataaaaagagggagccggtgcaacagcaccggctattcattatgaaaaagagtgtgtatgaaaagtgaagtaattcactatttgctgggaggaaccttgcttatcggataagcaaggctacctgacttacatcaggtatgaaaaaaagttctatgaaaaattttaacttgttgccttaactttgaatttagtatatcggggaattgtgaccgccgtatgccctgtttgtgagaattatgtaaataaaatatgaacaactacatactttggcagaaattaagaatatctaaagaaaaatttgattggtttgcggtaggaaaatgtgtataatagaatggctatggtaaaacaaagtggaaaacaaagtggaaaacaaggaggattacatgtacgattgtatcgtgatcggcgcaggaattgcgggtgctgtcagtgcgagaaagcttgcagaggaagcaggaaagaaagtactggttttagagagacgcagtcatatcggaggtaactgctatgatgagccggatgaacatggaatattaatacataattatggaccacatatttttcatacaggaatagaagaagtatatcagtatctctcaagatttacggactggtatgcattcggacatgaggtggtagcaaaggtcggggatcgtctgatcccggttccgtttaatttaaatacgcttcatatggtatatgaaaaggaaaaagcagatgcattagagcagaaactgattgctgcatacggagagggaagccgcgtgccgatcatgaaactgcgggaaaatgaagatccggacatccgcgagatcgcacagtttgtgtacgaaaatgtatttttaaaatataccatgaagcagtggggacaaaaaccggaggatatcagcccggaagtgacaggccgtgtgccggtgctggtttcttatgacaaccgctattttcaggacaaatatcagggagtgccgaaggaaggtttcacaccgatgtttgagcgcatgttagaccatgagaacatcacggttgagacaggtgttgactgtaaagagagattgcgttttgaagaaaatcagatttattttgatggaacaccgtttgacggagagattatctatacgggcgcactggatgagttgtttgactgtcagtttggaaggcttccatatcgttccttaagatttgactttgaacattatgagaaagaatcttatcagggacacagcgtggtcaactacacggtcagtgaggattttacaagaatcacagagtttaagtatctgaccggacaaaagaacacggacggaaccacaatcgtgaaagagtatccgtttgcctacacaggagcggagggagaaattccttactatgcgatattagagccaaagaaccaggaactctatgaaaaatatcgtgcgcttgcaggtggactgccgcatttttatctgctcggacgactggcagaatacaaatactataatatcgatgcgatgacgaaaaaagcgatggaacttgctgatgcgatcatggcagaaaatacaaaaagataatcggaggattcatatatgaaattactgacatttgcgatcccgtgttacaattcacaggattacatggaaaactgtatcaaatccctgctgccgggtggcgatgatgttgagatcctgatcattgatgatgggtcaaaagacagcaccggtgacatagcagatgcctatgagaagaaatatccgggaatcatccgtgcaatccatcaggtaaatggaggacacggagaggctgtcaatgctggaatccgcaatgcgacaggactttattttaaagtggtagacagcgatgactgggtagatgaggaggcttataagaagattttagataaacttcgtgagctgaccggcggcaatcagaccctggatatgtttattgccaattatgtatatgaaaaagaaggtgcgcatcataaaaaagtgatgcactacacgaacctgccccaaaatcagatttttacctggaatgatgtgtcacgtttcagaaagggtcagtacattttgatgcattctgtgatttatcgtacaaaactgctgcgtgaatgtggattagagctgccgaaacatacattttatgtggataatatttatgtgtacaaaccattaccaagtgtaaaaacactgtattatatggatgtagatttttaccgttactttattggcagggaagatcagtcggtcaatgagaaagtgatgatcagccgtatcgaccagcagatcaatgtaaataagattatggtagatgaatttgatctctggaagattccaaaccgaaaactgcgtcattacatgtttaattatctggaaatcatcacggtcatttccacgattatgctgatccgctccggcactgaggaaaatcttctgaaaaaacgtgaactgtggaaatatattaaggatcacgacatccgtttattccatcatctgcgcgctggaattatgggaaatgcaatgaatctgccgggcaagggaggcagaaagatttcggttgcggcatatcgactgtcacagaaagtggtcggatttaattaagaggtagtgagagtatgagtgaagaaaataactggaattatggaaatgatgagccgaatgtaaatcagggaaatcctgtcagcctggagaaaagtacgactgatggtacagcaggtgtaaatttagagaagactgtgaccggaaatgaagagcgtgtaaattcagaaaagactatgacagacaatccgtattatacaaatacgtcatatggaaacggcaatacaaattataattacggacagtcaaatgacagtgcaggttataactatggacagtcaaacggaagtacagaatataattacggacaaccggctggcaggtatggaagtaataagtcagaaagtgaaggctttggtattgcgtcgttagtacttggaatcattacggttttgctgttctgtacctgtatcagctggatcaccggtattcttgcgattatttttggtatcatacagcttgtaaaaggaaacaaaaaaggaatggcgatcgttggtttgatcacaggtggaatcggttttgcagcatcgattattctgtatatcctgattttttttacaggacttggatcttatagcagctataatgacatctatgatcatatttacgatgatatctatgatgatattgaagacagtatggatgacggaacgatataataagactgccgagcgaagcgagtgtagatcacgatcatgatatagaaatttttaatggagagggttatggaagagttattgacagtcagtggattatccaagacatttcacttgtcaaaaaaacagcagaaattagaaaagacaacggaaaaagtgaaggttgcggtggatgatctttccttttgtacttacaggggggaagtttttggattattagggcccaatggagcgggaaagacaacaacgcttcgcatgttagcaacgctgatcaaaccggataaaggtgatgcacggatcgatggcagcagcattgtgacagatccaaacggtgtgcggaaaaaaatcggatttctgacgagcgaattaaaactggaagaattttttactccgaactatctgtttgattttttctcagaattatacggtgtcgatcaggcagagcgggatgagagaaaacgtatcctgtttcagaaatttggtgtggatgagtttgcggaagtgaaggttgcaaatctctccactggtatgaaacagaaagtatccctgatcatttcactggtgcatgatccgcagatcattatttttgatgagccgacaaacggacttgatgttatcacggcgaaggttgtgaccgattttctgcaggaattgaaagcagaaggaaaaacgatcattgtatcaacacatattttttcactgatcgaaaagatctgcgaccgtgtcggcattatcatcaacggaaaaatggttttgtgtgacacgctttcccatgtgacggcggaaatgccacttgaggataagttctttgaaatctatcgggaaacggcaggtgagatcgcatga

SEQ ID NO: 463 - DNA, 23925 bp, unidentified
  source 1..23925: mol_type = unassigned DNA
taatgtatcaaggttacgaggatcgatcatagcaactgcctcttccggagtcttatgtccctcgtctactaaatcgcaagcgatcttaagtgcagccggagctgttctcttaccgttacggcactgaagcatgtataacttcttgttctcaacggtgaactccatatcctgcatatcatgataatgattctcaagagtctcacaaacttttaagaagtctgcatatgcctcagggaattctttctccatctgagcgattggcataggtgtacgaacacctgcaactacgtcctcaccctgtgcattgattaagaactcacccatcagtttgttctcgccagttgccggatcacgtgtaaatgcaacacctgtaccggactcgttatttaagttaccgaataccataggcattacgttaactgcagtaccccaggaatatgggatatcgttatcacgacgatatacgtttgcacgtgggttgtcccatgaacggaatacagcctcgatagcaagttttaactgctcaacaggatctgaagggaaatctgtacctaactggttcttgtactcagccttgaactgctctgctaactcttttaagtcagctgctgtaaggtcgatatcaaatttaacgcctctctcttctttcatcttgtcgatgagctgctcaaagtattttttaccaacttccataactacatctgagaacatctgaatgaaacgtctatatgagtcatatacgaaacgctcgaatgcaggatccggattacctttgatcattgcagcaactacttcgtcatttaaaccaaggtttaagatggtatccatcatacctggcatggaagctcttgctcctgaacgaacagatactaataacggattctcaagatcgccgaatttctttccgttgatctcttccattttcttaacgccttccatagcctgagccatgatctcgtcgttgatcttgcgaccatcttcatagtactgtgtacaagcctctgttgtgattgtgaatccctgtggtacaggaagtccgatgcttgtcatctctgcaaggttggcacctttaccgccaagcaggttacgcatggtcatgtcgccttcgctaaacatatacacccatttgtttgccattttgataattcctcctaaaataaattactatgtaattatggacaccgtatttgtttccataatcaagccatgttatgtgcctttctaaaacgcacatatttattctaacatattttgtctaaatagcaacattttttttactgtttttccctgtttttttgtaacattttcacaatgtaaaactttgttccgttatgtggaacattttggatttgtttatttctttttccattttgcatacagtgtgattttccccgtgctgcctttcttaatagaggttacctttctggtacattttttatcacggtaccatcctttaaacacatacccttttcttgttggtgctgccagttttatcatctttgaagtaatggtatatgttttcggatttttcttattatttttgcctccgtttaatttgtaggtaatggtgtacttttcctttgcccattttgcatacagtgttacttttccggtactgccctttttaatagcggttacctttttggtacattttttatcacaataccatcctttaaacacataccctttttttgacggatttgaaagttttatcgtctttgaagtgattttatatgttttgggattcttcttattatttttgcctccattcaggttatatgtaatctgatactgtgctgctttccactgggcatataaagttacgacctcatctgcttttttgtcagattttttacataggcattttcctcataaaaggttcccttcccatctggctgcgtattccagcctgcaaatgtatatcctttcttttcaaacttattttttgaaagtttttccttctgacccgccgcacatgctttctcactcattttcccttttgctgcaccatttccatcaaattttattgtataaagatatggacacacgacaaccgggacattcctcttaaatgcttctgcattgattttatctttggagagactggttattacatatattttttcaggtccgtctgtcgtttcccaggaaaatgcttcgctgccaatctctgtaatcgtctttggcagccttatcttcccaagcacgccgccgtccttataaaacgcacagattccaattgtttttaccgcggtctgggaaagatcaagttcccccgttaaatttttacaggataaaaaagcataactgtcaatcgccgttaatgttttggggaatttcacggtttttaatccactgcaggcagaaaatgcactaccgcctatttctgtaaccaaagtctgggataaatccattttctccagtgaactgcagcctgtaaatgtgccaaatccaattttcgttatattctctggcaatttcaccgtttccaatgcactgcacccctcaaatgttccttccaattccgttatccctgtctgggacaaatctgcttcttccaacagcgtgcagtctgcaaacacacccgctccatcattcacttccagcacgtcaatatcttcaaatccgccacactttacctgacggatgtttttattttttacagcagctaagtcgaaataccagtttcctctgctccatctataagaaatcagactgtaatacaatccatccttcagcaagccatcaactctatatatctgatgatttgataattctgcaatctcctccggggacaggtcaaaatacccgtcagaatacccctgatactcccattctttatctaccgaataagagttgcggctgcaccatgtagcatctgcaaaaatccattttccattttcactgtcataaacagcattgtattcatgggcatgcccctctaaatccatgcacggaattccaatggaaatgcacaatgttctcataaggcttgcataacccgaacacatagcacgcttttgctcgtacacctcatacggtgaccaataacttggcttattattataataggcataataatcataataagttctgtccgcaacaaatgccataatcgcttttattttctcatactgtgtagtacacccggctacagcctgtaatgcagcctgtcttaattcctcaaactgggcatctgttatagcattcctttcaggatctgttaaaaagtaatccgggtctgcatatttattaatcagagtccaggccttctgttccgctgcaatctgctcttcacttgcgtcccccttgattgaagtttcttcccgttcttctgtttcttcttccatttccggcagttctgtttctgtgtctggctgctctgtctcctccggctgttcttctgtgtctggctgctctgtctcctctgactgttcttctgtgtctggctgttctgtttcttccgactctggctgttccgtattctcccgtttctcctgttcgcctgcctgtgtctcctgacgttcacgatccatcagatccagttcttccgtatccgcatatttttcatttactttctctgatgccgattccgctttttctgtctctgcaatcacattcgcctgcatatttaccggcatcccaccaaccaaaacagtcgcagccagcaatgccgtaaaagcttttttcatccttcctttcataaactaaaactcctccttcatttgtaccgctatgttacattaccttttctatattataaccgcaatacgactattttcaattgtttgcgaaatcatttctatcatatctccgcagactatctgcctgtacatacttcaaaatatttttcttctcctccgcgaggtgcgcatcccgcccggagggcgttttcattcataggacgtaatttcctatgaatgaaaaacagacggatcattcccacccaacaggaataatccgtctgtctttttctttttattctccgcttcgaaaaatcctagaaatctacttccgtgtcatagtaacagcatttcaacagcttttccatctcctcctggctcggctgtctcgggtttgatcctgtacatgcatctaagattgcattggctgcgatctccggcagtctctctaagaacacttcttccggtacaaagccctgctcggtcggataactgtctgcaccataattcttaatacagtgcgggatcttcaaatcatcattcataccgcgcaggtatttgatcagaagttccactttctcgtctaatgaatcaccgccaagtcccatgaaatctgcgatctcaccataacgtttctttgcagtttcatctttggcgttaaatgcgatcactttcggcagatacattgcgttggctgcaccgtggatgatatgtgcgccgtaatccgcaaatgcagcaccggtcttatgtgccatggaatgtacgataccaagcagtgcattggaaaatgccataccggcaagacactgtgcattatgcatgttatctctcttttccatatccccgttataagatcctaccagatcacgctggatcatcttgattgcatgcagggcaagcggatctgtgaaatcacagttcgctgtcgatacatatgcctcgattgcatgtgtcatcgcatccattccggtatgtgctaccagtttctgtggcattgtctctgcaagttccggatcaacgattgcaacatccggtgtgatttcaaagtcagcgatcggatatttgatacctttctcataatcggtgatgatggaaaatgcagttacctctgttgcagttcccgaagttgaggaaatcgcacagaaatgcgctttcttacgaagttttggaataccaaacaccttgcacatatcctcaaatgtgatatccgggtattcgtatttgatccacatagcctttgccgcatcgatcggcgaacctcctccgattgcaacgatccagtccggaccaaactcttccatcgcctttgcgcccttcattacggtctccaccgatggatccggctcaattccttcaaaaagctgtacttccatgccggcttcttccagatactgttttgcgcggtcaagaaaaccgaaacgtttcatggaaccaccgcctacgcagataatcgcctttttgccttcaaacgtctttaatgcttccaatgccccttttccgtgatacaaatcgcgtggtaatgtaaatcttgccatctttcctccaatctgccgccatcaaaaggccgcctcctgacacatacacatgcctgtattttttgtgtcatttactgtgtgcaacttttatataaccatcacatattttgttaattaaataacaatatgtatggtaacattatatcatatctttcaaaaataagaagcatttttatacatttttaataattcttaatattttctaagcattgtttttaaatccacattttggacagatatttcctcccttatatacataaccacagcggaagcagcagatcgtatcatgtttttctttcgccagataagaaatatttcgcgaatccggtttttcctgtaaataatgaataaattcattcaataccccggcatatgccgtgagctgcttattttctaccgcatatggaattttcgtctttttcccatttttctctgtcacatacacaccacggtttaaaagtcctgtggatgcagtaatctcatctatggacggaacatcaatacggtaagatgtcatcagtgtgctgtaatatagatgttccggtgtcaggataatcccctcttttccactgttgtttctcgatgtgtccaccacaaaaatcggatattcaaacagaccgtttcctgcggcataggatgccatggcataatcgataacctctgtttcctgcggcgctgcctgctttaacagcacttttctcgccgggtaaaaataatgtttctggctttctgtgattcccgcctcttccagttcatttttcagcttatttacaagctgttcacactcatccgtcttgatcttggaaagacgcctgcttaaaagttctaatgcattatcctttaaatccggtaaatatggtccttctgcaatcttctgatacgcatccattccctcatcaaaggacatgtgtgccggatcaccggtaatttctgcgatctcattttcatccatctgacggattttattctcgatctgctcaaaatacggcaaaaccagccccggctcaaactccttttctttcagacgctccttaagctctgtcagatcatctctggtgatttttctcgactggcggatcatattttttatttcctgctgttcggcaagatttttctgcgattctaaccgttcctgatatggggttaaatctactccttcgtattcttttaatttctcccgaagtgcatggtaacgtgccctgtccatattaggcggcattttcccaaccagctctgcgacttcccgctctgcctgtgtctgcattttctgtttcagatttaaaagcagattctgttttttctcctgcggcagcttttcctctgcaatctcgtcatagacacggcgcatcacggcataatttttatctgcgcagctctctgcctttttatttaacgcggcaagctttctgtcctgttctttttcctctaacatatccaggtattgtttccgctcttcgggcgaaattcttgtttcatgcatgagctggtgttttaattcggaaagctggcgctctgacatacggtctgcgactccaaatttagcctgataagtctcgcggactttctgtgcctccgcattatttacctgtgcatatttttcatcggacgattccccgccgatctgcccagcttcgtgcggctgcctgctgtcactctcatatcgggaacctttcacatggcgtcgttcggtttcatcctgacgtgcatcttcatattgctttttgtgctcgttccgcttccatccactttcacccgcgctttcatttccatgctgtttttctgcgtgccggttcttgctctcatcctgctcttcttcatcatctgtgacttcgtcctgatctgatgcaggcgtactctttaactttttacgacgctttttttcctcctgtatggcaggttcgcaggctgcaatactgctttccgggaaaaacccctcttctatcttatttaataattcctcaaagtctgcatctgaatattccggcagatcctcgcacagttcctcaagtggctgctgctcgtcctcgacacccgccggctttctgccgtcctcatactcattataacggctgtttgcctcatgctcgccgttacgccccatcagctcaagataatcttcgtatgcctttttatcctcctcaaaatccatcagataaatatcgccgtctccaagaagtttccatgggcgcggcgtataaaatctgtgacacgctgcacaggtacatgcttttgccaaaaggactactccctcaggcgtctcgattcgaaactcttttcctttcggatacatgatcatatgcagatttcctttgcattttgggcagcggtaaccaactttataaaagttattgccaatcctgccttttgctctttctgacagtgaaagttctgttctctcaaaaacagtatgcgccatcttccattcaactttatgccagagtccctgttcctcgtctgcttcctcttccttctgcactgcttcttttgcctcaagtgccgcctgtatcacatcttcataggtaatacgctttcctgcatgataaaaacgaaaatactgcgtggtatattccggttcaatatagattcctgcaagcacatgcccgaaaagagtattcagctgctccgtatttttttccacacgaagtccctggatcgttccccattttccaaatgcatacaggatcatattgatcacatcccgtactgctgcctcatcggtatctttgatctcatcttctttgatcggcagatctacaatattttccgccacttttctgctgtcaaaatgaaaaaacagggagcgcacttccccctgtaaaatgagataattatcaagtgccacaaaaagacctgtccagtttacatttgcatgcatggtctttatcagccgttcaaatgtcatttttaattcgctatctgcttttaatacgatcacttttttcacctcttacttttcaaatgcagatttttccttcaagatctgtgcaaatcccatatgaagttcttcttttgcccactcaaaatcaatctcctgattgctgtcattcaaacagacgcttccactcttctgatgacctatatcagccacaatcctgctgttatcatttgagacatcataataccggcagagtcttcttacattgccgggaacaaaaccgccagtcagtttctgatactccctgagcacatactggctgacatcctctttctgacggaatttatggctgcacacctcgtttaacaactccggttctaattcccacattttcacaaaagtactctttttaaaaggagacggcccatgaaccgtgtaaaatcctgtaaacaacgggaacgccagttctaacatattataaataaaatacataaacggataaccgggatggaaatatgctcccggctgttttttcatattttcacgtttgtcaaaatattttgccagaagcatggtattattcaggtaaatatatggcatgacctgatcttttgtatttgccacatcaggctgaagagccagcatatccaccggaagatcatttttaaaatactgttccggtctgaccttttttatcagaaacatatcatcattaaaatatacaaaattctctgccagacctgggattctgtgcatattccactcaatggcatgtgaattaaatgtcggcagatatttttctggaataaaatctttatgatttacaatatttaacttcggatgttctttatttaaccaggatggcagatgcccccatgtaacaaagtgtatcctgcgcacccatggtgcaaaacgctccacaccacgaaaccagtacctcagcagatcccagtccctgtatctctcttttctgtcatcctgtttctgcgacagatccggctgtatactgtactccattttctgtttctgccagtccggatcattgccatctacccatgtgatcacaaaatcaatttccggaatgttattgtcgcgtgtcataataatctccatttctgcccagcaaacatctttttcatctgcataataaatttcactgttatcatgataaaacaaatcctgcaaaatgaaaatcccatttatctgcttaatttatatttttttaagaaatactggtttttccctgttttaaggcatttccgtttcttttgttagcactcattaaaaaagagtgctgattttctattgacttttgaaatttgcggttataatattagatttaggcagcagcgaggcggatctgcccactgcattttattacgattataaaggagtgtttgaatatggcagagaaacatggaaatctttcaattaacagcgataatctgttcccgattatcaaaaaatggttatattccgatcacgacatcttcttccgtgagctgatcagtaacggatgtgatgcgatcacaaaattaaaaaaactcgaaatgatgggcgaatatacattaccatctgactacaaaccggagatccacgttgttgtaaatccggaagaaaaaaccttaaaatttatcgataatggtcttggtatgaccgcagacgaggttgaggaatacatcaaccagatcgcattttccggcgcaacagatttcattgaaaaatacaaagacaaagcaaacgacgatcagatcatcggtcacttcggacttggcttctactccgcattcatggtagctgatcaggtaacgatcgatacattatcctacaaagacggcgcaacggctgttcactggtcctgcgacggcggtactgaatttgatatggctgatggcaccaaagaaggcgtcggtacagaaatcacccttttcttaaacgaggattccgttgaattttccaacgagtaccgtgcaagagaagtcatcgaaaagtactgctctttcatgccgactccgatcttccttgagaaggcaaacgctgagacagaatatgagacgatcgacgccgctgataaattagacacagacaccgtcgttgagacgatccatgaggaagcaaaaacagaggagaaagaaaacgaaaacggcgaaaaagaagtcgttgaagtttctcctgcaaaagataaattaaagatcgtaaagcgtccggtttcattaaacgataccaaccctctctgggcaaagagtccgaacgaatgcaccgacgaagaatacaaagcattttaccgcaaagtattcttagattacaaagaaccattgttctggatccacttgaatatggactatccgttcaacttaaagggtatcctgtacttcccgaagatcaataccgagtatgattccattgagggaaccatcaaactttacaacaatcaggtatttatcgccgacaacatcaaggaagtcattcctgaattcttaatgctcttaaaaggtgtgatcgactgcccggatctgccgcttaacgtatccagaagtgcactgcagaacgatggttttgtaaagaagatctccgagtacatcaccaagaaagtagctgacaagctgatcggtatgtgcaagacggataaagaaaattacgagaaatactgggacgacatcagcccgttcatcaaattcggctgtctgaaagataccaagttctgtgacaagatgaacgattacatcctgttcaagaatctggatgacaaatatctcactcttccggaactcttagtcaaagaggaagaaaagaaagacgaaaacaaagatgaagctgaggtattagatgctgacggcaatccgatcaaaaaggaaagcaccgatgcagcagatgagaatactgaggaaaaagatgagcgcaaggtaatctactatgtaactgacaaacttcagcagggtcagtacattaagatgttcaaagagcagaacatggacgctgtcatcttagaccacaacattgatacttccttcatctcacagcttgagcagcgcaatgagcattataaattcatgcgtattgatgcagatgtcacagaatccttaaaggacgagacttccgctgaggacttaaaggctgagacagataccctgacggatgtgtttaaaaaagctttaaacaacgataaactgactgtcaaagttgagaagctgaaaaatgcggatatcgcttctgtcatcacgctttccgaggaaggcagacgtatgcaggatatgatgaagatgtatgcaatgaacggcatgggcggcatggatccgaacatgtttgctgcggatcagaccctgaccttaaacgcaaacaatgaacttgtaaaatatatctttgagcacaaagattccgagcatgttccgatgttctgtgaacagctttacgatcttgcaatgctttccaaccagccactgtctgttgacgctatggcaaaatttgtacagcgcagcaatcagatcatgatgcttttagcaaaataatttttacagaatacaagcccctgcaaaacctgtagatacgagttttgcaggggctttctcatgctgttttttattgtgtttataccggaatttctataaaaatattattttgctgccgtatagattgcgatcatatcttccacatccagatgctttacttttccaagattgcctctgactgccgcattacacttttctgccagttcttttatctgttcttctgtcggcgcaatgccaagttccgttaatgatgtcggcatatggatttcccggtaaaaatcctccattgcagcaatgcctgcctctgccgtcttctgttctgtctcctgcggctccacacccataacgtgctctgcaaactgcacaaatcgttcaatacgctccccgcagacatagcgtgcccagcttccccagatcgcggcaagccctgctccatgtgccacatcaaacattccaccaagctcgtgttctaatttgtgcgttgcccagtcaccaccatccgttccgcagccggtcagtccattatgggaaagacttcccgcccacatgacttccgcgcgcgcatcataattttccggctcttttacaaggatttttgcatttctgatcaccgtgcgcatcagtgcttcgctgatcccgtcggtcagttccatgttttcactgtgattgaaataacgctccattgtgtgcatcaggatatccgtacacccgcatgccgtctgatacggcggaagcgtcatcgtaagttccgggtttaaaacagcaaactttaatcggctgtaatcggtcgtgcatcctctcttcatgccgccatcttcctttgttattacgcaggaaccgctcatctcacttcccgccgccgcgatcgtaagcactacaccgatcggcagacatgcagtcggtttccgtttaaaatcaaagaaatcccacacgtctccttcatttgcaacaccatatccgatcgcctttgcggaatcaatgacacttccgccgccgacggcaaggatgaaatcgacattttcttttttacagagtgcgattccttcatacaccagagaaagtctcgggtttggaacgacaccgcccaattcgacgtaagtgatcccctctttatcaaagattgcctcgatcctgtctaacagaccggagcgtctggcactgccgcttccataatggatgagaacctttttacagttctgttcttttatcaggtttccaactttttgttccgcaccttttccgaaaacaacttttgtcggtgcataataattaaaatcgttcattttgctcctcattcccacatgtaaaagttcttattttctcttttcataactacttctagttatataagctattatcggtaagaaaacgtatctgctttagtctgaacaagctcgcaggaaaccatcaccggttctctgcgggcttacactctcttatcgtatcttcttattatatatctgtctgacaaactatctacattgaaattttatcaagtattccggtcagatgtgcgatcgtcaccccataatttgtcatcggaacctgctgttttttggcacggtcgatccgcgacatcacatatttgcggttaaacatgcatgcaccgcactggatgatcagatcatagccggataaatcctgtggaaaatccgttccactcatgatgtctacggtaatgccctctcctgcgcgcttttttaacatgcgcgggattttgactcttccgatatcttcctgcagtggcgcatggctgcagcattctgcgatcagaacatgcgattcatttgtcagggaatctaacatttttgcaccttccacatagtaaggaagatctcctttatacgctgcaaacaaaacagaaaatgaggtcagcatgctctctttcggcttgtgctcatacacatagccgaatacctgtgagtctgtgatgatcagtttcggcggttcttttaaggctgcaagtgccggcaatagtttatctgttgtcacactcatgaccaggcactttttatccaaaagttcccgtaatgtctgcacctgcggcaggatcagacgtcctttcggcgcctggatatcctgcggcatgaccagtaagacgaaatcttcttccgtgacgagatctcccgtgatcagcctatctccgtaattttccggcacaaggcgggcgagttcttccctgactgtgtcgatccctgcccccgttttggcactgactgtgagcgcctgttttcctgttttttctttgatataagaagcaaattcgtccgtatgcggatcaatatctgctttcccgacgaggaacaaaacaggcgtatttttttctttcagaaactgataccactttaattcttctgtgagatccggtaagttctcctgatttttctcggacgactgttgtaatttttcttttgcatctttcgtctctgaagcatcctctctgcaggcatccgcgccagataccacgatcacagcgatatccgccttttccgctgccagtttcgttttctccacacggcgttccccaagctcagtctcatcatcaaatcccgctgtgtcaataatcacacagggaccaagcggactgatctccatcggcttatagaccggatccgtcgtcgttccggcaacatctgcaacaatggagacttcctgatgtgtgaaggcgttgataaaagaagatttcccgctgtttgttttcccgaacacaccaatatgcagacggttgctgcctggtgtatcattcagtgttcctgccatagtactcctcatttcccttagaatctgaaatcacgttttccctctgcgatatcgtggatgtgctcgtatgcagtctgttttactttcggattcggaattttttcaagttctctgtcgatcagctccataccaagacgttttgtctcttcgcttgcataatcttccagatattcttttaatgtcatcagcgcattcgggtgacagcagtttaagatctgcatgtttttacaaagtgccataaaacggtcaccggttcttccctcgcggtaacatgcagtacagaaacttgggatataccccagtttgatcagccagttcacaacttcatctaaggttctctggtcgctgacatcaaactgctcactggtcacttctccctctttttccggctctgcgtagccgccgacgcttgtttttgatgcaccgctgatctgggaaacgccaagcggaaggactttgtttctcacttcctggctctctcttgttgagatgatcattccggtatatggcacggaaacacggatcagagcacagatctttgcaaatgtgtcgtcagagatgccattgtcaaatgcagacggatcaatgtcatctgcatgcttgattcgcggtacactgatagtatgcggtccgactccatgtactgcctctaagtgttctgcgtgcatcaaaagtcctgcaaactcataacggtaaaggtcaagtccaaacaatacgccaagtcctacatcatcaattccgccctccattgcacggtccatcgcctctgtgtgatatgcgtaatcgtgtttcggtccggtcggatgcagcttttcatagctttctttatggtaagtctcctgaaacaggatataagttccgattccagcttcttttaatttgcggtaattttccacggtcgttgcagcaatattgacattgacacggcggatcgcaccgtttttatgtttgatgctgtagatggtcttgatgcactctaagatatattcgatcgggttgttgaccggatcttcgcccgcctcaatggcaagacgtttatgtcccatatcctgcaatgcagtaacttcttttacgatgtcttcctgcgtcagtttctttcttgcaatgtgtttgtttttcagatgatacggacagtatacacagccgttcacgcagtagtttgacaaataaagcggtgcaaacaatacgatacggtttccgtaaaaatcttttttgatctgctctgcaagtgcataaacttcctggattttttcaggaatctcacatgctaagaggacagatgcctccctatgatttaagccctttcttaattttgccttctcgatgatctcatcgatcagtgccacattgtccttgttggcatctgcataggcaagtgtctctctgatctcctcatctgaaataaactcttctgcttttaatgattttgcgctatacatacattcttcctttctttccggtcagtttgcgcccgcttgctttccggttagtgtatttttatatggacgacagactgctctttttgcagaactgtcgtataaaaccagtagatccgccttaagtctgctggctttttgtcaatttgtgatttctgaagttatcttatgtccgcccgttctgtctcacagatggctgatactttccattctgcttccttatggctgaaaatcgcccctgtttacggctacctgatagccaatgctttccattcgtttctgcatgcagaagcggcactctgctgcctcgtcaccggtgcagatcttattatcatataatttatatttctcccgcacggcaaccggggataaattcggcatgacgacatttgctcccgctaaaattccaagctccctgcccttgggatgaatcgttccaagcgctgtggtcgccgggagaagtacatgcggatggatcagtctgataatggaaagcagccgcagtgtcatctccatagtgcccgctgtctcagtaccaaacggcgtatctttctgcgggataaacggaccaataccgaccatctgcggtttcaatctacggataaactgcagatcttcccacagggtatctacggtctgataaggcgaacctaccataaatccgcatccggtctgatatccgatttcttttaaatctctaagacagcgcatccggttctgataggacatctctgccgggtgcagtttcttataatgtgcctcatctgccgtctcgtggcgcagcagataccggtctgcccccgcatcaaaatatgcctgatagctctctcttgatttttctccgatagaaagtgtcaccgcacagtcgggatattctgcctttatctttgaaacgatctgacagatcttttcatcggtataaaatccatcctccccaccctgcagtacaaaggtgcggaatcccagctcatatccgattttacagcaggaaagaatctcttcttccgtcagccggtagcggtctgcgtggcagttacttctgcggattccacagtaaaggcagtcatttttgcagtaatttgtgaactcaatcagtccgcggatgtagacattttttccatagatgcggtcacctgtgttccgcgcacgctgttttaaatcctgtatcatcgcatcgtcctctgtggcaagaagaaatgcaagctgttcctttgtgatatctgctgtcttttctattgtctctgacagatttctaaaattctgcgctgacatgccatagtttttctgtgtgtttttgtctggtgttctctggttttgtaacataaatttatccctgtccgatcataatggtctttctgctagtgagattgggcatccgacatatatttcttttgattttgcccaatgtgtatattttcaattcatatccacgccagcttatgccatgccaacattcgaatacaccgtctttgccgtgattccatcaagtctgccgattttcccggaaagtgcattgataacatcctgcggcgcatcgattgcaacgctgatgatatgcacattccgctcacggtatggcagccccatccgtccgataatatacgagccgtattcatgcaaaagtttatttagttccggcgtggaatccatattttcaacgatgatcccgatcaaagctactcttgtatccattcgtttcctccctgattatcaaatttatatgattttcatacacgaatctatgatacagattttggaataaaaaaactgtacccctaatttcaggtacagcctaataagagtcgcattgcgcctcttacattttccatttatgccatacctttcatctcaagtgattcttttgatgtcagcgtcttttctttttctaataaacaatcttgtgcaaaaagaactttacatgtgctctttgcaaagatttacaatctcaatttagatgcattttacgggcaaatttcttattataacaataccctctgcatacacaaaaattatacagcaaaattttttgcctatataagtattatgtatacaaagggtatcatgattttttaggaattgcaattatgtttcgattctgtacgatataaaatacaaaaaatgtgttactgttcacacatactgtgtgagcagtaacgattacagcccattttaaatgcatcttcgatgcatggggctgtaatctggcatgatatagtctttggcgcacagcttgacagcaagtgtcaagcttgcgagtgaacagtaacaaaaatgttactctttacggcaccggctcttcctccggcacctcgatctctttgatcatcgtctcatttccacataaaagccaggtatgttccccgccgcactccgggcagatcttaccatgtgctacggtatcatattcgcagccacagtcatcacaatgtgtcactgcatggattgtctcgatatttaactcactgccggataaaacctctgtgcggtccgccgcccagcgccagcagtctgtgagataagacggcacgatgccggacacttccccgatggaaagtgtcacagccgaaacctttgtcagttcattttcctgcgcgatctcctccacgcttttgatcacatgaaatacgattccaagttcatgcattcgcgttatttctccttttttccaaaacggatcttcacttcacgttttaacatataaggaagaattgccttcatcttgtcctccgcttttaccatacggctgcactccggcagctcgcggtgcagatggatcgcatcaaattcacactttgtcgtgcagacaccacagccgatacacttgttcggatcgaccacggaagctccacatccaagacaacgcgcagtctcgatcttcacctgctcttcggtcagtgtcctgtgtgcatcgcggaatgatctgtgcgcatcaatcttgtcatccattgcaggacgctgtctctttgcactgtcatatccttccagggcaagattttccttatccagttcgataaactgacggcggtttcttccgatcgtcatgcttgcgtttttatgtacaaaacggtgaatggactctgcaccttcttttccggctgcgatcgcattgattgcaaaactcggtccggtatagacatctccaccgacaaagatatccggttctgcggtctggtaagtaagcggatctgctactgctccgtttcctcttccaagttccactttagagcctgccaaaaggtcaccccagagaatgctctgtccaatacttaagtatacatgctcacattccacggtcattgtctcattctcatcgaactgtgggttaaaacgtccagtctcatctttgacggaaacacattttttcagcacgatgccacgcactttaccgttttctgtcaaaatctctttcggaccccagccacagtgaacggcagctccctcttctttgacttcttccacctcatctttggatgccggcatctctttttcagactctaagcagaacatggaaacttcgttggaaccacagcgtgccgctgtacgtgccacatcgattgccacgttaccgccaccgatgacaacagatctgccatccacgcggtagtcttcgtttccaccggatacgatatgtaagaaatcaaccgcactcattacacccgcggcatcctcgcccggaatgcctgctttgcggcttccctggcagccgattgcaatataaaatgcctgatatccctgcgcgcgcagttcgtctaacgaaatatcttttccaacttccacgccgcatttgatatccacaccaagttcacgcatcacttcgatttcagcatccacaacatttttctctaatttaaaagaaggaataccgtaaacgagcattccacccggacgttcatttttctcaaatacagtcggtttgtaacctctggttgccaaataaaacgcacagcttaaaccagccgggccaccaccaatgattgcaatcttctgtgggaaagttccacggtttgacggctgtacgaccggtggaatgtaacgtgtatctgaattcagatccagttctgcgataaatttcttgacatcatcgatcgcaactgcctggtccacagttcctcttgtacatgcatcctcacagcggtggttgcagacacggccgcagactgccgggaacggattttcctttttgatcagggcaagggcatctgtgtatcgtccctgtgccgccatctttaagtatccctgtactgcgatatgtgccggacatgccgtcttacacggtgccgttccggtatcataacagttgatgcggttgttatcacggtaatccatatcccatttttccggtccccacttggtattatccggcagctcgtgtttcggataggtgatggttccatctttcgtacagagtttctgacccatttttacggcacccgccggacagtactctacgcagcgtccacatgcaacacagtcctttgtttcaacctttgccacataagcagaacgtgacatgttcggtgtgttaaataactgtgaagtacgaagtgcattacagatatttacattacagttacagatggcaaaaatcttgtcctcgccgtcaatgtttgtgatctgatgaacaaatccgttgtcctccgcacgctgtaagatttccattaccttttcacgtgtaatgtaatgtcccttgtttgtctcgactaaatagtcagccatatcgccgacaccgatacaccagtcttccggatcatccgcgcatccctcgcccaaaacaccgcgggaataacggcaggaacacggacctgctgcatattttccatcatatttatccagccagtgggaaatatgctcgacactgacagactcattttccgtctcgatcgctttctcaaccgggataacgtgcataccgattccagcgcctcctggcggtaccatcggtgttactttctgcaatggtaaaaatgccatgcgctcaaagaatgatgcaacttccgggtgctctttgatctgatctaacttcatgttaaaaaactctgcacttcccggtacatacatcggaaggacatactgcttctcgtgtttcggattctcccagttgtactctaaaagaccgatgttactcatttcctgcaacagttcttctaacactttttcttcttttccggttgcttttacggcctgtgctaatgtcatcggtttgcgcactttcattttcagtgcaacttctgccatctcatccgtcacaagtgcttctaatccataatattccggatcttcggctgtcactgtatgaccgatacggtcggtgatcttctgtcctaattttaagatcagctctctcggctgttccggtggtgtgtactcaaactttttcatgcgtgttcttcctctttccatgcagcggtctcttttttcagccagtctgcccattcttccataccttcacctgtctttgcacagatcgggatgatctttgcattcggattgcgcatcaggatgttctttttacactgctctaagtcaaaatcaaaatatggcatcacatcgatcttgttgatcagcacgacatcgcagatggaaaacatcagcgggtattttaaaggtttgtcatgtccttccggtacggataagatcatcgcatttttcactgcacccgtatcgaactccgctggacataccagattgccgacattctctaaaataaccagttccacatcatctgttccaagtccttttaatccctgtctcgtcatatctgcatccagatgacacatgccgcctgtatgaagctggattgcctttgctccggtctttaaaattgtttccgcatccacgtcagagtcgatatctgcctccatgacaccgatcttcaagtcatctttcagtgcctcgatcgtgcgtgtcagcgtcgttgtcttgcctgatccaggcgatgacatcaggttcaacaagaacacgccgtcttttttcagttcttcgcgaagcaatgctgcctgcttgtcattgctctcgaaaatgctctgttttacttccagaatccgtacatttcccatgataatctccatttcttttgtaacatttttcgccttatctgttacttatagataaattctatcattttagggtggttgtgtcaataaattctggtcataccagtgtgccaattttttagaatttgtttagaattgtctgattgctatcacaggaatgcgaagattttttaattcatggacgtaattttcctatgaagattcgggtgtcaaaaagtggcttccaaattttgacacccgaatcctatgaattaaaaaaacaacactacagtccgcagaaaaacctgtatactgtaacgttgtctgtcttactttagtatgcctttacttttacatatccttcttcataagaatatttcagataagtaataacatttacaacctgtctcttatcatcatcaatgtgtatcctaataagttttgacctctccatttgctcaaatccatccgatctggatctttcatagataatccaatcccccaaattctgtcttttaccgcacattctgcaaggatttgatctttcgtatgtaacaaaccttccctcaatttatcattttgggaaaattttgctataagcccttcataaactacaatctgccttataccattccagtaattttcattatagcctgccaccatacgtcccagttcttttatagatccaacctcatctgtttccaatatcttttcagcaatcacatcgtctctgaaacaaactgcctttttatacatcatatattgctccatagatgaaaatccgattccatttacatcaaactgtgacatataccagttactcaagtatccattttcctcatcaggattatgaaaacataaaatatccattttatgctgcacctaccttttttactgccagatcaagctctaagtcatgcagtccgtgatacgctttcatcaaaaaatttaacggtactttttctatcacctccgagcttggaatattatagtaccattgataatacgcataaaactcgccaatccagtccggcataaacccttctaaagcctttccagctttcaatttatacttttctgtatccgaaaaatatctccataattctttagcatccatggtattaacatacgccatcgactcatcgatatattttctggttttacttttcatatacgcttctataaaatccgttgtatcattttcaggaaatgtctgcgctacaaaatcaaacagttttccctgactctctaccacatcatctaaatatgtctctgaatatgcccgcatttttctctcctcataaaagtgtactaaacacattggttactttatttgcatcagagtcaatcaattctttcatccttttccttgctgtcacatcgcgttcattgtatttttcattaaactcgtcatattccacggaaataagttcttcttttctctcagacagcctcgaatatgccagttctgatttaatacaatactgtattcccaaacctcccaacaaaaggagctcttctaaaatttccacatcaatttcatctctgacaaacgcttttgcaatataaaagtacgatgcatccgctctccatccttttatcacatcatatccgcttgtttcgataccatattttgcaataaacttctgcgacaacattctgtaacgcttagagtctgctgcatccctgtgtttcattaattcagccagccatgataaaatgctatatttctggaaatcaagtactttcagtccttccatatccaactcatatttatgaacccagccatttgtctcatccggtctgcaaaccgcccattcttttgcaagatcaatattttccgtcaaataaaagccttttccgtaatcatgccggttttctcccaatccaaaagctggctttatttctttgtcaggactcccatgatacaagataatcttacccatatcgtcatcctccctatacaaacataatttagaaattgcaatctgttccgcttttttaagctaagttcttttagcgtacccaataatgctttattcccctctttgattgcctgatctacctcttttcctagagcaatacataaaaaggtcat

SEQ ID NO: 464 - DNA, 22398 bp, unidentified
  source 1..22398: mol_type = unassigned DNA
ttatttctgtgcaaaaaagtctttgaccacctgcaccacggctgcgcggtcggcttcggtcagaccatagtacagcggcaggcgggtcaggcggttgctttcctttgtggtgtactcatccacaccgtcaaagcggccgtattggatgcccgccggggcgctgtgcagcggcacataatggaaagacgatgccacaccgtgggctttcaaataggcaatgaacgcggtgcgctgttccaggtcccgcagcttgacatagaacaaatgcccgttatgcacacagccttccggcacggtgggcagctccaataggcctgcttcagccagcggtgccagctcctgtgcgtaataatcccagctgtgggtacggtctgtattgatggtatcggcctgttccagctgtgcccacaggtaagcggcattcagatcactgggcaggtagctggagccataagaaacccaggtgtatttatctacctggccgcgcagaaaactggcgcggttggtacccttttcccgcaggatttcggccttggtcacggtttcggggtcattgatgaccagcgcgcccccctcccccattgagaagttcttcgtctcatggaaagagtagcagccaaaatcaccgatggtgcccagtgccctgcccttatagctggccatcacgccctgggcggcatcttccaccaccttcaggttatggcggcgggcgatctgcataatggtatccatatcgcaggccacaccagcatagtgcatcacgcagatgactttggttttttcggtaatggcgggttcaatttttgcttcgtcaatgttcatggtgtccgggcggatatccacaaacaccagcttggccccagctaaaacaaaggccgttgccgtggaagagaatgtgtagctgggcaggatcacctcatcgccgggctggatgccgcacagcagggcagccatttccagcgcggtggtaccgctggtggtcagcagcaccttgcccgcatggaaccgctgttccatccattcatcacagcggcgggtaaaagggccatcgccgcagatcttattgttggccatggcctggcgcatatagtccagctctgtaccaacctgcgggggaatattaaaaggaatcattgttttactgtcaactcgcaatctattataaccatccggccgttatcactgggcgcggacaacatcactttccggcgtttcgggttcaaaattcagccgcttttcttccaccaccagggggcggtccataatacgggcgttcattgccatgatgtactcgcccaaaaatcccagaaaggtcagctgcacaccacccacaaagaacacagcaataatcattggggcataacccgcagcaaaggtattccagtggatcagctttgccaccaggaacacaagccccaggataaagctgaccgccgcgcagaaaaagccgaagaactccgccatccgcatcccaatcttggtgtagctggtaaagctgagcatggcggcatcaaacaggctgtaccagttgttgtgggtcttgcctgcccggcgcttgggctgggtgtattcaatctccttgcgctcggggccaagctccgccacaatcccgcgcaaaaacggggttgggtcgtgcaaatcacgcagggtctggataaagcttttatcgtacaggccaaacccggtaaactgctcgatcatttccacattgctcatctttttgatggttttgtagtaacagtcccgcaaaaagtacatgaccgggttttcctggctggtggtctttttgccgattacaattttgtagcctttttcccattcagccacaaactttggaatcatctccaccgggtcctggaagtccgcgcagatggtaatggtgcagtcccctgtggtatggatcataccgtaataggggctgttgaactgaccaaagttcttgctgttaaaaatggctttgaccttggggtcctgcgcgcagatgtccgtaatgatccggcgggtacgatcctggcttttattatcaataaaaaggatctcatagtcataatccgggcagtccttccgaatctcatcccgcaccgcctcatagatggggcgggcgttctcctcctcgttataggtagggatcataacagagatgacttttttcttctcgctcatgcaggtttcattcctttaagtttagtctttggcccactgccgcaatagccgggcagacccttatcactatacactattttgcaaaataggtaaagaacaatttattttcgcagttttgcgtttcaaagttcaggcttacagggcggtccgccagggtgtagggctcctcgttttccaggcagaaagtcccctctttggcaatgtggcagatgccgcggtaaatttccatggccggggtgcaggcaccgatcagcagcgttgccgccagcagaatggtcacggcatgctgtgcaagcgtaccgtcccgccatttggtgcccaccaaggcgataaagtaccgggcacagagggtcatcaggataaagatagccgggatggacacccgcatgcagaaatcgcacccctgtcccaccttaaagaacggaatgatgaagagcgacacggcgcaggtataaaacagccagctgcggcggttctgccgccagagcagcagcagatagatgccggcatccagcaggtaaaataccagcatgcctttttgcaggctggtcagaacgttttggccaaaagtctgctgcgctgcctggttcccggcgacagtttcgcccagaacgctgtagccaaaggcgttattggccaaaaaataactggccgtaatgctgagcaccacaaccagcaccagcacattggccggggagaacgccgattgcagcacgcctttttgatgctgtgccagtagaacaatgccgcgcaccaccataaaaataaccagccccacaaatgggaaggggccgcacatcaggcaggccgtgcccagcagcaggtagttgcggcagtctttctcctgcaaaaagcagacggttgccagccatgcccccactgtctggttgaacacccagaacaggcaggtcgtcagggagctgaactggaaatcattcgtccaccattccaggtgcatagcgtcataggccagcaggtccggcagtcggctgctgtacagcgcgcccagaatatccatgccgctgaagaaaatcaaaaacagcaggccgatcccctgctttttgccggtatcggcacgcaggtagaccaacaaattcagcgccaccagataggtgcccagcgccgtccacccccaaagggccatacgggcgaacatccaggcggcatccagcccaaacagggcgtataccggtttggtcagcgccgccgggaccagccagtgcccgatataatacaccagcgccgtatccttttgcgggtaatacaccggccagctgtttatgatcagatcccggtaaatggcgttgcggtaaccccagtccgagttctggtaaaaaaagcccgtctgaccgcccaggtagccccacaacagcatcagggcaaacagcagcaccagctttggcaccgaaagcgtaatgccctgctcttgttgccccacttgcttaacctgcggcgttttgcacacggcataccaccaggcaaaggccagcacggccaggcccgcaacggcaaacggcgcgcggagataccccgcaaaaaacaccgccagcggcgcggtgagataggataaggcaaacggctttaacttttggtaggtcaactgcataaatactgtctggctcctgttcgtccatgcgggtcctgcccgcacggacggggttattccttattggcttaattggtttgcttttgcgtttttgcccacgcaatggtggcgcggatgccatcggcaaaggcggtgcgcggcgcaaagccggtatccgccgcaagctgggtgatatccgcctgcaaaaacatgacctgctgcggcccgtaagggattttgcccaggccaagcggcagggccaggtcgatggcatcacgcagggtttcaatatattcccgcagggggcgggcggtgccgctgcccaccgggtacacggcaccgctgcggccatggcaggccatgcggtacagtgcatccgcagcatcggcggagtaaagataatcccacttctgctcccctgccgtcaggtccgggcactgcccggccagcagtttttggatggtggcggagatcatcgtgttgggaccgtcatgcgggccgtaaaccgaaaggatacgcgcccacacatggtccatgcccagggcggcggcctcggtacggctcatctggcctgcacacagcttggccatgccgtacccgttttcggggtttgtgggggtatcggcccgcagaacaccgtccacacggccatactctgcctggctgccggtaccaacaaacacacggcagcccattgccgccgcggtgcgcacggcatcaatggtatagcggatattctcaatctgagccggcatatcattgcggcccgcgccaatggtgtgcgcccacgccaggtggaaaaaggcatccgcctgcacgggcagcccggctgcggccatgcactgcggcaaatccgccaggtgggcggcatcgcaggcaactacatacaggtttgcatccttgggcagcgctacggcccgcgggctgccggggcggcagaccgccaccacggtacacccggcctgcagcagccggctgcacaatgctgtgcccacggccccggtggggccggttacgattgcggtttgtatctgcctttcgattttttccattttcaacaccttatttgtttttcgcaatgatctctgtgcaaaaagcatgccagctttttttcatttgcctgtctataattttccctacataatagacaattcctgccgctattgcacagcaggcaaaagaaagaacaagcctttgcagttcggtcacttctacgctgtacattgccagtatattcggcaaaaattgtacgcaatacaaatgactcaagaaaactggcatggttgctttccccagaaatctgacaaagccgttgtcaaattttccgtagaaaagcgattttccgcttgccgtaatggtaaatgccgcacccaacgccaaaaccacaatgccatccagcatagcacgtgtctcattcattgaccatatatggtaaagtacccacgcatacccagccaattccatggctgtcatcatcacggccatctttttccctacatcaatttttttcagagttgatgcagccctgtttgctactacccctcccagaattcctgcaaaggcacgcagcattccggtattaacccagccaaacagaagtgtacatggggcatccagtgaaccacagttctgcaggatcacgcccagtatcagcaggattgctaccggggtcgcctgcacagtcaagccataatgcctgcgcagcagcggatacagcacccagaccgcaaaagtcattgcggaaagataccatagcacccctgttgtggaggctacagaaaacccaaagttctgtaaatacaggaaatctgccggaatcagctgtaaattcaacagaattgtagcgctgtcccactgttgtgcataggcacgcactataaaccccaaaacggttgccacaagaaagtatggaaatatcaaacgataacgcttgagcacatcccatgtcgcttctttcatggcattttctaccgaagggcaggttgtttctcttgcgtttaaccggcatatcttttcggcaagaaaataccctgttacgataaaaaagaattcaacgccgatatatcccctgcgcacgtaccacgcatggaacaataccactcccacgcaaaatacaaaccgcagcaattcaatattgccattccgcgcttttttcattttttattttcttacccttccggcaccagggggataaacatctgcttttccagctcttcccgcggcaggaacggtgccaggtcctccagcggcgggctgactagtgtgccgtccggcaggcgcttggtggcgctcttcggctcccagacctgctgggtatcggtaaagatctcgcagaaagtcgggccttctgcggcaagggcggcatccaccacctgtttcatctcggcgttggaatgtgcgcaggaatacgggtagccgaacgcttcggcaattttgcggaactccgggaaggacagatccccgctctccggcccaatgccgatcttgcaatggtctttgaacaggttgttctgggtcaggcggatggagtggtagccgttattgttgatgaggaaaatcttgatcggcagcttatttgtcaggatggtctgcaattcctgcaggttcatcataatggaaccatcgccttccaggcagatggtggtacggcggccgcctgcaatgcaagtgccaatggcggcgggcaggccgtaccccatgctggcaatggcgctgttgttggccatgcggctgcctttttggatgacatacgcctgattgcccaccacgcagcaggcgccgttggaaaccgcggtcaggctgttttccggcaggcgggagctgaggtagcgcacaaaggcgtacacattggcggtggtgccgttttcttcccactggcgcggcaaaacggcgggggaatcctttttccagcgctggcaggttgccagccagtccgctgcctggctgacaggggttagcggcgctgcggcgacatccagcttttgcagaaagtccttggcatccgcccacacggggtgctccacatgcagggtgtgctttttcatctcggcgcggtcaatatccaccatgatgacttccgccgcgcgggcccaggttttccagttatagcccacctggcggatggaaatgcgggtgcccacagccagaatcaggtctgcgttctggatggcccagttgccggggcggtcgcccatattgccggcacgaccgcagtaaagcgggttttcgtcctcgatcaggtccacggcgttccagtaggtcacaatggggatgttcagctttttcgccacggcgcggaacgctgcgtacccgccggaaagccggatgccgtatccggcgtggagcaccgggcgcttggcgttgcggatcttttccagcaccatctgcacggtggcatcgtccaccgggggcggcagccgggcatcgtcctgcgccgggtcatagccgggcaggctgtcggtttcaatgtagccgccctgatagttgaccgggatatcgatccacaccgggccggggcggccggtggttgccaggtgccaggctttttccagcacatagcggatctggttcgggtcttccagcatggtggcgtatttggtcatgggggcaacggatttggtgatatcgtactcctggtcgcccaccgcgcgcaggggcagcccatcggtaaactgcgcggcatagcgggccgtggtatcataccggacctggccggagatcacgaacatggggatggaatccagccagccgcccaccacgccggtcagggcattggtgccgccggggccggtggtaacgcacagggcggcaattttgttatcaatacgggcgtatgcttccgccgcaatggcacttgcctgctcgtgatggttataggtaacatgcagcgccgggtggtggcccagtgcatcattcagatgcatggcgccgccgcccaccacgctgaacacatccgtaacgccatgcgccgcaagaaaatcggccacataatcggccagacgctgtttcattgggggtgtcctccttttatttaatccgttcaagctgcggctgaaccattacaaaatacaaagttctggaatcctgcggggcatcgacccgcttgccgctgtagctaatatcgattgtactttcaccaaaaggaatatccacggtatagcggattttcatgttttcctggctgaccacaaaggtctggctactgtcaccgaaggtaatggtaatgctggggcggtcagaaatatcaaagaaataatcccccactgtaaagataaaggtgtacctttccgtattcagctgcgggtttaccagtttgatctccgcacttttcttgcaccagtaaaacggcagctctttgttggagttttcaggagtataatattctgtgttataaatgccatcccccagctgcatggtaatagacggcgcattatacagcacccacacgccatagaaaacggcaagggaaactgccaatgcccccagtgaagcgccgaaagtaaccagcgtgctgcgtgcagcttttttatctagttttgattgttcaggctttttggttttcagcgctgccaacacacaatttactgcctgtacaacgccccagatgatagctgtcagtattgccaactgtacaatggtgttgcgaatataagagttacgctcttcaaagattggaagcggcagattaaataccatcaaaaccgcaaaaggcaatatattttgacgtgtcatcaccttttcctgggcaagaaaatacgccagcggaatcagcgccatgcagtaaatatagttgccctggctttggtacatcatagccacggtaatcagcagcaacgcctgccattcctggcggcagagcagagcacacacaaccagtaccgccgccacagcaaaggctgctgcaaaaaaagataccgttgcattgctggttccggcaatcaggtccaccagatgcgccccatgtgcgaacatgctgttgatgccattgcctacccaaggtgttttacttttacttccaaaagagaacaaaatcttcagccaaagctgcaagccgtacacgccctcctggaaggcaaacaccgggagcaccaacgctgcaatgccataaaacaccgtgcggattgctgctttgaaatcccggtttcttaaaagcataacacctaagaatgcgggataaattttaagcccggctgctactgccagtgcaaccaatgccagttcccgcacccatgcgcgctttgaacggtgatacatgacgaaaaaaagcgaaagccccgccgccagcaaaataatattgccgcggtctaccgcattaagcacaccaaagctgaataaggcaaaaaacgtactggccctggcccactgggcattttgcatcacgtcacggagcaaaaccgccagcaaaagaaccgccagcaccacaaaaaagacgtatagcaaaaagcacgactgtgttgtgcgtaaatcagtttctgtgccgcgcatggcaactgacgcctcaaagtcataggtccagttatcagataccgaagcaggcaccagtaaaaacagggcataaaagaacaaatttgccaagggcggatacagtgtgtcaaacaccgcatacggctggcgtccacgaacatattcaatgctatggaaaaaatccatgccgacatccagtgtatcatggtataaaaagtacgaaagaaaatcaccatgggtaacatacagcgttaccataaccacaatggcacacactgcgctgagtacacagtacagcttggccgtttttttccagaacggattgctccctcttccttttttaccaaaaaggccttttccccgtttcgtgttattctctttcagcacgcgctggctgttgcattcattctggccataattcagtcccagctgcaccgatttgttatcttccggcaacagctgatctaatccaatgctgataccagatttattctcgttatttgttgtcatgttgtccatacacagccttgccctatttctgttcccggttatgtatcagatattcccttgtttcccatattttttaccgatatattttgcagtcttattttcaacaataaagcaccgccaaccaacctcgttgagtcggatgatggttagggatcccgataccgcacttttccgtgccggataagctccacatcgttgacaggaaacattttgtcgtttatctttccttaaatgtccacaacttgttgatgataaaattcagcggaatcgtaaccagcaaatttacaatcggcgcaatcgttttgcttacgctgaagaacgtaacctctatccaaagcaaaacattagaaaggattgatgtgccgccgtagctgacgtatgtttttccaaggcgtttcagtttactgcgccaatcgtttgcattcccggtaaacacaaacttatcgttccaaaaaaaggcattggcaatgctcagaattgttcccagaacgctgcctaccatatacaggtctgggctgatccacaaaaagatataatacaccgccatcgataccgccgtgttgcttacgccaacaaggccaaacttgataaactgtgcaagcagcgcaacaaattcctctttgctttttgctcccaacagtgccaacaatttctgcatggatcccgttcctttattattctttataagcaatcaaaaagcaaagcctgtattgataatttaccgcagtgcagcagccattttttcttatcagcacggctttgctttttcttattggttcatcttatcagcgctttttactggttcaccgcttcaataatgatctttgccatatagtcgatcatctcatcggtcatgccggggtacacgccgacccagaaggtgttgttcatgataaagtcagtgttggtcagctcccctgccacgcggtaggcgtcggtgccgcggatctggtcaaagcaagggtgcttgatcaggttgccgctgaacaacaggcgggtctggacattgtggtcctcaatatagcgggtcacggcgttgcggtccaggccggattccggcttgaccgaaatcaggaagccgaaccaggacgggcggctgttggcggccggttccggcaggatcagcttatcggcggccggttccagggctgcgcgcaggcggtcccagttatggcggcggcgctcgataaagctggggaactttttcagctgctcgcagccgatggcggcctgcatatcggtcactttcaggttatagccaaagtggctgtaaacgtacttatggtcatagcctgcgggcagttcgccatactgaccgtcaaagcggtggccgcagaagttatcatggccggacgggcagatgcagtcgcggccccagtcgcggtagctcttgatcaggcggttcagcagcgggctgtttgtatacacgcagccgccctcgcccatcgtcatgtggtgcggcggatagaagctggaggtgccgatatcgccccaggttccggtaaagcgggtttcgccgttgatggtgtactgggtgcccagggcatcgcagttatcctccaccagccagaggttatgggcatcgcagaaggctttgacggtggacaggtcaaacgggttgcccaaggtatgggcgatcatgactgccttggtcttgggggaaagagcggcttccagcttggtcacatcaatgttgtactgcggcacggtcacatccacaaacaccggcacagcgccatactgcagcgccggggtgacagtggtggggaacccacatgccacagtgatgacctcatcgccctttttgatctggcggtcgcccagttccggggcggtgagcgccataaaggcaatcaggttggcggaggagccggagttgaccaggttggcgaactttacgccgatccacttggcaaactctttttcaaattcatccgcaaagcggccggtggtcagccagaaatccagcgttgcatcggtcagggcgcacatttctttttcatcaaacacgcgggatgcataagtaacgcggtcgccgggcttgaaatccgtctttttctccttaaagtcatggtaatattctgccaccagcgccttgatctgctcgcgggcttcggcctcattgctccaatttgccatcgtctgctcccttactcactcaaaaattccttgatctctttgtccatctccgccgggatatccccaccggaaagccataccttgctgaacgcaacggtcttttgcatacattccgccatatgccagcgcggtttccagccgaaggtggatttcaatttgctgcaatccagcttcaaaaagtttgcttcatgcggggcgtttgcctcagcgcggttttcccatacagcaccatcgccccacgcctggcagaacaggtctaccagggtgccggtcgtcacacagtcgcagtcatccgggccgacattataatagccggcgtaccggttatcctcatactggcgctgggcgatcagcaggtacgccgccagcggttccagcacatgctggtatgggcgggtggaatacgggttgcgcacaccgatgctctccccttttgccatcgcgcgcacgcagtccgggatgatgcggtcattggcaaaatcgccgccgccaatcacattacctgcgcgggcagtggagatggccacgctgccatccgcaaaaaagctgtttttatagctgtgggtcaccagctccgagcagcttttgctgttggagtaggggtcgaagccgtccaacggttcgttttcgcggtagccccagcaccattcattattctggtacaccttatccgttgttacgttcagcacagagcgcggcggagtttgggcggtgcgcacgcattccaacaggttcacggtgcccatcacattggtttcataggtatagcgcgggtccttgtagctgtcccgcacaatgggctgagccgccaggtgcagcacaatttccggctgggcggcatcaaaggccgctttcagggcggcaaaattgcggatatcaccgatcacgctggtcattttgccttccagccctgccagagagaagaggttgggggttgtgggcggttccaggctgtaacccgttaccactgcaccggaacccaccagcatgcggcagagccagctgcccttaaaaccggtatgcccggttacaaacacgcgtttgccgcggtaaaattccaagttcattgttggttccacacttcccagggcgcacagccagacgcccacattttttccagcatacttttttcgcgctcggtatccatgcactgccagaatccgcggtgcacatagctcatcagctggcctttggctgccagctcgcgcagcggggcctgctcaaaaatggtatcatcgccactgatggtatcaaacacttccggttccagcaccatatagcccgcattgatgatagccccatcgttgacgcttttttcacggaacgcctgaaccgaattgtcctggccgatatccagcacgcctttctgctgttcctgcaccacggcggtcagggttgccagcttgccgtgctgcttatggaacttgaccagttcggcaatgttcacatcgcagacgccatcaccataggtcatcataaaggtttcgttgccgatatatttctgcacccgcttgatgcggccgcccgtcatcgtgttcaggccggtatccaccaccgtcacgcgccacggctcggcgtgctggtcatgcacgatcatctcgttgccctgggtgaagtcaaaggtcacatcgctggtatgcaggaaataatccgcaaaccactccttgatcatatgctgcttgtacccggcgcagatcacaaaatcattgaagccatagtaagaatactctttcatgatatgccacaaaatgggcataccgccgatttcgatcatcggtttcggcttgaacttgctttcttccgaaatgcgcgtgccatagccgccggcaagaattacaactttcatatttttcactcccgtaagcctgcagcggaaccctgcttgcagtcccgcaaaaactgtccgtcccaccagcatttcaaccgccggacagtttggtacacacccagcctattttttattactatgatagtatatcattttcacgtattcagtgcaaccgttccaggaaacttatcacacctagtaggcttgctttttattccgcgttttgctctttgttatcacattttaacgccgcttttgttgccgctgtgcaaacaatattctttacgttttttcgtgcgtattttgtccctgccaggcggcccactttacattagtaggcaaaacaggtataatagtttagttaatctgtgatattgcgccattttgccatattgcgggtgcaggcggtcttattttatccttgctgcctgtggattttttgcggcacgccgtgcgttgtgcggtaccgctcctattaggtctggaggttgcgctcatggggctgcaaagcctgcaatactgtgcatttttggtggttgtggctgccgtttacctgcatttgccggtgcgcatgcagccggtgtttctgctgggagcttcgtgggtgttttatgcgctggccatgccggccatgctgccggtcaccattgcactggcggtgttcacctacctgtgcggccgcggccttgcctggcggggcggcgcacacaaaaccgcctttttgcgccttggcgtgatcggtatgctgggcattctggccttttttaagtataacggcctgttgggcggggtgctgcacggctggcgcgcggtggccatgccgctgggcatcagctttaccagttttgccgcaatcgcctacctgatcgacgccgcccgcggcgactgcgaggtggaaaccagctttatccggctggcgctgttcctcaacttttttgccaccgtcacccaggggcccatctgccgcgccggtgcgctgctgccgcagttgagcgccgagcaccgctttgatgccgcccgcacggtgcgcgctttgcggctatatgcgctggggctgttcaaatacattgccgtggcggatgtgctgaacatggtggtggatacggttttcccccactatgcggattacagcgcccccatgctgattttgaccgcggtgatgtacactttttatctgtatttcagcttttccggctattccgagatttcccgtgccaccggccttgtgctggggctggacctgccggaaaactttaagaccccgttttacgccaccaacttttctggcttctggagccgctggcacatctcgttttcttcctggctgcaggattatctctttatgccgctggcctgggcagatcttggctgctttggccgcctgcccaccgagctgtgcgtgttctgcgtgttctttgcttccggcttctggcacggcagcaccgcgccattcatcatctggggtctgctgcaggcggtttatcgcgtgggcgaagagctgctgcaccgccgctttggcaaacccaaaaagcgcggcaccccggcccgtgtgctgtggggcaagcgggttgtggtatttgttttgtggaccatcagcatggtgttcttccgcgtggggtccggcaacctttccggcatggccgaaaacctgggcgttggcgatgctttcggctacctgggccgctgcctgatgaacagctggtcccccgcccgctttgccggggagctgtacagcacagcgtataccggcttttacgccgctaccattatggtagcggcttattgggcgttcgctgcgctggcgctggcgcttggcatttggctggatcaccggcgcaattttgcctgcaaaaacaaaccggctgaggttgccctggcaagcgccaagcaccgcaatgcgctgtatgttgttttgatcgtttttatcctggtggggtacatcatgcagagcggcggctttaacaccaacgcgttcggcccctatgcagggttttaatcttatggaaaaaaggagatttccggcgtgaagcatatcatcaaaaaattggcgctgctgttcgtgccggtctatctgtggtttgccttttttgtggcgtttgagccaaacaattattttggcatcaaaaaaacagcctcttccagccagccggtggcccgtgtgcgcgcctatgagcagagccccggcaccaacctgatcatcggggacagccgcctggcccactttgatatggaccttgtggactccctgaccgggcaaagctggcagaacctggcctttggtggtgcttccctgaaggaatgtgtggaccttgccaactatgtgctggattccggcaaccaggtggatcgcattctgtttgagctttcgttctacaccttaaacagcagctataacaccgaccgtttttcggcgctggaagctaccctgcgcaacccgctggtctactgcctgaacctggaatacaacgtgaacgccctgaccgtgtttatggacaccgtaaagggcacgccggacaccattgaatccggcgactggaccgcggcggattacctggatgatgccgggaacacgattccgctacacaaaaagctgtatgagtacccggcgctgatcaccacccgttgccagaactggacactgaacgaaaccgagctggcggagtttttggctatggcccagcgctgcgcagaccgcggcgtggagctgaccattgtgctgccccccatggccgccaatgtgcgcaccgaggtatgcgatgcctttggcattaccgccgtgatgcaggacgaagttctgccgctgttggaaaagcagaattttaccgtgctgaattacgaatggggcaccagctgcattaccgatgatgacacccagttttttgacgggttccacctggacgaaaaatacggcctgccggactggacagccgaactgtttgatgatatgcagcgctgatgctgccccaccccaaaaaggaggtcccctgtggcactggactttttgattttgtacgaacacactgttcgggaatatgagagcgatcttttgctcaaattggagctggagcgccgcggctacaccgtgcgcatccgccagctgctggatgccaaagatctgcgcctgtttggcaaagacaagccggaagttctggttgccagctgcatgtatgacaacgaagccatcaacagccatgtgtacaacaacattggcaaatgcagcaaaatcgtcaacctgcactgggagcagatgctctccgacacgcaggaggagggcgattggttcaacatgaacggcaacgccaagcgctgcgtgcagacttgctggggccagcgcactgcccagcggttacaggcccatggcatggatgccaagaacacccccgtgaccggcgctgtgatgatggactttctgcggccggagttcaagggctactttaaggataaggaaaccctgtgcaaggaattcggccttgaccccgccaaacagctgcacctgtacatttccagctttggctatgccagcatgaccgaccaggaagtggccgagctttccaaaatggcgggaacggatttttccggctttgcccgcaccaaccgcgtttcgatggaaaaaacgctggcctggtttgaccgctacctgggtgaccacccggaggtggaactggtataccgccgccaccccagcgaatggaaatgcaaagccctggacgagctggccgccaaacgccccaacttccatgtgatttttgcggattccgtcaagcagtggattgtggcggcggattccatctccatctggatgagcaccgctgtggccgaagtatacatggcgggcaaaagctgccatatcctgcgcccggtgcccatcgagcacgagtatgaccccgtcatctacaaggatgctcactatgtgactagctacccggagtttgccgctgccatggcgcagccgaacccgccgttccccattgcacgggatgtgattgagggctattttgacccctcccctgccccggcctacaagcggatggccgacctgctggaggaagtatacaaaaatcccccgcgagatgaaccgatggggcccggctttacgccgcacttcaacctgctcaagttctgcgcactggcgggggtacacatgctgtaccgccacaagtgggaacccaaacgggtgtttgccttctgcccgccgctggccaactttgcccagcgcatttacggttatgtggacaaagcctatatcccgccggaggagatccagcgcatggaagcgcgcatccggccatatgtaaaataaagttgtttttccggcgcgctgcggtgcgcccgctgcaaatgggagcctgccatgtctgaaccgaaaagaactgaaagctttgccggaaatgtgatgaaatactccattgccacctaccttggctttggcatttccggcgcagcgcttatcatcaagggcgtcctgcccgccgaaagctacgccgttcctgcttccttcatggcatacaccatgtcgctgatgaacgtgggcatgcttgggctggaccaaagcctgctgcgcttttaccacgaaccgcctgccggttccaccgggcgcagcatgtttgccgcgtgtacccggctttcggtgctggtcatgctgctggcgggcggcatcggcagcatctttttcgccaagccgctggcggcggcctttggccttggggccaacggtgccgggctggtgccgtttttgttcctgaacgctgctctgtacatgctggtgcgttacctcaacgtgctgctccggctggaaaacaatgtgcgcgcctacaccaccgaaacgctgtggatgcaggcctgcctgaacctgatctacctgctgcccggctttgttacccaggatgcccgcgcttttgtgctgggtgcggtgtgcagctttgcgggggtcgcagtgttctattggcggcgggcttctaaaggtcaaacgaaagaggcccctgtgcgcggcctgcgcccctatgcccacatttaccgggcggcactgccttacggcattgtgttggcacctgcggccatcctgatcccgctgtaccgcgccatctgcctttcttttttaggcaattacgcccccgcggcggagcagggttcgtttgatttcgcttacaccctggcccagcttgtcaccaccattcaggccggtttttccacctactggggcccctatgtctacgcgcattaccgcaccgagcaggagcgcattggccgcatccatgatctgctgaacctgctgatcttcggctttttctgtctgctggtcatgtttgaggatatcatcttcatcatcttcccggccaaatcggcctgcctgccctactttccgctgatgatgctggccgtggtgttctccatcctgtgcgaaggcacggtgtacggtaacaccattgcccgcaagccgttccaggatacgattggaaccgccgtgggtgttgcggccaacattgccgtatgcgccgtgctggtgccgcgttttggcgtaatgggtgccgcggtcggcctggtagcggccaatgcaacgatgtttttgtaccgcactgtgaccgggcagtattactaccgcaccatccccagcttcagccggacgatctgcggctttttgctggcggtgggtgtggccgtgatcggcgtggtgttcgcccacaattttatcatcaagtttgttttaactgcagcaatcctgtttatttactgtaacatttaccgtgcccagctgtacaagctgtggcagatctttatgggctttgcgcggcggtatctgctgcacagccaagcataactactgcaaaggaaaggttgtatatcaagatgaagcattgcggcacacaagagttgaccaccgagcggctggtcctgcgtcgtatgacaaccgacgactgcgaaatgatgtttggcaactgggccaatgacccggaagtgacccgctacctgcgctgggagccccaccgtgactgggtggtaacgatggcatatctgaacgagattgtcaaacaatatgaccgcccggatttttatgattggggcatctgcgataaagtgaccggtgtgctgatgggcagcatcagcattgcccccgccgaatcctgtgagcgtgaaaagccctatgcctggaaaaacgtgaaaaccgagctgctgggcggcatgtatgagatcggttacaccttgggcaaaaagtggtggaaccagggctatgccaccgaagccgccgctgccgtgcgcgattactggtttggcatggtaggtgcgccctggctggccgggttccacgccagccagaatgtggcaagcagccgcgtgttggccaagaccggcttccattatgaccacgataccgttctgcaccgctttgacggcaccgaggtaccctgcctggcctggtacctgctgaaccccggcagccagaaatccgatgaaccggcagccgctgcccccgctgtacaggcagaaccaacggaaccagcggagaatgccgagacaaccgtctgacattcactcccctgccccatacttttgctgacctggccgaatacggccagaaaggacccctatggacgaaatgaaggaccccatcaccctggactttaccgctacccaggccccggcagaggacgcccctgttgggcagaaggctctggacagcgagcgcccaccggtgcgcgttgtgctgctggcgcttgaccagggcaagtttgactcccagcgcagcctggatgagcttgccgccctggcggaagccaacggcatgcaggccgttgctaccgtgtgccagaagcgcagcacccccgaagccgccacccttctgggggagggcaaagtggaggaagcgcgcctgatatgcctgaataccgatgccgaggccgccatctttgacggcgagctgaccggcagccagatccgcaacctgagcgcggctttgcaggtggaagtgctggaccgcacgatgctgattttggaaatcttccgtgcgcgcgccaccaccaacgagggcaagctgcaaactgagctggccaccctgaaataccgcatgccgcgcctgcagggccttggcgaggcgctgagccgccagggcggcggtggcggcggcggtggcggtgcccgccgcggtgccggtgaaaccaagctggagctggaccgccgctacctgcgcagccgcattgaaaagctggaaagccgcctgaaagagctggaaaagcgccgtggtgaaacccgccgcgcccgccagaaaaacggtgttccggtcatctcattggtgggctacaccaacgtgggcaaaagcagcctgaccaacgctttgtgcggcgcagaaatttttgaagccgacatgctgtttgccacgctggatcccaccgcccgcaaatgcacgctgcccagcgggttacaagtgatcctggtggatacagtcggctttgtcagccgcctgccgcatgatttggtggatgcttttaagagcacactggaagaagctgcctgctctgacatcatcttgaaaattgccgacgccagcgacagcgaagccgccgagcagctgagcgtgaccgatgaagtgttgaacgacctgggctgcggggatatcccgcaggtgacagtctacaacaagtgcgaccgcaccggtgttgccccctatgacccggatgtgctgctggtaagcgccaaaaccggctacgggctggacagcctgctggccaagattgacgagattctggcacaccgtgtgcgcaccattgaggtactgttgccctatgacaagctggccctggccgatgtgttccgcacccgcggcagcgttctggctgaagaataccgcgaaaacggcgtgtattacaaggcaaccgtaaaggtggatgacctgcaccggtttgaagcgtacctgctgtaagcgcaaccgttcgctttgtgcaagataacaaatactgattttattgctgattgtagacaaaaagacctccatccctgcacggttctgtacttgggatggaggtctttggtttatttgtgtgtaccctgcgttacggcaaaattattccgccgtcagcagtttaacagcgcgggaggtgcccaggcggtctgcgcccagatccaggaacttttccatgtcctcaacggtggaaatgccgccggctgccttgatcttgcagcggccgcgcacgcagcgggcaaacagctcaatatcatggaaggttgcacctgcggtagaaaagcccgtgctggtcttgatgaagtcggcaccggcttccaccacgatatcgcacatcttctctttttcttcatcggtcagcaggcaggtttcaataataaccttgagcaccttatcccccacggcccgcttgacggcggcgatatcctcgcgcacagcgtcatattccttgttcttcaggcggccgatattgatgaccatatccacttcctcggcgccgttttccacagcggtctttgcttcaaagcacttggaagcagtatccattgcacccagagggaagccgaccacgcagcacaccgcaacacggcccgccatatactgcacagcctgcttgacatagcaggtgttgatgcagacggatgcagtatgatacttgatggcatcatcgcacagggcctgaatctggggccaggtagcctccggtttcaacagggtgtggtcaactttggaaaggatttcctccttggtgtatttcat

SEQ ID NO: 465 - DNA, 8519 bp, unidentified
  source 1..8519: mol_type = unassigned DNA
atggcagcaagaatttcaaaggctgatttcgatgaaaaagtattaaaaagcaagcttccggtaattgttgatttttactcggattcatgtgtggcctgcaagaagctggcaccggttctcggagatatcgaggatgattatgaggataagcttcacgtatacaaggtcaacacaaactttgacggagagctcgctgatgagtatgaggtgactgcgaatccgacactgcttttcgtaaaagacgcagaggtcttagacagaaagatcggcgtacaaaagcctgccgatttgaaggcgtgggttgaagcattattatagtttttagattattatataaagcagtctgatacaggataataacacttacagataccacaatctgtgacacaggaggaaataaaatgactatcacagtagcaggagagaagaaagaatataaggatggacttacattaccggagcttatcgagcttgagaatgtagatatgcctgagtatgtaacagtttcaataaatgaggaatttgttgccacagaggataagccaaagacagtgcttaaggatggcgacaatgtagagttcctttacttcatgggaggtggatgctaatggcaatgactgatgagcagatcgagcgctattcacgccacattatccttaatgaggtgggcgttaaaggtcagaagaaattattaaagggcaaggtgcttattatcggtgccggcggacttggagctccggcagccatgtatcttgcggcagcaggagttggcacaatcggtattgtggatgcggatgaggtagatttatccaacctgcagagacagattatccacggaacagccgatgtgggcaaagccaaggtaaagtcagcaaaagagacaatgaacgccatgaacccggatgttcaggtcaatacataccgtatgtttgtagatgcgtcaaacatcagagagcttatcagggattatgatttcatcatagatggaactgacaatttcccggcaaagttcttaatcaacgatgcatgtgtgcttgagaaaaagccgttttcacatgcaggaatcatccgtttcaagggtcagctcatgacatatgtgccgggagagggaccttgttacagatgtgtattcaagaatccgccaccaaaggatgcagtgcctacatgtaagcaggcaggcgttatcggagctatgggcggagtaatcggttcgcttcaggctatggaggctatcaagtatttaatcggtgttggagagctgctcacaggatatctgcttacatatgatgcactcaccatggagttccacaagattaagcttccaaaggatacacacaactgtgcagtctgtggcgaccatccgaccattctcgagccaatcgactacgagcaggaggtctgcgaggagacagcgggcagatttgatgcacctcgtacacaggaataaaaagacagtaaggaaaggaacgatatgagtatcataagaatgaaatatccgtttctggatgaaatagcaaaatatgctaaagagcatctgccggaggaggcgtgcggtctgatagcaggcagtgaggacgaaaacggtcgtctcatcacaaaggtatattacctgacgaatacagaccatgccgaggaccatttcacaatggatccaaaggagcagctggcagccataaaggacatgagagcaaacggccttaagccgcttggcaactggcattcacatccgtctagcccttcaaggccatcggatgaggatataaagcttgcatatgatccaaatgcgagctacatgataatgtcgcttatggcagaaaatcctgtaatcaactcgtttcatatcgagggtggacaggtcacgaaagaggatttacgaatatattctgatgaatattacttctaaatcatatgttaatgttttgagtcgcagcgaaagctgcaaagaaaagtcagcttcatcgaagatggcttttcttttttagagaaagatgttattatagcatgtatatttaataaaacgaaagagcgttcgaaaatgaaattaaaaacgaaggaacttacaacatgtgcgctttttgcggcacttatagcagttggagcatttatcaagattgatattccgcttcctatgtacaccatgcattttacattacagtggttctttgtgctgatggcgggatttctgctcggggcaaaactggcatcgcttagcgtgatagtatatttgtgcatcggactggtgggagtgcctgtatttgcggcaggcggtggtcctacatacattttaagaccgggctttgggttcctcttaggctttgtgcttgcagcatttttaatcggagcgattacagaaaagcttaaaaagaccaatgcgtttatactcattcttccggcaacggtcggactggtggcatattatacagttggagcaatatacttttactgcatgaagaatttctatgtggcaacacctgtcagctggggcatcgtaatagtagattactgtctgataactgttgcaccggactttatattatgcgtatcggcagcagtgttttctgctaagcttcgtcctgtttttgaaggaatgctcaatggatacagtgtgaagcataaggcaaaaaataaagcataaagcgtataataaagtataaaataaggcatgaaataatgtatgaaataaagtatggatatagtattacagggagataaaaatggcgtattttccgatgtttgtggatatgacggaaagagagtgtctgatcgtcggcggtggaaatgtggcataccgcaaggtgatcgtaatgctggattttggtgcgaaggtcacggttgtggcagaggatatatgtgatgagctgagaaagcttacaattgatgatatagcaagcgaggataaaacgggctcatatacggcaaataaagaaaacaatcagacggattcggatgcagcagatagaattacgttcataaagagaaggtttgaacgaaaagactgtgacggcatggaaatggttatcgctgccactgatgacaatgctttaaatcatgagattgcagagtattgcaaagctaaggacatcatggtaaatgcggtcgatcagaaggctgattgtagctttatttttccgtcatacataaaggaaaagaatcttgttgcggcattttcgagcggaggaaacagtcctgtgctgactcagtatctgaaaggcaaagagcaggagattcttactccgtttcttggtgagctgaacgaatacatgggacagatccgcgaaaaagtaatagcgcaatatgacactcaagccgagagaaagcgtgtgtttaaagaaatcttgtgtgcagctattgataatggaaggattccggaaatatagtttaaagtatggtattacagattttaagttgttgttcatttataaatgataaatggaaaatggcatgatccgtaggagagtaaaatgaggtatttaataggaacgagaggctcaaagctagctcttgttcagactgattacgtgatagataagttaaaaagagcatatccggatgatgattttaaggctgttatcataaagacaacaggcgatttagagcagaaaaaggcactcgataagattggatcaaagggtatcttcgtaaatgagatagaggacgagcttttatcgggaaagattcatatggcagtccattccatgaaggatatgcctgatgaaccggcagcagggcttacatttgcaaaggcatggaagcgtgaagatccaagggatgttttggtactaaaaaatgccgcttcactggatgagcttcctcatggtgccgtgataggaaccggaagcaagcgcagaaagtatcagcttttaaagctgcgtcctgaccttaaggtggttggcatacgcggaaatatcgatacaaggcttcgtaagctatatgatggtgaaattatatatgaagagattgccgataatactgtaaataacaatgagatagctaacgaaaaacagaataagtataacgaatacaggctggatggaatcgtacttgcagcggcgggaataaagcgtatcggaagagattctgagatcacacagtacttttcagaggatgatatgattccggctccggcacagggcacactggcgcttgagctacgtgctgacaatgctaagctgatggcaaagcttgatgctttgtcagatgagaaaaccaatctgtgcgcaggcattgagagagaatttttaaagcgaatcggtggaaactgtcatctgcctgtggctgcatactgtgatattgtaagtgaaaaagaccgcggtaatgacagcaacaaaaataacaggctaaagcttcttgcgatgtttggctcagaggatggaaaaaagcttgcaaggacagagcaggtatgggatattacatcagacagaaacaatattgtggagcgtgcggtgcacgatattcggtataaattagaaatcgactaaaaaaatatcaagtcataatttttaatcataataattcagtagaaaaataattaggaaaatcatgagagaaaacacaggaaaagtagtattagttggagcaggaccgggagatacgggcctgctcactttaaaaggagaaaaatatataaaacaggcggattgtctggtgtatgacaggctgtcatcaccagagtttctttcaatggcaaaggcaggctgtgagcttatttatgtgggcaaggaaaatcacaagcatgtcatgaagcaggatgccataaacgagcttttgtacgagaaatcaaaatatcatgagcttgtagtccggttaaagggcggagatccgtatgtatttggaagaggcggagaggaagctctctacctggtagatagaaatgtagaggtagaagtggtaccgggtgtcagttcatcggttgcagcgcttgcggctgcaggaatacctatcacacacagaggcatagcaaaaggctttcaggtcatcactgcgcacagcagaaaggatgaggaggcagatatagactattcccttcttacagatgagacaatcacctgcgtatttttgatgggacttgcgcatgtaaaaagcattgcagcagggcttatgaaagcaggacgaagagcggatactccggcagcagtgatatcgaacggtacacttgccgcgcaacgcaaatgtatcggaacgcttgcggatatcggagaaaagattgaggaagcaaagctgacatcaccggctataatcgttgttggagatgtggtttcactgaatgacaggcttgatttctttgaaaaaagaccgctgtttggaagaaaaatcacagtaccgtatatcaaaacaaacgaattgatagcaaaattacagcagcttggagcagacatcacaccggttaagacaggcataattaaaccagttataattcctaaatttgttgataaagtaagatcggcagactggatagtttttacaagcaaaaatggtgtaagatcatttttctataatctggatctggcaggggcagacatcaggcttatagcaaatgcaaggtttgcagtagtgggaaaagctacagaaaaagagcttgcaaagcatcacataaatgcagatattattccggcagaacagaccggaaaagaacttgcaggagaattgagttcgtatatgggcgataatgatgaaatcaaagtctgcattttctcagcaaaggaggcttcacctgacattgaggcagggcttaaagaaatatgtcaattagaaaaaattgatgcatatgtaaatgagcaggcatatgagggtattcctgaaagcattggaaacatggtaagtgaagctgtttttacaagcgcatcaaatgtggaaagattttttcatatgctgccggagaatgcatacgtggaaacagcatactcgataggtgaaaaaacaacagcagcattagagcagcacaatgtcagagagatactgcaagctgatgacagcagctatgaagcactggtagataaaatatcttataaagatgcttttaaagattaagaatttatggtgacaaaagttatataaagttatataataaatgcaaagttatataagactatataaacttatatacgaaacaaaaagttatataaagttatataagaggaaaatcaaaatgcaaaatccatttacattatcattcgggaaaaaaccactgcaatatatatcaagaatctcacagaccaatcagatagtagagacatttaggtcagaaaatcctgcaaaccagctttttatgataaccggggtaaggggatcgggcaaaacggttatgatgaccaatatagtatcagagataaagaaggatgaggaatggctgacagttgagcttaaccctacgagagatatgcttcagagccttgcagctaagatttacagtatgcctcagatgaataaaatatttgtcaatgcaaaactggatttttcagcgtttggactgggcgtttccatagaaaatgcagcaccggttacggatatagaaaatgtgctggaattgatgcttgaaaatataaagaaacataataagcggttactcatttcagttgatgaggttacgaactgtgaatttgtaaaagtatttgtcagttcatttcagatatttctgagacaggattatcctatttttctgcttatgacggggctgtttgaaaatatatatgatctgcagaacgacaaggcacttacatttttgtacagggcgcctaagataatgcttgaaccacttagctttacagcagtcaggaaacactatatggatatttttgaactggatcaaagagaggcagacaaaatggcagctcttacaaagggatatccttttgcattccaggtattgggatatctttactgggaaaacagggatgatcacacgatagaagatattttaccggaatatgatcagtgccttgatgagtatgtgtacagtaaaatctggtcggagctgtcagagcttgataaaaaaatattgttggaaatatcagtaagtggtgaagaaaaggtaaaagaaatcagagaaaaactggatatgaattcaggattattctcggtatatagagaccggctcaaaagaaagggggttatagatacctctgagtacggtaaaattactctcacacttccacgatttgaagaatttgtcaaaacgcgccaaatgtaatatactatatctaactgaaacattaacataataaaggagaagcacaatgaaagaatacagtataggtacaaagtgtgtacaggcaggctatgcagccggaaacggagagccgagacagattccgattattcagtcaactacattcaaatatgacacaagcgaggacatgggaaagctttttgaccttgaggcagagggctatttctacagcagactgcagaatccaacctgtgatacggtagcaagaaaaatcgcagctatggagggtggcactgctgccatgctcacatcatcaggacaggcagccaatttctatgccatgttcaacatatgtgagtgcggagaccatatcgtggcatcatcatccatctatggaggcaccttcaacctcatcgcggtaactatggcaaagatgggtattacagctacattcgtatctcctgatgctacagaggaggagctgaatgcagcattcagaccaaacacaaagcttatgtttggtgagactattgccaatcctgcgcttacggtgcttgatatagagctttttgcaaaggtggcacacgagcacggagtaccgcttatagtggacaataccttcccgacacctgtaaactgcagaccaattgagtggggcgcagatattgtcacacactctaccacaaagtacatggacggacacggagccacactcggcggagcaatcgtagacagcggcaaattcgactggatggcacatgcagataaatatccgggactgtgcacacctgacgacagctatcatggcatcacatatgcagagaaattcggcaaggaaggtgcgttcattaccaaatgtacagcacagcttatgcgcgattttggttctatgcagtcaccacagaatgcatttatgctgaatcttggccttgagtcacttcatgtgcgtatgccaaagcatgtggaaaatggacaggcagtggctgaatttttggaaaatcatccaaaggttgcctatgtaaactactcagggcttccttcaaacaaatactatgagagagcacagaagtatcttccaaacggaggctgcggagtcgtatcatttggcttaaagggcggcagagaggcagcgtctgcatttatgaaggcattaaggcttggtgcaatcgagacacatgtggcagatgcgagaacctgctgcttaaatccggcaacaagcacgcatcgtcagatgaatgatgagcagcttaaggaagcaggagtgccggcagagcttatcagaataagcttaggtcttgaggacaaggtggatttgattgcagatatctcaaacgcactcgacgctataaaataa

SEQ ID NO: 466 - DNA, 11698 bp, unidentified
  source 1..11698: mol_type = unassigned DNA
ttaggcggtgcattgtgtaaggcttggcagctcattttcagttgtttttctctgtgtgcccttgtcaagcgatgttttcgtgcatgctttaacatcgctaatttcccgtccagcattgaacagtgcattgattgtcgatgattttccaacacctgtaaagccaatcaaagcaattttaggaggttcaacatcttcaaccgcttttctaagctttttttccatctcaaatatttgagccaagctcattcctgctttttgcaacgtcggtttaatttctccaaaaattctaccgaaagatccattatcaaacatctttctgtcctcctttttgcttttgtaatcgtatgaaatagttcaacttcaaatgggcggacatcctatttacttatttagcatcacctctaactctatcttatcatactactattttcgatttaacagtgatttgtatcttccaatttccagaaaccatatggttccatattatacaccgcaaatgatgtctcgacaatttccttaaaaagtcacatgcgatgttccgcttttagccggatagaaatccgttgcctgccatccgccacgtagaggcagcatatctagacggcgtagccatgctttgagcatggcttagtcataatcacgcaaagaactggtcttccagcatcaggcacaggcaatgatagataggcaaatgcagttcctgaatcatataggtctcggtctgcggagccttgatgcacacatcgctcatatccttcagtttgctgtcctttgctcccgtcagtccaatgaccttcattcccttagcgtgtgcggttgtcgccgcatacaacacatttttactgttaccactggtggaaatgccaaggaacacatccccggatttaccgtaaccattgacctgctgcgcgaagcagagtagtggttcacagtcattcatataggctgtggacagagcgggatgaccatccagtgcaattgcaggaagtgccccctgcagattttctgccaaaacagaaccaagctcctgattttcttcaaccagcttttctgcgaaatctgcttcaggcttacgaggcagtttgaaacccttcattagctcaccaacgatatgctccgcatctgctgcagaaccaccattgccagccacaagaagctttccaccgttcttataggactcctccaacaaaaggtatgcggcaacaatatcattctttgccgattctaaagaagggtatcgttctaccaacaagtcgatatgtctcatcaatcggttatccagttcacacatagtcgtactcccccctcttatttcaggtactgttctacaaagtccttcaaagacgataccgtcacagtttgtccgcaggactcagagccaatcaaagcagtctgacatccggcattctgacccgccttgatatcattttccccatcgccaatcatccaagactgcgacagatcaatgttaaaatcccgtgctgcattcagcagcattccaggtttcggtttgcggcaatcacagtcaaacttcagatctgggcgctccccttcatatcccttatgcggatggtgtgggcagaagtagatggcatccagatatgcgccttctttgcctagaagtgtctccattttgttgtgaatctcttcgagttcttcaaaggacacttcaccacgggcaatcacaggctgattcgtaacaacaattgctagataaccggaggcgttgatttttttgatcgcatctgcaacgccgtctatcagttcaaactcgtctatgttccgaaggaaacccacatatttattgattgtaccgtcccgatcaaggaacaccgctttctgcttgttcttcagattcttaccggaaacacgaccagtcttgtaatcctcgcatacagagtaatagcgttcgggtgtccccatgtccttcacatattcaggactatcgtagcagaacatctttccggttcctgccaacggcttaaggagctgacggtccaagtcaaccttgatgggtttcccgttctctcccatcgcaccaaccttgtccgcattaatcctagaatgatccaaaatgctcggattgataacatgaagtccagcattgacacgattacggtagtattccggacgttcatcttccttagccagccattgctcgacagttccatttttatcagcaataatgagtccgctgtcataaggatggctattgggatgcgtgaatagagtaaccaaaccgccatgctgtttatgaaatgcaacgaaccgattgaaatccacatcgaacaccgcatctgcattcagcaatagaaaatccgaatcaagcttgtccctgattttgaaaagcgcaccggcattgcccaaaggttccttttcaagatagtattcaatatgaacaccgaagggcttccctgtcacaggggaaattccagagccgtccccgaagtagtccataatgatgtttcccagatgagaaacagtcataataatgtcggtgagcccttggtcacgcaggcattccagctcatgttccagaacaggtttgccttcaatttttatcattggtttggggatgtcgctggcaaccgaggaaatacgtgttcccttgccaccggccattattactgttttcatcttaaactttcctctgcttctcatttagctcttttcttaagtacagaaaacactttgaactctttatcggcccataaaatgctaagaacgcacaaaattagtacagcaccccatctaacaacaatctgtccccttaggaaaagtgaaagcgccgcaacaataataagtgccccagaatagactattagcttcattaagtcaaatatctgccgtccatgaattttaacagccaaaaagtagtgaatcaaaaaataaattaaatagataattaaggttgtatatgccgctgcaatacttccgaaatatttaataccaaagtagttcatgattatgtttaagactgccgccgcacatgttccaccagcaatataattggttttttcatagtagtactcaatctgtgcaggcaggttgtataaaaaagcaaaataaccactcacaaccaatggtgcaatataaaaaacagaggaagcatagtcttcagtgcctagaattcccaccaactctgggctcacaaggagaactactgcgataaaaagcatcatcccaaatgcaaaagagtttcctctcttacgaatcaggtcatatttcttttcaaccattttttcatagaaccacggcccccatacattttggagagatgtcgatgtaacaaaaacaagattataaatattatatgcgaagctgtacacaccagcattttccgctcccgtcatcgactttatcatgatgcggtcaaactgatttaaaataacctgagaaactccatgaaaaatcaatgggacactaaacgttagcccaaaccgccatttttcggcatcaaatttcaatccactttttgtcccgcagaggaagtatgcagcaatgcacattccaataataatcgccggcacggcatttcctataacgcgtccaatatatctatcatcggagaaccaggttgtaataagaaatattgatatcgccgttgtggatacagcattcactaacgaaactgcaaaataacttttatatttatactctaggctcacatacgaattatacagagtcagcaatgccgctgcatagctctgaattaagagcaaattaaacacaagtcttgttaaatccaacatacctgccagcatcggatatatgatgttggcaagaaccatgattgcagcagtcgatataacgcccatttgaacacatgccgccatatagctgctgaattctatcttcgaactatatcgaatttttgcgtttttcaggcttgcatgtagcgccagaccaagtacaactgatagcatcgactcatacgctacataggtattaaaattaccataatcagctgttgacatcagtctaacgtatatcggaagtgtaataaatgacaaaccctttataaagtaatttgcaaaggtgtatcctattccagctttaatgtattttttatcgctgcttttactattcatattttccttaatcacacttttattacggttgttcatctaagattttctttataacacccgttaactttgtacttgaaattccatctgtatgggatagatatataatttcgaccccatgcggttggagctgtttctcgtacttttcccattgtggagttccttcccaatccgagccaacaaacatcttgtcaaaatgatacttttcccacgctcccagcttattcttatcctcttgaggtacaaccttatcaacatcccgtaatgctgctacaattgcagctctctcttcatatggtattacaggtgttttgtttttttccttctgtaccaattcatcagtgctaacacctacaattagataatcacactgttctttagcccgatgaataatatttaggtgtccaatatgaaacatatcatatacacctgtcgtatatcctattatttttttcataaaaatcttctttcctcaatgatgcataagcattactcagaataatatgctcatagcgaaatttatttaatacctatatgtctctttaattcccatccacttctggtccttatcgctcagattcagtgtcgtaccatctttcagcatatagccttccgcacttgcacttcctttgtactcaccctgtacttccggccactcaataccgatttcagggtcattccaagccataccgccctcatcattcggatgccagaagtcgttgaccttatagcagaactctgcctcgtcgctcagcaccagaaatccatgtgcaaagccctccgggataaggaactgcttcttgttttcagcagacagcgttacgccataccacttgccataggtttccgagttgcttctcagatcaactgcaacatcgaacacagtgccatgcactgcacgaaccagcttgcactgcggatactgcttctggaagtgcagaccacgcagcacgccctttgtagacatggactgattatcctgaacaaagtgaacgtcaatgcccgcttccttcatgtctttttcattgtaggtttccatgaaatagccacgcgcatcaccgtgaacagcaggctcgattacgcaaagcccctcgataccgcctacatttttctcaactttaatctgtcccattttcaagcctcgatttctttcagatatcggctcagcgcatcctgccaagtcggaagcggcgtgaaaccagcttccaccagtttgctcttatccaaacggctattaaacggacgagccgccttgctcagaccgtactccgccgtagtaacaggaaccacttctgtcttatatccagcctgacgatagatttccttcgtgaaatcgtaccagctgatatatccgccctcgttggttgcatgataatagccgtatttctcggtttcgttcatatcaaccaacagccgagccaaatcatatgtataggtcggtgtaccaatctggtcattgaccacccgaacagtatcgtgggttttgcccacattcagcatcgtctcaataaaattcttgccattcagaccgaatacccatgcgatacggacaataaaatacttttccagtgtctggctgacagccaactcaccttccagttttgtctggccgtacacattcagcggcttatagtccttgcagtccggcttccaaggttccgtcccctgaccatcgaacacataatccgtgctgatataggtcattttgcagtccagcttcttacagacatccgcaatgttctgtgtgcctcctgcattgatggcacggactttcgccaccttatcgtcatcttctgccatatcaacagcggtccatgctgcacagtggatcactgcatcgggatttacttctgtgataactttctcaacagcttctttattcgtaatatccagggcaacatacggtgcttttgttactgcggaaccgtctgccataccactgtaattttcctgaatatcagagccaacgccctcatgaccgcgcttcaaaagctcgttcattacgtcatgtcccagctgtccgccaacgcctgttacaaaaaacttcattccgattcctccctaggctttagcggttactgtacattttctcgtagtagttctgatactcgccggaaataatggtctcccaccactcacggttatcgagataccactggatggttttcttgatgccatcttcaaacttggtttccggcagccagcccaactcattatgaatcttggtcgggtcgattgcgtaacgcatatcatgccccttacgatctccaacatgagtaatcaagctctccggcttgcccagttctttgcagataatctttacgatctcgatattctgcttctcgttgtggccgccgacattgtagacttcaccaacgcggcccttgtggataatcagatcaatagccttgcagtggtcctccacatacagccagtcgcggacgttcagaccctcgccgtaaacaggcagcggtttgtcagccagtgcattggcaatcatcagcggaatcagcttctccgggaagtgatacggaccatagttgttggagcaacgagaaatcgtcacaggcaggccgtaggtacggtggtaggccagaaccagcaggtcagcggcagccttggagctgctgtacggagagctggtgtgaatcggagtctcctcggtgaagaacaggtcaggacgatccagcggcaggtcaccgtaaacctcatcggtagaaacctgatggtaacgctgaataccatatttacggcaagcatccatcagcacactggtgccgatgatattggtctggagaaagatgcccggatcttcgatggaacggtcgacatgagattctgccgcgaagttgaccacggtgtccggatgctcttcttcaaacagcttatccacagcttcacggtcgcagatatcggccttcacaaaacggaaattcggattgtccataacagatgccagcgtggacaggtttcctgcataagtcagcttgtccaagcagatgatccggtaatccggacacttctccagcatatgaaaaataaaattggaaccgatgaatccggcaccgccggtaacaatgatagtcatttgatttttacctttcttaatatcgaatttttccatccgcaactgctttcaaatgcattccatacggactcttgccgtatctggatgccgattccagtagtttttctctggaaatccagctatttcggtatgcaatttcctctggtgcggaaattttaatgctctgacgcttttcaatcatctgaacgaaatcagcagcttccaccaggctgtccatcgtcccagtatcaagccatgcgaacccacgccccaaaagctgaacatccaagagttcttcctttaagtacatctcattcagcgtggtgatttccagctctccacgcgcagagggcttcaccgcattcgctctttgagatactcctgcaggatagaaatacaggccggtaatagcataattgctcttcggcttctgaggcttttcttcaacagatatcactttgcctgtttcgtcaaattcgacgattccaaagcgttccgggtcgttaacataatatccgaaaacagtagctctcttctcctgctcggcattcttaaccgctgccttgagaattcggctgaagccattcccatagaaaatgttatcgcccagcaccatagcacaggcatcatcgccgatgaattcttcgccaagaataaaggcctgagcaagtccatccgggctaggctgcacctcataagaaagacgaacaccgaactggcttccgtctcccagaagtgcctcaaagcgcggcgtatccattggcgtagaaataatcaggatgtcctgaattcctgccagcatcagcgtggacagggggtaataaatcattggtttatcatataccggcaaaagctgtttcgatgttaccatcgtaagcgggtacaatcgggtgccgacaccaccggcaagaattatgcctttcattgttttttctccctctactatattagtgaattttcttcaatatggccttccaaatttcctggcatgtccagttgtcatacttccagaagagttttcttatcttctcggcttttgcatcgtatttcgtagtaccgctcattaatgcaattagctgctcttgcaaatcgcttggtctttccactttttgggttatgcatattgaatcatagtccattaaaaatcctctatcttttgaaatataatatgtataatccggaacgtaatacaatatcttctttctaaaatacagcgcatctagcattgcagatgagtaatccgtgacaagcatatcaatgtatgggaacaggatattaatatcaaaatcactgttcaacagtagataattttttccttcacgtttttcaacggaattgacattagaatcagcagaatgcggcttttcgatccataaataattagactcttcaatatatgtacgcacggcctcaatatcaagtggatggataaactcttcataactatccctgaaggtcggtagatacaagataaccccatcaaagccgcctaatccattcagtactttttcttcttccggcaaatacttctcacatcggcatgttctcggataagccgcatctatgcaataagctttatttgcgccaaacttgatttcaaaaaattcagcatccaagtcgctcttacacaggagataataattcccagaagtccatccgccgcttgctgttacacaacgaagaattttatggaatctagtttcgtgagttcgattcatattcgttccctcaacacgctttattccatttccatgccataattgtacttttttgctgaaagcagatagagaagtatcgatatcagcagtatactttccttcatcgccatagacattgcatataatatgaatacccgatttacaatgccaataaaatgacttcaatgttccaattaagacacactcatacccgtaggactctagtaactccaacacctgtctcgatctcgttgcccaaacaacatgatttatatttagttcttttttatggttacttagatattgaaagagaaatctcgaattatccgcaaatttatcacccatccaagcaccaaccagcaccgtccgctcatttttacctaaaagaatccctaccaatcccacaaaaaggttctttgcaagattaaataatcgttttccaactcttagcatttcacatctctccaacaacaatccgctttttaaagattatttattgcataactctttggattttttcaaggcttctaagtatttaagtccgtatctctcatccggctccagatgtgcaccttcagcccattcattccacgcattaataaaaacaataccctcctgaccagcacgaatagacttcataatctgtgcagtcaaatactgttcaaaacgctcaggagttgaaccatcatacacaatagaatttttccctcttcgtgcagtattgtcccatcctgtgaatgcaccaacccattctttatcatcctcaattggacgctttgaagatgccgtagcagcatcattatagtaatattttttgtacgttctaatattcagcagttgcaatactttagtaaatccaacttccatggcatatttagggcatattctaaaagctttcaaaaaattatcgcctagtatagctgttgttgctgccggttcaaaatcaatccaatgatcaaacttgtctcttaagctccgatcattttgtgggtattggcaagcaaaacaaaccccagaaaaaccagccgccatgactgcttctcgccactccgccaagagtacatccaaattgtcgataagttgcggcttataaatcaataagataggtctccctttttcatccctcaaatatcgttcatctgaaaagaatttcatcaaatattcgatatgattttttctatcttctccatcaccataatcctgagcaattagaactgattgttcacttccatcccaacgccttgaccaattctcattcgcccaacataagcaaaacggcatatttaaagatttgtcagctaaaaacctttcaataggtttttccatcaatttctttccctgagcaaaccaatagtgatagaagcagaagccatccactccatattcttttgccagtctaatttgctctgacaaaacattttcattctttacaagatcataataatttccattcaatggtgtatgcggttgataatgtcctgtaaaattaggttttcctttcttagtgtttgtccattcagtgaatccctttccccaccatttatcattctctggaaatgtgtgaaattgtggcaaataaaacgctataattttcattcctcatatcctcgctcaaatctttcaacctgattttcttcgacataatccaattttgcttttgcataagacacaaaaacaaagaacgtcaaatatgttttggcatataatatcggagccccatataaagcaaacatcaccagcataaatcctatataaattgccacaccatcatgtaacttcatgcttttcaccaaaattttaatgaggtaaagcaaacatccgactgcaataactggtgaccagagcagcaaataactaagtaatacagaatgcgggtattccatgctaaactctcttgccgactccctctctatcgcatacagagagaatggcaatccatgtgggttctttttaaggattctaatgctaccttcaacactgcgaagtctacctaaatacgaatcatcagttgtaatattttgtaagacatttccttgaattaggtcagtcactcgacttaatgactccatcttaattcccttatttgtgatcagcattaagattattaccacagtccctgtaactgtcaataatagtattttctttccatttccatcttctatctgtttcttaagaaatcttccgacaaaagtaacaactattaatagtaccgcaaggagatttgttcttgaccctgtcaggacaattgtaaccaaagctgtcaaaacgggtataactctagtctttccttttctcgcaaagaaagtccacaccagatagtgagcggcaatatttgctgtttggccgcttcccattccgattgcagcataccttccgttcgctccagatgcacccgataccatgctaaccatcactaggacaaattgtagtattgtaaaccaatccatgattgtctcaatatcttcaaatgaattctccttctccataatgacagcggccgccgaaaagccggttatcaaaataagaaacatttcatatgaattcagagtaattacattatcgagattaaaaagccaatacgccacattcaaaacaattagcagtatgtatatctttaaaaattttacaatgttactgcatctatatttatataaaccaataagaataacagggatttccaaaagtgaaaaatagtagttatatgtgtaggtcacatttattccacaagtggtcattttataaagcgcagtcatattctttattccatctggcagcgataggacaagaaagacatacagcagcacacatatatatcctaattttcttttttcaataaccagcttcat

SEQ ID NO: 467 - DNA, 5602 bp, unidentified
  source 1..5602: mol_type = unassigned DNA
tcacagcaatttgatcctcaaatctcccagcagcgacactgcctccggcagggagaattttgcgtcctgcagcttgcagccgaaaatgtcgactttatacccgctggcctctttgaagtttgccttgcgcatatcgcactggaaaaactcggtgtccagcaggtcgcatttctcaaaatccgcgctgacgagattgcacttggcgaacatcgagcgctgtatgacactgcccgcaaatttgaactttgtcaggttcatttcggtgaaggtgttgtatttcaggcggcagtcccgcaggctctcgatggggtcggcaaatgcgccgtcgccctgaagggacatccagtcgatgttgttcagcgtacagttctcaaaatctgtgaattttgcgcgtgacatagtggtttttaaattagtgaccgtgcagcgcaggaactgacattcggtcaggacgctgtggtcgagcttgcagtcctcaaacgtgcagtcggcaaaaacgcagtccgaaaagtcgcagtcgtaaaacgtttccccggtgaaggtcaggcgctcaaagcgttcgccctcgtggtattcggcacgcatcaaatcaccagcccgccgttgacaccgagcacctgccccgtgatgtagccgctggcctcgtcagcgagaaagaccatcgtgcgggcgatctcgtccggctcaccgaggcgctccacaggggtctcctccgccagcgcggcgcggtcctcatcggtaaagccggccatcatgtcggtgttgatgacaccgggcgcaatgacgttgaccgtgatgccgctggggccttcctccttggcaagggccttgccaaggccgatgagccctgccttggccgcgctgtaggcgacctcgcagctgccgccggtctggccccacatgctgctgacaagcaggatgcggccgtatttgcggtggatcatgccgggcagcaccgcgcggcaggcgtagaacgcgccgtccagatcgacggccatcatccgccgccagtcctcgtcggtggtgtcggtgaacagcttgacctgcgcgatgcccgcattgcagacgagcacctgcagactgccgagttcctgctcggcccgggcaacggcggcgcgcacctgggcggggtcgcccgcgtcggcccggatggcaagatagaggccgccggggttgatttcttcggcctgacggcgcacggcgtcggcggcatcggggtgggaattgtacgtaaaggcgacgttatagcctgcccgggcaaaggccatcaccgccgccgcaccgatgccgcggctgccgccggtgatgaaaacgttatttgtcatggtaaaacctcaattcattgcccacttgcttgcctccctctgggagggaggtgccccgaaggggcggagggagagagccttgccatggcccgaaatatttcggatgaccgcaaggctctctcccccaccgcctgcgggcggagccccctcccagagggggccaaggaaaaaggcgctatttctttttgcgtttttcccgcagcatcacaaaaaaattctgcagcagggcctgcgcctcgtcctccagcaggcccgattctatgacaggatggtggttgaacggcagggcgaacagatcggtcaggctgccgcaacagcccgccttggggtcgcgtgcgccgtagacgacccgctttaaacggctgttgatgatggctccgctgcacatcgggcagggctcgagcgtaacgaacagctcacactgccacagccgccagccgcccagcgccttgcaggccgcgtcaatcgccatcagctcagcgtggtaggtggcatttttgccgctctcccgcaggttgtgggcgcgggcgacgatctcgccgtccttcgcgaccaccgcgccgacgggaacctcgccgagggcggcggcgatctttgcctcgtccagcgcggcacgcatcagttcttcatcggtcatactatcccctcaatgtacaaaaatggcggcgtaggccacgagaaacagcaccgttgcgcagtagaccgggctggtaaaaacggtcagcacatccacgccggggcgcagtcccgccgaaaagctgaacccctgacggcgggcgttgcagatcatccatgcgccgaacgccgggaagaacagcaaaatgaacagctccacaccgaaggagacctccgccggggcgtaataccgcagatagatcgttaaaaatgccagcgcgttgttgacaaggtgcagcagcattcccggcaggatgctgcccgagcgctcggccagccagcccaaaaacacgccgcaggcaaaggccgtcaggccctgcgcaaggtcgagatgcagcacaccgaacagcagcgccggggcaaagatagccgccgcgctgccgcaggggcgcatcaagccctgaaacgcaccgcggaacagcagttcctccgcgatggcgggcatgacgcagagcgccagaaactgcatgagcagctccggcccgccgctgggcagcatttcactggtcgcggggctgcctgtcaggcggttgatgagtgcgcccgccagattggcaaggttcgccacgccgagaaaaaccggcaggcagaagccggggctccacggtgcgggcagcatgatccgcaggtctttggttttcagccgcgtgacctttaacagaaaaaccagcgtcagcacgatggcccccagcccgatgagcagctgaaacagcgccgtgctgaccccgctgaagcccagcggcttggccagactggcaccggggtgggccagccccatcagtgcgctgaccagcagcgtgagcaggccgcgcaccagaagatataccagggatgccaccgcgcagccgcctgccgcgccccgcaccccgcgagattttgtcatgattttttatcctccatataaaggcttccccctccggggaaggctttattatcatcataccacaatccggccaataaaaaaagccccaccggtgtgcgggccggcagggcaaggttggagggagaggagtctattcattacctgcgttgtgcgccgcaggcattgactttctgttactataatagtacagtataggcatgaagtaaagctacactttttcatacatcacatgaatttttttcaccacaggagatgcagctcatgacactgacagactgccagctgttaagcattgtagcacagctgggtacctttgccgccgcggcggagcggctgcacatcacgccgtccgccgtcagccacgcggtatcgggcgtggaggccgagtgcggctttccactgttcacccgcaccaaaagcggcgtcacgctgaccgccgccgccgaaaagctcatgcccgccattcagcagatgctcgccagcagcgagtcgcttgaccagtcgattgcccagatcaacgggatgcacaagggtgcactgcggctgggggtgttcaactcggcctgcgtgacctggctgcccaagatcgtgccgggcttccgcgcagcgtttccgggcatcgacgtgcagatttaccaggggtcgtatgacgacatcacgggctggctgaaaaccggcgcggtggagctggggttcctctccaactccagcgcccacgatctggattttgagccgctctatgatgaccggctcatctgcatcgcgccgcccgactaccagccgcgccgccccggcgtggtgcgggccgaggagctgcgcagccagccgttcgtcagccagcagtccgacgtggatgccgacatccagagctactttaaaaagaacgacctgcatgtgtcgagccggtgctacatcgtggatgaccagagcatgatcgcaatggtcgcctgcgggcagggactggcgctgatgcccgagctgatgttcaaggagggcgcagccagcgcggggtgccaggttttgcagctggagcctgccgccaagcgcacgattggtctggcgtgcctgtcgcggacagcgctttcccccgccgcccgggaatttgtggagcacgcccgggcgtttgcaaggaagcggtgacccacgcggtaacggcctgaacccttccggcctgcttcgcggccacctcccctgatggggaggcttttctcgcgggctttgcccgcgcaaaaggctcctcgccatgcggggagctggccgagcttgcgaggcctgaggggctttgccgggctttgcgtcaacgcctgttaccgagccgccgcgtcaacttccacggcggccagagggctggccgccctacatgtgtcccggaaatatttcattgcgcagtgcagcaaaacacccccgtgccgttaaatcggcacaggggtgtttttacttagtttccctcatcgtactccgctacgggcacattcgcgtactcgtcggggaggtcggggggcagggtctgcatgtactcgtgcatagcctcggccacgttcttgctgtaggcgacggcctcgacgacggtgcgcgcacccttgacggcatcgccgctggcaaagatgccggggatgctcgtgcggcccacctcgtcggtctcaaacaggccgcgcggggtggttttcagattcttcgtgctgtcggtgatcgtcgtgcaggggccctggctgatggacacaatgacactgtccgccgggtagagcttttcggtgccgggaatctcggtcagcgtgccgtcctcggcctcgttcaggtcgataaagacgacgcccttgtcggtgatctccaacggctttttgttaaagatgaagttcacgccctccagcttggcatagcttgcctcgtactcgctggccgtaatgtggctggacagcgagaagcactcgagatgccgcgtgccgtggcggatggcggtgcgcgccacgtccatggccgcgttgcccgcgccgatgacgatgacccgattgcccaggtggtagacatcggggttctgcagatagttgatggcgtagtgcacgttgccgaggctctcgcccttgatgtgcagcgtgttgggccgccagacgccggtgccgatgaagatggctttgtagccgtcgcggaacagatcctcaattttcagcgccttgcccacgtcggtgttggggcggaccttgatgccctttaagcgcagatggcggtactcgaaatcgtccagcacggtcttgggcaggcggaactccgggatgccgtagcgcagcacgccgccgatcttatcgtggctctcaaagatcgtgacgtcgtagccgtagcgtgccaggatgaccgcaatggtcaggcccgccgggccggagccgatgatggcggcctttttgccgttggacggcgcgggaccctgggtcatttggctggcgtaggtggacgagatgtagttctcgatgaccgagaagtgcaccggcgcacctttgatgccgcgcacgcaatggccctcgcactgattttcgtggttgcagaccagcgagcagaccgtcgtcagggggttgttctcaaacagcatacggcccgcttcgtcgagcttattggccttcaaaaggcggatgacctcgggaatattggtgtggatcgggcagccctgctggcagcggggcaccttacagccaaggcagtggtttgcttcgtccattacgtgcagcgccat

SEQ ID NO: 468 - DNA, 11121 bp, unidentified
  source 1..11121: mol_type = unassigned DNA
ggaagagctgtaagggctgcttgtgtggatcggagtttcctctgtgaagaacaggtcaggtctgtctaatggaagatctccgtaaacttcatcagtagatacctgatgataacgtttgataccgtatttgcggcatgcatccatgagaacagcagtaccgataatatttgtggtaaggaaaacttccgggttttcgatggagcggtcaacgtgactctctgcagcgaagtttacaaccatatcagggtgttcttcctcaaaaagtttgtaaactgcttcgcggtcggtgatgctttcttttacgaaacggaaatttgggttgtccatgacaggtgcaagagtggaaaggtttcctgcataggtcagacagtccagacagatgatgcggtaatccgggtatttttttaacatgtgaaaaataaagttgcttccgataaatccggcaccgccggttacgataatgttcatagtgattctccttaaaaaatatataatatgaatatctgtaagattctgttatagagtcaggcagataaaattatccgccttgctgcatggcgggtgatatatcaaataactgtttgaaaatttgatatatcactcacttgactgcgaattcgcttgtacaggtctaaaagcttcggttagtgcaatacatccagatatttaccgtccagaacgtcttttaagtactgaccatactgatttttcttcagtatttcataaaccttcagcacatcttcctttgtaatccagccattgagatatgcgatctcttccaggcaaccgattttgcggtgctggtggctttccattgtttttacaaagttggtggcttccacaaggctctcgtgtgtacctgtatccagccatgtgaatccctgtccgagaagttctacgtttaattcgcccttttccagatagatgcggttcagatctgtgatctcaagttcgcctctggcacttggtttcagattttttgcatactctacgacgcgattgtcatagaagtataaacctgtgacacagtagttgctcttcgggtgctccggtttctcttcaattgagatagccttgccttcatggtcaaattctacaataccgaatctctccggatcatctacatagtatccgaaaacagtggcaccctcgccggattctgcgttctttacagcagctttcagtcttttcttcagtccatgtcctgcgaagatattatcgccgagaaccatggcaacagtatcatcaccgataaattcttctccgatgataaatgcctgagcaagtccgtccggacttggctgtactgcataggtgagatggacaccgaactgatgtccgtcaccaagaagttcctcaaaacgaggagtatcctgcggagtagagatgatcaggatatcgcggattcctgcgttcatcagtacagacatgggatagtagatcatgggtttatcatagattggcagaagctgtttggatgttaccattgtaagcggataaaggcgtgtgccggaaccgcctgctaaaataatacctttcatgtgtattctcctttgttatttggcagtatgcggtcggagcgatattctgtcagttatctttgtaaatgataagcaaaatatcaggcgactgcggtactaatcaacgggtttctggattatcagtctgagttacgatatcatcctgactctggtgattgtattataaaaggtgaccttaggtcaccttcaagtactttttacaaaaaagttaaattttggttatttttcacaaagaaaaatgccggcatccttggtaataaagaacccatcctttgtctttcgcgatacaaatcctcggaaatctttgtatttgtccagaagatactgattctgatttccatggcaggagaggatataggaaatcagcggttctgcatcggggacaagaagagagtccttatagctttcccagaaaatacgggaaaaatacggtgccaggatatctgctccgttttctctgccaaaacgctcatagagtctgtctgcggagaggacgatccggtcgtcaaaatcccggaccagtctgctgacttcctgcatgtgtttttttccataggtactgcagatcagttttccgcccggagtgagcacacgttgaatctcgctgcatacagcggggatatcttcacagtaaaaaagcacatggtttgcaatgaccagatcaaagcttctgtcttcatgaggaattcctgcacagtcaaatgcctcgaaggaaaaacggctgtctttgcgtccgatagcacgtctggcatcacgaagcattccggatgaaagatcagaaagagtaacggaaactttaccggggaggctggaaatattctgtgtccacagaacaccgtcgccgcatccaagttcaaggatacgcatccccggatgaatctggcactgctcataaacccatggaaaccatccctgtttattctgggaataaaggctgtgcagattaatgcgtgaggaaatgttggaggcgttctggtattgatttttcatgcttttctccatgcctgtcaggtggatcaggtcaagcatctgattccagtctatggcatgatgggagcggatcgcatctgtggtatcctggattgccttttccaccagctgcatctgctcgatacggtcacgtaccagctttaactggatgttcagggaattttccataaaatgatagtctgagtcgtcaatggtcatttcccgtatgtcatccagggagaaacccagatatttcagaagcaggatctgggaaagtcttgcaaaatcctcatctgtataaaaacgtgcgccggattctgttacataggagggtttgaggatattctgtttgtcataatagcggatagtgcggagtgttacatgtgccatccgtgcaaattctccggaagagtagtagccgtcttttttcattgtaaaaccttctttaagaaaaatagtcttgcccgcaaatgcggatagaaacagttgttcagcctgcatttgcgtattgctgatatgtgtagagtataacacagctgaccggcaggctacaagcatcaggtattaccggatggataatactatactggctgaatggtaagtcagatggtgatttttgacattttttggaggatgctaatccttgtcttttgacagaaattatggtatgttaaataataacaatcaaaactgattttcatacaaatcataatctggcagttctgccatattttttccaaaatacaataaatattaagagagaacagtaatgacaatatgaaaggtgcagggacaggaggagcctgatgattaatttattcgattttacttactgcggcgattataaccggcagattcagaatcttgcaaggatggtgccggagaaatggagcttttcggatacagatgataacggaattctgaaaggatacctggaacatacatttaaacgcctttatgaagaacagaaggtgtgggagaaaaagaattatgccatatttaatacaggactctttaattactattatcagccgatttatgcgtattttattcccaatctggtcccggacaggcagccctggtttctggatggcttttatacagaatactatttgttaaaagaaggaatcacctgtctgccggaaaaggcatgctatgtggaaaatccgtcagatcttgtgtttgatacaaaacttccggtaattccacagtacgagcatattttcggggatgaggaaaatgctgcccgtcttccaaaggaagtacgtgacagcagcatgaaaatgcagctgtttgacggcgcgctgaaacagacaaaaagaatgcttgaggcagattacagaacggcaattccacagtattataatcactcaatccaactgctgctcccaatctgtctccgccatccgggaaaacccgaccttgcactggcgtgtatgaaaacttcggacggaagcaaatatctggggcgtacctgcctgactctcagaatggcctatcataatgccagactccttgcaagggtggaccgaagctggctgatgacttctgtatctgcctgaggtttgacatgtgtggttcgctttgatatattatagcagcgaagcggatgattttatctgtctgactgaaatgatgtcaggtcagacatttacggattgttctgctgctatagatgaaacaacagaaaaaggtgggtgagaaatcaaatgcgaaataaaagtctggatgctgtaaaggccattgctgcgtgcctggtggtatgcatccatgtaagctttccgggacaggccgggcagcttgtaaaagtactggcaagatgtgcggtgccgtttttctttatggtatccgggtatttctgttattatcaaaattgcaatgcctcaaaaagaatattgtctaaaatcctgcatatcatgaagctttttgcagtttcagttgtgttttattttatctgggaatgttttatgaaagcctggaatggggagagagtatggacatggataaaagggcttgtgagtacagagtatctgaaggaatttttcgtgtacaacagtacttctccggtaagagcacatttatggtttcttcctgcattaatttactgttatctgcttgctctcctgattgaaaaatggagaatgcgtaaggctgcatattgtatggcacctgtattgctggcaatacttttatggagagcggagttttgtgtcttttttgacagattttatcacactatggaatacagaaactttctgtttacaggaatgagctttttccttacaggtcagatgatccatgaatatcaggataagatagtatgcaaacgtctggagcaatggatgcaatggggattgaaagcagggatgagtttcggtgtggcactcagcatgatggaatatgctttccgaggagcaggagaaatttacacaggaaattgtgttgcagtgatctgtctgtttctgtggcttattttatatggaagggaaataaattttccctctgtactggtggaaaccggaagaaaatatgctttcctgatctatcttcttcatccggcagtatcagatcttctgaaaaaatgttcagaaggtctgggagtcagcaactgtcagatttatttttggctgcgtccggttttggtatatatgctgacagtggtgacagtttctggcatatctgcggtctctgcgtatgcaaggcaaaatattttgcagaataatcatgtatagtcagggtatgaaaatccggaatgaattttggctgcgttactgagaatggaatgaacagtaacatagtaacgttatctccaggaaccgcgggaattataactgttcacataatggaaaatgtgatatagtaatcagtaaatcttatgaacgtaaccgttcggtgtttcacagaatggaggattgctgaacagttaccgaaaatcattatgcagaaaatacaaaggagagagaatggcagataaaaatcaggacaagaaccagagtaagaacagagcagaacaggcagaagagcacgatgaaagcgtgctgaatccggagattaagaatgaatcggatttgtcaaagaaggaaagacgtctgattgagaaagaaaaattaaagggaatggggccaaagaaaaagctggaatatatctggatgtattataaaccggctattttcggagtgatcgcagtgattgctcttatattcggaataaaggattactatgaacagtccaaaataaaaacagttctgtccatgacagtggtaaattcaatggcaaatgatacggaaactcctgagcagaaaatcaaagaaacacttgggtacaaagatgatccctatagtaaagtagagataggcgtgaatcttactacggactctgaaatggcagaatttgattataatgcacagatggcttatgtggcacagatccaggcaggttccattgatattatggttatgccggagaagctttatcagactttgaagaagaatgagccatttgcagatttgaaggaattgatgggtgaggaagcttttgagaagtttggaatgcagacagatactacgcacatttccattactgacagtgagcttgaacaggaattaggtgtaatctacgatcctgtatgcattgcagtgccatattcagcaccgaatcaggaaaacgcagtaaaatggataaaaagtcttgacagcaggaaataaattgtgatatgtttatcacaccaaaactggtgtggatttttcagtcttgtgacaaacatgaactcttttcgccgcacgattatcatacagcaatgtagagataattgtgtggcgttttttgttgcaatgaaacagagaaaggaaaaaagaatgaacaatacttttatgaagaaaaaaccgattctgccgcttctggcatctatggcaatgcctatggtactgtctatgctggtgaattcactgtacaacatcgtagacagcttttttgtggcaaagatcagtgagcaggcgatgacagctctgtctctggtatttcctgtacagaactttattaatgcagttgccattggtttcggtgtgggaatcaatgcacagatttcttttcaactgggagcaaaaaatattaaaaatgcgaatatagcagctacccatggtatgctctttaatattatccatggaattatttttacagtaatctgtattccatttatgcctgtatttctcggtatgtttacaaaagagcaggaagtgatctcgcctggtgtgcagtattcaactattgcatttgcattttccacagtgatcatgatcagcttgtccttcgaaaagatttttcaggctgtgggcagaatgaaactgacaatgatcagcctgatgatcggttgtatttccaatattatcctggatccgctgctgattttcggagtggggatttttccggaaatggggatcagaggtgcagcactggcaactggtcttggccaggtatttacagttattgtatatctgatcgcatataagaagtgtagtattccggtggagatcagcaggaaatatctggaacttaacaggaacctggacgggaagctgtatatggtagggattcccgcaatcctgaatattgccctgccgtcagttctgatctctttcctgaatcagatattatcggctttttccggaagctatgtagtggttctgggaatctattataagcttcagacttttttatatctgcctgcaagcggcattgtccagggaatgcgcccgttgataggatataattacggagcaggggaaatacagagggtaaagaaactttttgggatttctgtgcttctgaatggtatgatcatgctggcaggaacgatcatctgctttacagcatcagagacattgatgggaatgtttactgagaacccggaaactgtaagacttggcactgcagcattacagattatcagtatcgggtttatcccatctgccatctctgttacagcttccggtgcattagaaggactgagcaaaggtgctcagtccctggtgatttcgttattaagatatattatagtgatcattccggcagcttatctgctgtgccattttgccggggcagatgctgtgtggaatgcgttctggatctgtgaatttataactgcagtggtagtaggtatcgggataaagtattactggaaccgtctgctgcagtagacgatagtgataaagctgctaagtcaggctgcgcctgcttcagcagactcagcatcagactctgcttctgaggcattttcatcagtaacatcttcggcatcggaattgcttccgccactgagaacataagtgatgacttcgtccggaacgcctgcattggacaggttgtccataagtgtagtggggtcgagtgtagctgcgtaggcactcatatcatcttcattggttacgtcataaacatctccaagagccgtaaggtccggaatttcaacagattcgcctgcaccggaagtaacagtgaagcttccgagagtgcttcctgcactttcaacggacagtgcaacagaaccagaatcttttgctgaatttaaatctaatacaagtgcaaagttctcgagcatggaaagagaagaatctgtatcttctgaagaatcagcagggaaggtgatagtatagttaccgtttaagtaaccttcttttgcagattcggtgtcgtagtctttaacttcgataacagctgcggctgtatcatcctgagaaattttataggttccgtttaatttaccgccatcaatctgaccggatccggacagggagagtgtgccggaatcatctgtttcaatggagagaagatagccaaagtctgagccgtccctggtcatctgccagttcagaacaggagttattttatcaccttcctgaaactcaattttacgtcctgcaattctgccggtctcatcaacccagattctggtgttgagatgagaatcatcggaatcaccggtatctgcatctttcagaaaatcaagaccgtcttctacagctttggtaaagctttcatgcaggtcctcgttacttgagagtttctctgtccaggtatcgaggatgttctcaatatcactgtctgattttgcttcttccaggattgcagttgcagtttttacagcgtcttcggctgaaatctggccttcatatactgtacagtcctgactgatatcacctgctgtcagagtttcctgactgctttcgccttctgttatattgtcaaaaagcatagatccgtatttatccagaagtgtttctactacagaagcttctggagctgctgctgacagatcagacatcatggaaacagtcaggctgagactgtcagaataagcggaagcgaaattgtctgtcggaatatctgcatctgaatcatcaggggttaattcttcaagatcattttcaatattggcagcctgttggtctgcggcttcttccagattggtcttgaaatatttatcagagagttcagggatgcgcatataaatatcctggctgtccggatcaagataatattccagagtacagattttattatcattaagaaggaccttcatcagaataccttcttttccttctgtaaaagagatatcattggaaagtgtgacattgtccagccaggagacatcaaatggtgcgacaaaccccagcagtgagcgtccggaatcttcaaatttcagaatcatgtcactctgcattcctgacatcagagactggctttcttctatagatgtagcgtaagaagatgccatttctgtgaccttttttgcccatgcatctttttcaatggaagcgtaactgtctgctgcaaatgctgtagatggaattgcagcagtaccaagaagtgctgcagtacagatagcggttgtttttcttaaccattttttccttgttttcataaagggcctccttccgttctgttatgaatcttatgtagtggaattacatttcaggacattcattttcagatatgtcgtttgactgaaataataatctatagcagtccttgtaaatgatttttcaaatacgctctatattaagatgcattattttagaggattgctatatatcaattttaccagataaagatagaaaaagctatgttttttcgacaatatagaaaaagatgttgattttagactaaattatttctatagaaaaataacaaaatatagacaaaaactatatgtgtatataaataattgatataagaaaatttattgacagatttatgtgaaaaatatatactactattcatatcgaaacactatggaactgctaaaaacagggaaacgatatatcacagaaaacataccgttagtccggagattattatattttacaaggggaatatgctcatggaatttcagactaaattattacacggaaaagcagtagacaattatgcgaatggttcaacagtgccgcctatcagcctggcaaatgcttttgcatatgaatcttcagaacagttggaaaaagtattccagaatcgggcaccgggatttgcatataccaggattgcgaatccgacagtagatgcgtttgagcgaagagtaaatgaattagaaggcgggattggaggtgtagcctgttcctccggaatgtcagcggttacattatcattacttaatatcctgcaggcaggggatgaggtaatcgcaggaagtgcattgttcggaggtacactggatctgcttcatgatctggaggcattcggaatcaaagtacattttataccgagggtagagaaggcgctgatcgagccgtttcttacagataagaccagagcagtgtttggcgaaatagtaggaaatcccgcactgaatgtaatggatgtccgggaaacagcagattttcttcatggaaaaggagtaccgctgatcgtagacagcacaacttcgactccttatctgcttaatccgattcagtatggtgcggatgtagtggtgcattctacttctaaatatataaatggaagcggtgatgccatcagcggaattatcattgacagcggaaacttttcctggagtccggaacgttatccgggaatgaaggaatataagaaatacggaaagtttgcttatcttgtgaaactgaggaacggaatctggcgaaatatgggtggctgtttggctccgatgaacgcttatctgaatattatcgggatggagacactggggcttcgtatggagcgggtctgtaacagtgcgttccggcttgcacaggcactggagaagctggaaggtgtatctgtcaactatccactgctggagtccagtccatatcatgaactggcagaaaaacagcttagtggaaagggcggagcaattctgactatccgtgcaggttccaaagaacgggcgtataaactgattaatcatctgaaatatgtaaagattgcaaccaatatcggtgatgtgagaactctggtgatccatccggcgtctacgatttatatccacagtacgccggaagcaatggcagaggcaggagtgtacgacgatacaatccgcatcagtgtgggtatcgaagatataaaagatctgatacaggatttcacagaggcagtggagagccttggagaagaataa

SEQ ID NO: 469 - DNA, 8711 bp, unidentified
  source 1..8711: mol_type = unassigned DNA
ctattcctcagcctgtgattcaaaaaaagcccgcttttctcgaagtcggtatgacggtccctttattgaaacaatctgcgagtgatggaatagcctgtctaaaactgcatttgccaaagtaggcgaaccaaatatttctccccatttagagaaaggggtgttggtagttattattgtactgtttctttcgtaacgcttggctataagttgaaagaacagatttgctgaatcctgatcaattggcatatatcctatttcgtcaatgattaacagtttatatttggcaaagaactttaaacgtgactctagtctgttttccatcagtgcttttttgagctgtgttattaatgactcaaaagacacaaaataagttgaaactcgtgaccttgcgcaggtaatgcctatggctgtggcaagatgtgttttaccaactccactggagcctacaaacaggatgttttcttttttatccagaaatcccatcctgttaagttcaagcagttcttttttgttaattcctggttgaaagtcaaactcaaaatcatccattgttttaaggaaaggaaaagctgcagttttcacacaggcattttcagccctgatttggttgttgttttgttcaatttcaatcagttcttccagggctacactaaatgatttttcgcctttattgactaactcaatgtatgtatctaaatattccggcatcttatgtatgcctaagtcagtctgcccatttataatctttgcataggttgccattttatctcctttcacaggaagtcatccatttgtgccagattagcttctgccatttgcgcaacaatgtcattgtccttaatgtaatgcgacagcaactgtgaatagtgctctttattataattaagtttttttgtacttaattcatgtttggcaacaagttcagttttataataaatttccaaaatatcagatttcactcgcaaatttacaggttttcctatatactcaaaaggaacggaatatctgttgttcatgtacgatattatggaatccttacgaactgtggtttggcgattgtggctcatatgagactctatgatttttaaattcggaagtggctgcaggtattctttttctttctgaaataagagaagtggcggtacaccggtttcctgacaaatgtaagtattgactttgccatttacctttttaagaatatccattaaatcttcctcagtttcaaactctccctcataggatttcatccatgagatgaacttgtttataacctcaactttgccttttgtaaaagcatgtcttggtttgcagagttttattttgaaaccaaaatcatttgcaaatgccttcattttttcatttacatgtcggcaattgtcctttaaatccacaacagatgccatgttgtcaaaaaggagttcccttggtactccgcctgttgccttaaatgaagctatcagacagtcaaagacatcctgtcttgttttgtaaagtttgtaagtaaagtggcagtatctagaatgccccaatttataatcaaacacctgaaaggtgaagatttcgccatgtttattggctattgatacatcttcctttcaatcaacctgagcctgaattccgggagcagtttcatatcttggatgccctttggtagtttttattggctttaggtttctggttttgatgtatttattaaagttggaataagttccaatttcagaatcaacttctgaaataatatattcataaacagctctgacattatctccttttatggctagtttttgaactattatgtctttatgcttgtcaagcctgcttggcatattatggtgtgtaggtttgcctttgtatccgtcataatactttttaacagttctgctatccatgtcatatagcctggcaatctcggaaaaatttggttttatattgctcaatcgtaagattttaagctgagtaattaatgcttgattcatggttgttacctcccatgaatacattagcataagcaatggaaatgtacatttttattttccacaaaatgtacatttaaatagtatcatttacataccattcagttacaaactccacatcagttttaatatatgattttaatatataaaaatttgaatagtatcaaatttagaatctacctcatatcccacacaactatgttcatatggggcagatataggaaaatttcaatagcatcaaacttaaaatctacctcatatcccacgtaactatgttcatatggggtggatatgtaaaaatttgaatagtaacaagcttagaatctacctcatatcccacgtaactatgttcatatggggcaaatatgtaaaaatttgaataataacaagcttagaatctaccacatatcccacaaaactatattcatatggggcagatattgaaaaattcaatagtaacaaccttagaatcccccactaaacacaaaaatccccgcgtcttccgacgcggggattaatatatcaactatatattatatttgattatttattagcttctgctgctttgatagctgctgtaagctgtggaacgatcttgtttaagtctccaacgataccataatcagctacgtcaaagattggagcatcttcatctttgttgattgcgatgataagatctgattcttccataccagctacatgctggattgctcctgaaataccaattgcaaagtaaacctgtggacgaacagttttacctgtctgtccaacctgtctgtctactggtaaccaaccgttatctgtaacagctcttgaacatgaaacttctccaccgagagcttctgcaagatcttcaagaagcttgaagttttcagctgaaccaacaccacgtccacctgatactaaaatcttagcgtccataatatctactgtttcagcaactgacttaattacttcctgaatttcaacatatttgctgttcttttctaatttagcgtcaaagttaataacttctgcctttgcgcctggctttggttctgccttctgcataacaccggcacgaactgtagccatctgtggtctatgatctggacatgcgatagtagcaattgtgttaccaccgaatgcaggacgagtcataagaagctgattgtgtttctgttctctacctggaattgggttgattgggaaatcaccaatttcaagaactgtacagtcagctgtaagacctgttgctactctagctgaaactgtaggacctaaatctctaccgattgctgtagcaccaactaacataatttcaggcttgaattcattaataactgctgttaaagcctgagcatatggttcagttctatatgtttcaagttcaggattatcaacaacgataaccttatcagcgccatattcagctaactgatcaactaaatttccaacgtttgatccaagaagtactgctgttacttctgtatttaatggttttgcaagtcttcctgcttctccaagtaactcgaatgcgataccgcttaattcgttatctacctgctgagcgaagacatatacgcctttataatcttctaaattaatgttctgcataattataatctcctctctactaaataacgtgctttgttaataatttgtccatgatgtaatcaactgcttcatcaggtgaatcaggagtaaccttttctccagcacccttacgaactttgtcagaagccttagcaatctttgtaggtgaaccctttaatccaaggtctccatcttctacgtcaacaagatttgctcttccccaagttgtgatttcagcatcacatgcatcaaaaattccacctggagtcatgtaacgtggctcgtttaattctgaaagagctgtaattaatacaggcatttttgctttaagcatatgatgtctatcttcatactgtctcttaacaattacgctatctccgtcaacttcaataccttcagcatatgaaattacagggattccaagatgttcagcgatctgtggtccaacctgagctgtatcaccatcgatagcctgacgtcctgtaataatgatgtcgtaatctttaatatttctaattgcaccagcgattgtagtagatgtagcccaagtatcagcaccacctaaaactctatctgttactaagattccattgtcagcacccatagctatagcttcacgaagaacatcttcagcctttggaagacccattgtaagaactgtaacttcagcgccgtactgatcttttaatctaagtgcagcttcaagacctgctttatcatcagggttcataattgtaagcattgcacctctatctaatgtaccatctgggttaaatttaactccaccctttgtatcaggtacctgttttacacaaacgataattttcacgattagtacctcctattattttaataagtttgcagagattaccatacgctgaacttctgaagtaccttcgtagatttctgtgatcttagcatctctcatcattctttcaacgtcatattctctgatataaccataaccaccatgtaactgaacagccttagttgtaacttccattgcaacttctgctgcgcataatttagcctgtgcagcttcaaaagagtatgtcttctgtgtagccttagccattgctgctttgtaaacaagcatcttagcagcttctaccttagtagccatatctgctaactggaactgtgtattctggaactgtccgattgatcttccgaactgttttctttcctttacatattcgatagttgtttctaaagcgccttctgcaagaccaagagcctgtgcagcgataccaatacgtccaccatcaagtgtatgcattgcaatgttgaaacctttacccttcttaccaagtaagttttcagctgggatacggcaatcttcaaaaattaattcatatgttgctgaaccacggatacccattttcttttcttttgttccgaatgtgaatcctggagttcctttttcaacgataaatgctgaaatttctttcatcattctaccacgtttttcaactttacctgttacagcgattacgatataaacatctgcgtacttaccatttgtaataaagcacttagaaccatttaatacccattcatttgtagcttcatcaaaaacagcctttgtctgctgtccctgagcatctgtacctgcacctggttctgtaagaccgaaagcacctaacttttcaccctttgcaagtggaactacatatttctttttctgttcttctgtaccgaatgtcataataggatcgatacaaagtgatgtatgagctgatacgataacacctgttgtaccacatacttttgataattcttcaacacacatagcatatgttaaaggatcacatccctgtccgccatattccttaggaactggaataccaaggaaaccatattttgccatcttttcaactgtctcaacagggaactgttcattttcatctgtttcctgtgcaagaggtttaacttcattttcagcgaattctttgaaaagagttcttgccatttcatgttttttgcttaaagtaaaatccatttatctttcctccatatttattgtttgccctaattactgagcatcaactggtgtttttgtacgatctgcgttataaacgtagaatcccttacctgatttaacaccaaggtttccacctctaaccatcttacggattaatggacatgcacgatatttgctgtcacctgtttcattgtaaagaacatccataattgcaaggcagatatctaaaccaacaaaatctcctaattcaagaggtcccattgggtgatttgcaccaagtttcattgctgcatcaataccagcgatgtctgaaacaccttccatcttaatgaaagcagcttcgttaatcattgggattaagattctgttaactacaaatccggcagcttcatttacctgtacaggtgtcttgccgatttcttttgaaatcttgatgatttcttctactgtttcgtcaggtgtgttaacgcctgcgataacttctactaatttcattctatctgcaggattgaagaaatgcataccaatcataggacgtgtaagaccatttccaatctctgtaattgaaagagatgatgtgtttgaagcaaagatacattcaggcttacaaatcttatctaattcgccaaatgttgttttcttaacttccatattttcaaaagcagcttctacgattaaatcgcagtcagcacataagtcttctttaatacctggtgtgatgcttgcaagaataccatcaacctgctcctgtgtcatttttcctttctgtacaagtcttgcataacctttagcaatcttgtcttttccaccttcagcccattcctgcttgatgtcacataatgctactgtgtatccatcaacctgagcgaaagccttagcgattccctggcccattgttccggcaccaattactcctaccttcatcttttttcctccaaaaatacttttgcgaacttgtcgcttatttattctgtaatggattaaaccattaccttaaatatgtgtgaagaaattcttcccacggttaaaaccggaaaatccggtatttaaaacaatattagctgtgccaaagcacaattacaaactattagcagttcttaaatggaacaactttaagtttcttttctttatccttttcaaggaagttacccattccggctttctgatcttctgtttcgaagcagcttccgaataatttttcttcgataacgatagcatcatccataactgcatcaagtccatcattaattgccttcttgcaagctctaacagcgataggtgcattctttgcaatacctgctgctaacttctttgcagcatccataagttcttcctgtggatatactgcatttacaagaccgattctgtaagcttcgtcagccttaatatttcttgctgtataaatcatctgcttagccattccaggtccaacgattcttgcaagtctctgtgttccaccgaaacctggtgtaattccaagacctacttcaggctgtccaaaaatagcgttttctgaacaaattctaatatcacaactcattgagatttcgcatccgccacctaaagcgaatccgttaactgctgcgattactggaatttctaatgtttcaagctttctgaaaacatcattacctttcttaccaaaagcttcaccttctgattttgtaagtgttgacatttctccaatatcagcgcctgcaacaaaagatttgtctccggcacctgttaaaataagtgctctagtttcattaacatcaattgcatcaattgcttcgtttaattcatcaagaacctggctgtttaatgcgttaagagcctttggacgattgattgtaagaattccaacgaatccttcctgttcatatgtaatgaattccattgttttttctccttaataaaaataactttttaagtattgaaacttaattataaaaagtgtttattaacaccataaaagctggcagtttcactaccagccctggttatatttaaaattagtcacgttcaacgattgtagtacatcccattccgccaccgatacataaagtagcaagacccttcttagcgtctctcttctgcatttcgtgaagtaatgttacaagaatacgacaacctgatgcacctactggatgaccaagagcaatagcaccaccgtttacgtttactttgctcatatcgaattttaagtctctagctactgctactgactgagctgcgaaagcttcgttagcttcgattaagtccatatcatcaattgtcatgttaacttttgctaatgctttcttagttgaagctacaggaccaacacccataattgatggatctacaccaccgagtgctcctgttacgaatgtagccattggcttaacacctaattctttagctttttcttcgctcataactacaactgctgctgcaccatcattgatacctgatgcattacctgctgtaacaacaccatcaggcttacctgaacaacatcttaacttgctaagtgattcagctgttgttccggctcttgggccttcatctgtatctacgataactgtctgttttctctgttttacttctacaggaacgatttcatctttgaacttaccttcagccatagccttttcacatttctgctgtgagttagctgagaaagcatctaattcttctcttgtaagtccccactgttcagctacgttttcagctgtaatcatcatgtggtagtgattgaatgcatctgttaatgcatcgttaaccattgtatcaacaagtgtaccattgttcattctgtaaccaaatctagcctgtggtaaagcatatggagccattgacatgttttccataccacctgcaacaacgatatcagcatctcctgcctgaatcatctgtgcagccatgtttacacagttaagacctgaaccacatacaacgttaactgtaactgctggtgtttcaattggaagtcctgccttaagtgctgcctgacgtgctacgttctgtccaagtcctgcctggataacacatcccatatatacgtgatcaacctgatcagctggaacgcctgctctgttaagagcttccttaataacaatagatcctaaaactggtgctggagttgtgcttaatgctccacccatttttccaatagctgtacggcatgcgcctgcgataactactttctttgacat

SEQ ID NO: 470 - DNA, 7469 bp, unidentified
  source 1..7469: mol_type = unassigned DNA
  misc_difference 7037: note = a, c, g, or t
  misc_difference 7038: note = a, c, g, or t
  misc_difference 7039: note = a, c, g, or t
  misc_difference 7040: note = a, c, g, or t
  misc_difference 7041: note = a, c, g, or t
  misc_difference 7042: note = a, c, g, or t
  misc_difference 7043: note = a, c, g, or t
  misc_difference 7044: note = a, c, g, or t
  misc_difference 7045: note = a, c, g, or t
  misc_difference 7046: note = a, c, g, or t
ctaaaacggaagcttgaacctgccgcgttttgcacccttgcctcccatcataccagggaactgtttcatcatcttgcgtgtctgttcgaactgtttgaccagtttgttgacttcgctgatgtccacacctgcaccttttgcgatacgtttctttctggacggatttaacagatccggattggaacgctctttcggtgtcatggagaggatgatcgcctcgatgcgtgccatcttggactcatccaccgcagcctcgatatctgctgctttattgccaatacccggcatcatacttaagatactggatatgcctcccatatttttaacctgagccatgctctccagataatcatcgaaaccaaactgtgcttttttcagtttctgttccatttctctggctttgtcttcgtcgatattggcctgtgctttctcgatgagcgtcatcacatcgcccatgcctaaaatcctggatgccatacgctccggatagaactgttccagatcggataacttctcgcccataccaacatagaggatcggtttgccgcaggttgccttgatcgagagtgccgcaccgcctctggtgtctccatccagctttgtaaggatgacaccgtcaagctcaagtttctgattgaagctgtctgccacattgactgcatcctgtccggtcattgcatccaccactaggatcgtctgatcaacatgaacggcttctttgatgttctgtaactcctccatcatcgcttcatcgacatgaaggcgtcctgctgtatcgaggatcacaacattaaatccgtgactctttgcatgttctacagctgctttggcgatattgaccgggttctgtttgtctcccatggagaaaacttccaccccctgcttctcaccatttatctgaagctgcgtgatagctgccggacgatacacgtcacacgctaccagaagcggctttctgccttttgatttgaatttgcctgcaagtttcgcagttgttgttgtctttccggctccctgaagacctgccatcatgatcacagtaacttcacttgccggacgcagtgcaatctccgtcgtctcagatcccatcaggtttaccagctcgtcatttacgatcttgatcaccatctgtcccggattcagtccgttcatcacgtcctgaccgattgcacgctcctgaaccgcttttataaactgcttcacgactttaaagctgacatccgcttccagaagagcaagctttacttctttcagtgctgtcttgacatctgcctctgtcagtcttcctttgccgcgaaggtttttaaatatattctgcagtttatccgataaactttcaaatgccatcgtaacctccaccgtcagtcggttttataattctttcagcagctcatccgaaatcttccttacttcttccggatcatctgccgccatccttatggcttccaccttttctttcagacttacaaatctctcaaccagatgcagttttgtctcgtaatcatccaggatatgtccgcaccgtttgatcagatcgtgcacaccctgtctgctgattccctgattctctgcaacttcgctgcaggaaatatcgttgaatactacatcctcgtatattttctgttgatgctctgtaagcagttcaccataaaaatcatacaataatgtctgctctaaaatcttttccactgcaatcaccttggttatcatacacgaaagaagccaccgtgtcaagtgttttttcttgacatgatggctttttctttttttatttcagatcaagctttttccttctttttcttgtaaaatttcatgcctctgttgatcacgatcgcaatcccgatcagcataaattcagcaaccgtctgccacagtctggtcacaagagaaatgatcacagcatattctttcggcatgatcagtccaagtcccagcaaaatgataccttcccttactccaagaccggacggtgtaaacaccgccaggataccgatgatacaggagagtccgtcaatgccggccacatagagaaactgggaagccggaaccggatagatggagcataccagcatgtaaaaacctacaccgacgaccagccagttgcagatgaacagcagtaccactttgatcatctgcgggtaggtgatcgggatggaaaggtctttcttgataaaccgctccaggatcctcaggaaaaagttgatgatcttcggattgatgcagataaagaacaggatcaccagaccgatcgtcatccatttataatcgttgagcaggtcgttcgggaaaaagaacaacgagatcagaaacaaaaatgcagctccgagaagcgtacagatattctcaaggaaaaagcagaccgtcactttgcggatcggcactccgccttcttcatacagcggcacacgtgccagcagcataaaaacctttcccggaatatattttcccggaatcgaatacagatacgctgtgatcgccttgaaatattgaatagaacactggttcagtttcgtgatgtagtgccataaagaagccagcgtcacctgataaatgaaataaaacagcagtgccccggcaaataccggccagttgatctcaatatccagattcttgtaggaatcataatttttataaaaatagcgaattagaaaaacggcaaccagcagcagaaatccgatcctgacatatttcttccatttcttttctccgttttgctgtgcgttttccagtatttccgcttcttctttttttacctgtgtgttttcttccataaccgattcttctcctaccatgttatctatgatttcagaaaccatgtttttctgccgtctgtcatccggtataagcagtcagcgaaacgcctcgctcttccagtgcttctttcagttttgttcctttgacatagacaaaatcttcttttttgttgtcgtacgcttcaccgtcgatcagataatatgcaccgctttttaattccttttcattcggcagcttttttgcgatcacaaacacattgtctgtatcgttaaagctctgatactcttctccgatcaggtgataatccatcagacgtacctgataagacttgatcggtgctgccgtctcttcggcccatacataagaataatctttataaatatcaccaaacgacagaatcagactggatgcagaagaaatccttgcctctcttgtattattttctgaaatggtgatgttctttacattatagccaaacaacagtacagagacaaacaatatcagagtgcacgcctgacagcctttctttttctggcacaaaagcagaaccagtaaaagcaaaagcagtgccacaacgccaaacaggatcactcctccggaaacatgtttcccttcaaaggtcagttttccggcatgggttttcacaaatgtgcagagcatacccatatatttccgcacaaagctctggttgttcagatacggagccgtgatctttgaaaacagcacaagcgtaagcccgcatcctgccaccgaaagcattttcgcccgaatcccaaacagatcccttttccagatcagcacataaagtgccaccatacagagaataccgaaggcacagcagatatagcggtcatatacaatacggtccacacgaattttggaagtaccgtaaaagttctttttcacacttttcaggaaaaatacagttccaaggacaaaacttcctgcataagataaaaatccaaacaatgccagtgtaccttcctgcgatgtcaccttcttcgaacggcggatcatcagaaaaacaatgatcacacaggcgatcagtcccacgcagaccagtccaaacgttgaactgaaagaattatacagccagccgattgccatccgaatgtaggatttgatccccgttccctttgtcagcagtttcagcgttcctttcgggatgccggtcgcatgagctgcaccgtttccccagatagcatgcctgaaatacttcaccaggatcttgtcgatcacaagaaagactgccatactgccaaagaaactgatatacggaatccttctttccctttcctttgtaaaaaacgggatcagcagtacagtcatcgcagaggcaatcaccataacgattcccctgctgtggcaggcataggcgtacactgcacagaaactcagcaatatcgtatagatctgacgctctttttttgtttttgcatacatggcatttaaaataaaaagtgcacaaacccagttgagtacgatcagcatcatatctccacgcagatagattgcctggaacatcacactgctgatgatcgcagaacctgccgccagaagagccgcatctttttctttttcgagcttcagatagcgtctgccaatatagtaagccatcaccggtgtcgttgccataaacaaggcattgacaaaagacgccgctttgtaaacgatgatcggatctttaaaaatcagaaacggcagaagccacacaaaagccattccataacggtaataatatccaccattacttaaaatccctgttccccagtttctcccggtcaaaagggctgtgttagtcagagtaccaagttcatccacaacggtgttcgtactcagacataatgccggcactcccataagcaccagcattaccgcaaacagtgagatcatacaaatcctgtcctgtttcgtcattgtcattttatttttcctctttctctctgtcataatccagtttacgtgcatgatactgtacatcttccaaaatcttgcgatttgccgcaatgatgtctgccagcagtccgatcacaccggtctggaagcccatcagcatcaggatacttgcaagaatcagggactgcacatgtccgtttccggttccggtcgcatagtaaaccagaaaacgcacgccaagcagtgccccgcaaagaaagagcacactgccgatcccgaggaagaaccgcagcggtttgtacatcataaaggaacggacgatcgtcaccatggaacgcttcacataaccaaacatactggaaaacagtctggatttacgaagctccggattggtacggatcggcaccgactccattgccattctggtgcgtcctgcctggatgatcgtctccagggtgtaggtatattcattcgttacattcagacgcatcgctgcgtcacggctataagcacggaaaccgctcggtgcgtcaggtatatcggatttggatgccacacgcacggtccagcttccgaaatgctgaagctttttcttgagcggtgaaaaatgctcagtatcatcgatcgggcgttcaccgatcacaatatctgccttttcctccaggatcggacgcaccagtttttcgatgtcatctccgcagtactgatcatcggcatcagtattgacaatgatatccgcaccgtttcgcaggcaggcatccagccctgccatgaacccctttgccagtccgcggttcatccggaaattgactacatagttcacgccccagtttttcgcaaccttgacggtatcgtcacggcttccgtcgttgatgatcagatactcgatctcatcgatcccgtcgatatgttttggcagatgattcagtgcaatttccagcgtctgtgcctcgttataacatggcacctgtataattaatttcatcatttatctctcctcatttttccttagtccctgaaatacagatctcttgtatagactttatccatgacatccgcaatctcatcactgcagcggttggcaaggatcacatcgctcatttctttaaattccttaagatcacggatcacacgggagttaaagaacgtttcttctttcattgccggctcatatacaaccacttcgatccccttcgccttgatccgcttcataactccctggatcgaactctggcggaagttgtctgaattggttttcatcgtcaggcggtatacgcctacaatctttggatttttttcaataatgcgctctgcaataaaatcttttctggtacggtttgcttctacgatcgctgccactatgttatttgggacatcatgatagtttgcaagcagctgtttggtgtcctttggaagacaatatccgccatatccaaaagacggattattataatgcgtgccgatacgagggtccagtcctactccttcaatgatctgtttactgtcaagccctcttacctctgcataagtatccagttcattgaaaaatgcaacacgcatggcaaggtaggtgtttgcaaacaatttgactgcctcagcttccgtaagatcggtaaagagtgtcgggatctcctgcttgatcgccccttcctgaagaagtgcggcaaatgcatgtgccttgtcacgctgattctccggcgatccgacaataatacgggaaggatacagattatcatacagtgcatgtccttctcttaaaaattccggtgagaacagaatatggtctgtatggtatttttcacggattccttttgtatagccgaccggaaccgttgatttaatcaccatcacggtatccggattcaccttctgtaccagttcgatcaccgtttcgatcgaagatgtgtcgaaataatttttcttcggatcgtagttcgtcggggttgcaatgataacaaaatcagcatccttataagctttttctgcatctgtcgttgctgtcaggtgcagatcctctcttgccagaaattcttcgatttctctgtctacgatcggtgacttccctttattgatcagatcaatcttgctttgcaggatatcgactgcccacacatcattgtgctgggagagcagcagggcattggaaagccctacatatcccgttcccgctactgctattttcatattgctcccctccttttaaagattcgggcgaatcactttcggattatagccatgctctttgagggcattgacgatgcgctctttgtgatccgttccaaatgcttccagtgtgatcttcagctctacggctgcattgcggttcgtgcttacaaactgattgtgatccagtcggatgacatttccattctcttttgcaatgacannnnnnnnnnaaccagctctcctgctttgtccggaagcagaacagatacggtaaagatacggtctctctggatcaggcctaactgtacaacagaagacatcgtgatcacatccatgtttccgccgcttaagatcgataccacttttttgtctttcacatccagatatttcagggctgccacggtcagaagtccggagttttctacgatcatcttgtgattttcaaccatgtcaaggaaagcaacgatcagatcatcatcttcgatggtgatgatgtcatcaagatttttctgcagatacgggaacacatttttaccaggtgtcttaacagccgtgccgtctgcgatcgtattgacatttggcagtgtcacaacttctcctgcctgaagggaagctttcatgcaggcagcgccttccggctccacaccgataac

SEQ ID NO: 471 - DNA, 9000 bp, unidentified
  source 1..9000: mol_type = unassigned DNA
tcaccccttcgcggcccggtcggcttcgatcagcagcttgacggcctcgatgcctacctccagggcggcggacagatcgtggctctcctcctgatccagcccggcagcctcccgctcctggttccagatgacgtggaagcaggagccgcagcgcacccccagggcagcggcacagcagaacagggcggcagactccatctcggaggccaggacacccaggcgcttccacgcctcccacttgtagagcagctcctggctcactggcatccgcttggggtcgtgctgtccatagaaggaatccttgcactgcaccacgccggcgtgccagggcttgcccaggtttttggcagcctgcaccagggcactctgcacctcatagtcggacacggcggggaactcgatgggggcgtactcccggctggccccctcgtggcggaccgcgccggtggcgatcaccacatcgtcgctcttaacgggcagggcgatgccgccgcaggtgcccacccggatgaaggtgtccgcgccgatgttgtgcagctcctccatggcgatcaccgcagatgggccgccgatgccggtggagcagacgctcaccttctcccccagaagggttccggtataggtggtgtactcccggttgctctgtaccttcaccgggttatcaaagtaggctgcgatcttctcgcagcggccgggatcaccgggcaggaaacagtagcggcccacgtcgccggccttacatttgatatgaaattgcagctcgtgttcgtgcatgataatcctccttgttctgacaaaaaactattttttattatacctccttttttccatcattgcaagatatacaaaagcatcctagcttttgtaaccttttgttgttgctttttttgtgtgctgcttttaaaataaagaattgtgaatttcccctgacaggaaaggtgtgtaccggatgaagaaggccgtgctatttgccctgatcgcccttttgggcgggcttgcactgggcaccctgttcggcagcgggatctcctctgccagcctgaactcggtccgtgccaccgcagcggagtatcccgcagtttccgcgctggacgctattgaggtagagggtagatctaccctctaccaggccgcgccggccgacgccggcacctcctgcctgtccgaccgtgccggacaggttctcgccgcgctgaaggagagcgattatgaggccctggccgcgctggtgcacccggagaaaggggttaccctgacgccttactccacggtggagcccagttgtgaccgcaatctcctccccgcccagctcgtcctcttgcccgaggacgacatcccttatgtgtggggtattgaggacggcaccggcgcccccattgaactgaccggacgggagtattttgagcgctacgtcttcaatgccgactatactgccgcccctgagacggcggtagacaccgttctgatgcagggaaacgcgctggaaaatgtggcctccgcctatccggagggacgttttgtggagtatcactttcccggtctggacgaacagatggccggatacgactggtgttctctcaaactggtgtttgaatgctatcagggtgactggtatctggtcggcctggtgcacagtgaatggacggtataaaagccgaaaaagagcccctctccctgtggagaggggctctttttcggcaaattacgcataatgtccttgcatgcgtgttaagattgcgttaagattagcatgcaatgtgttgtggggcacctccgggcgctctgaaaggatgtatggagcttgaaaatcatcatcgtgggcgacggcaaggtgggctttaccctggccgagcacctctctcaggaggagcacgatatcaccgtaattgacaccaacgacgccgctctccgccacgcctctgaggccctggatgtcatgtgtgtcaaaggcaacggcgcgtccatttccgccctgagagagtcgggtgtggatgctgcggatgtgctgatcgccgccaccagtatggatgaggtcaacatggtctgctgcctgaccgccaagcggctgggcgccaagtatacgatcgcccgggtacgcaatgtagaatatgctatggagctctccctgctgaaggaggccctgggcatcgacctggtcatcaacccggaaaacgccgcggcggcggagatcgcccgtctgcttcgctttccccctgccgccaatctggagaccttttgccggggtcgggtggagctgattggcttccgggtgcgggaggaggactttctggtgggacatcccctgtccgcccagagcggccagctccagtccctccctatgctgttctgtgccgccgagcgggcggagggagatgtggtcatccccgacggttcctttgtgccccaggtgggcgaccggctctatctgatcggccagcctaccggcctgaccgccttctttcgcctgctggggcggcacaatcccaggtgccgcaacgtatttctggtgggcggcggacgaatcgcacactacctcaccgccattctggagcggcttggcatacacgtaaagatcattgagcgcagtctggaccgctgccgccatctcagcgaggtactgcccaaggccacggtcatctgcggcgacggcaccgaccaggaacttctggaggaggaggatgtgaccgcctccgacgccttcgtagccctcaccgaccgggatgaagacaacctcattatctccctctacgccatgcagcagggcatacccaaggtggtggccaagtccaaccgccagaattatgccggcatcgcccacgccgctgggctggacagcgtgatctcccccaagctgctgaccgccgggcagattcttcaggtggtacgcggtatgcagaactccaagggcagcgtcatgaacgccctctacaagatcgccgacggccacgccgaggctatggaatttgtggccaatgcaaccacccgaaaccgggacacccccctgcgagagctgcgcctgaagcctggcatcctggtcgccgtcctggtgcaccagggccgtatcgtaatccctgacggctcctcttccatcgccgctggtgacaccgtgatcgtcatatcccgcaaccacgggattctggatctcaacgacatctttgaggactcccttctggagctgggaggcgacgcatgaacttccgcctggtcttcaagttgacgggcaagaccctgctggtagaggcgggcgcgctgctcctccccctgctggtctgcctgttctaccgcgaaaatcccctccctttcctcctgtccattgccatgacgggagcggtggggctcgccctttccctcatacccagcaacgaccactttttcccccgggagggctttttcgctgtggccctcatctggctgctgatgagcgccttcggcgccctccccttctttttcagcggctttttcccctcctatgtggactgcttcttcgagtcggtctccggcttcaccactaccggtgcctccatcctgaccgcagtggagcccttgcccaggggaatccttttctggcgctccttcatgcactggatgggcggcatgggggtgctgatcctcaccatcgccctgctgcccagcctgggcggacggaccctgcatgtgatgcgcgccgagagccccgggcccattgtgagcaagctggtacccaagaccagccagtcctccaaaatcctctacggcatctactgcgccctcactctgctagaggtcttctgcctgcgaatcgccggcatgccgtggtatgacagcctggttcactccttcgccaccgcaggcaccggcggcttctccaccagaaacctgtctattgcggcctatgaaagccccgccattgaggtcatcatcacgctcttcatgctgatcttctccatcaactttgccctctacttcctgctgctctgcggcaaggtacaccaggcgctccgcagcgacgagctgcgcttctttctggccgtggtggctttcagcaccctcctgatctccatcaacatctggcccatgtatccggcggacggctccgccgtgcgccacgccgcgtttcaggtgggctcgattatctccaccaccggcttcgccagcactgacttcaacctgtggccggagttttcgcggattctgctggtgctgctcatgttcatcggcgcctgcgccggctccaccggcggcgccatcaagtgctcccgcgttctgctcctgctcaagtgcatccgccgggagatccggcaggtggtgcacccccgctccgtcaacgtggtcaagctggacggccgggtggtagatgaggacagcctgcgctccgtccagctcttttttgcagcctatcttttcatcgccctgggggccacgctgctggtgtcggtggacaacttctcctttggcaccaccttcaccgccgtagtctcctgcatcggtaatgtgggccccggactggagctggtgggccccatgggcaactactccgccttttccggcttctccaagctggtgctctccctgtgtatgctgatcgggcgcctggaggttctgcctgttctcgttctctttagcagaaatgcatggaagcgttcttaaaccaatcattcgtttttgtcgaaagcgtcaaatcctaggatttgacgctttcttatcttaagatatacttgccaaatcacccctttttgcgttaatattatattgtctcttaacgctggaagccttgtgttacaaggcttccaaagaaaaaaggagtggggaaagttgttggaaaacctgttttggttcggcttagtaggtgcattaattgcattaatcttcgccttaacccaagccaagaaggtgctcaagttctcagagggcaccgaactgatgcaaaagctggccgcatccatccgtaagggcgcaaatgcctaccttaagcgccagtatactaccgttgcaaagatctttatcatcgtcttcgtcattttgttgattttggcaagagtcgggatgctggacaactggtttatccccttcgccttcctgaccggcggcatctggtccggcctggcgggctttgtgggcatgaagattgccacctccgccaacgcccgcactgccaacgccgcccatgagagcctcaaccggggcctgaacgtggctttctcctccggcgcggtcatgggcttcaccgtggtgggcctgggcctgctggacgtgtccatctggttccacattctcaagtacatcgcagggtttgaggccgcccagatcgcccagaccatggtcatgttcggcatgggtgcctccttcatggccctgttcggccgcgtgggcggcggcatcttcaccaaggccgccgacgtgggcgccgacctggtgggcaaggtggaggccggcatccccgaggacgacccccgtaaccccgccaccatcgccgacaacgtgggcgacaacgtgggcgacgtggccggcatgggcgctgacctgtatgagtcctacgtgggctccattctggccaccttcgccttgggcgcctccgcctatgccgccgacggcctgacctggaacgccatgcttctgcccctcatcatcgccgtggtgggcgtggtgtgctccgtcatcggcaccttcctgatccgcaccaaggagaacgccactcagaagtccctgctggctactctgcgcaaaggcacctacaccgccgccgtgctggccgccgtcatcgccgcccccgtcacctattacatcatgggctcctggggcccttacatcgccattctggcgggtctggtggccggctgcgccatcggctatttcaccgagtactacacctccgacacctataagcccacccagggcctggccgactccaccgagaccggcgccgccaccaccatcatcggcggcatctccctgggcatgaagtccaccgccgcccccatcgtcatcatcggcgtggccatcatcgtctccttcctggccgccggcggttccctgaccaccaatgcggctaactatggcgagcttttctccaagggcctgtatggcatcggcatcgccgcggtgggcatgctgtctaccctgggcatcaccctggccaccgacgcctacggccccgtggccgacaacgccggcggcatcgccgagatgagcggcctgggcgaggaggtgcgcaatcgcaccgacgccctggactccctgggcaacaccaccgccgccaccggcaagggcttcgccatcggctccgccgccctcaccgccctggccctgctggtcagctatgtggacgtggtgaaggtcaaggtggacacgctggatctctccatcaccaaccccgccgttctggtgggcctgttcgtgggcgccatgctcaccttcctcttcgccgccctgaccatgagcggcgtgcagcgggccgcccagtccatcgtggtggaggtgcgccgccagtttaaggagatcgccggcatcatggagggcaaggccgaccccgactacgcctcctgtgtggatctctgcaccaagggcgctctgcatgagatggtggtcccctccctgctggccattgtagtgcccgtggtcaccggcctgattctgggcgcagaggccgtggtgggcctgctgggcggcgtcaccgtcaccggcttcgtggtggccgtgttcatgtccaacgccggcggcgcctgggacaacgccaagaagtacatcgagagcggcacccatggtggcaagggctccgactgccacaaggccgccgtcatcggcgacactgtgggcgaccctttcaaggatacctccggtccctccctcaacatcctgatcaagctgtgctccaccgtttccattgtgttctccggcctgatcaccagcatccatctgctgggctgaaaatcctgacctcagcgcgcggcatgccaaaacatgccgcgcgtttttttacattgtgacgattttggaaaattatacttgacaaactttatccaaaatgatatgttgtagccagaccaatcagaaaggagtggagcggctgtgattacccgcgaaaccgattatgccctgcgcctgctgcgcaccctgcgggatggggagcgccgtacagcggcggaggcggcggagcgggagctggtcccccagtcctttgcacacaagattctcaaaaagcttgccagggccggatttgtggaagtagcccgcggcgccgaaggtggctgtcgcctgtcggcagagctcaaccgggtcactctctacgacctgatgaccgctatgggagaggattcccgcctaagcagttgtatggatcccacctattcctgtccctggcgggccagccatggcggctgtacggttcactgccatctgacaggcattcaggaaaagctgaatgcggaactgaaggcccacactttggaggacattttgggtccggcagactgattttttcgcctacaaattggactaattttatccacttttaattatgtgtaaggaggaagcaacatgttgttccagacgacccaagcgcatgaacagttgcgcgccaagatccgcgccttcgccgaagaggaggtcaagcccatcgccttctccctggatcaggccaatgagtttccggccgaagccgtaaaaaaactgggggagctgggcctgatgggtatcccctaccccaaggagtacggcggcgcggggctggatgccattagctacgccatcgccgtggaggagctgtcccgggtagacggcggcacgggcgtgattctgtccgcccacgtgtcccttggctcctggccgatcttcgccttcggcaccgaggagcagaagaagaaatatctggtgcccctggccagaggtgaaaaaattggcgccttcggcctcaccgagcccaacgccggctccgatgccggcggcaccgagaccaccgccgtggacaagggcgaccactggctgctcaacggcggcaaaatcttcatcaccaacgcccccaaggcggacacctatgtggtctttgccgtcaccaccccggacatcggcacccggggcatctccgccttcattgtggagaagggctggaagggattcgagtttggcgaccactatgacaagatgggtatccgttcctcctctaccgctgagttgatctttaatgatgtgaaggtacccaaggaaaacctgctgggcaaggagggtgacggcttcaaaatcgccatggccaccctcgacggcggccgtatcggcatcgcagcccaggccctgggcatcgcccagggggcctatgagtccgccctggagtactccaaggagagggttcagttcggcaagcccatcgccgcccagcagtccctggccttcaagctggcggacatggccaccaagctgcgctgcgcccggttcctcatctactccgccgccgagctgaaggagcaccacgagccctacggcatggagtccgccatggccaagatgtacgcctcggacattgccctggaggtcaccaacgacgcggtgcagatcttcggcggcactggtttcctcaaaggtatggacgtggagcggatgtaccgcgacgccaagatcaccaccatctacgagggcaccaatgagattcagcgggtggttattgcctcccacctcatcggcaaaatctccaagggcagcggcagcggcagccgctctgtagccaaaaagcccgcccccatcaccggcgtgcgcaagcgccagcttttccgggacggagcgtccaaggacaaggtggccgccctggtggaggcactgaagaaggacggacacgactttaccgtgggcatccccatggacacccccatcaaccaggctgagcgggtggtctctgccggtaagggtatcggcgacaagaagaacatgaagctcattgagaacctggcgaaagctgccggcgccgcggtgggttcctcccgcccggtggccgagacgctcaaatatgttcctctgagccgctatgtaggcatgtcc

SEQ ID NO: 472 - DNA, 7356 bp, unidentified
  source 1..7356: mol_type = unassigned DNA
ctcggtatagggcaggtggaactggttgggagtgcagagcaccaccgcgtcccccacgtccagcagctcctccaggcggttggtcatccgtaccccgtcaagcccgtgccggacgcacagccgccggcagccctccagggtgcggctgcacacggcggcgacggtacagcgcccctcctgggccagaaagccctccacgtgccggtcggcgatggccaccgtggtgcccgcgccgacgattccaatccgaattcccatacgtccgctccttttttcagcttcactccatcatagcacggagcgggacgtttgcaaagcggtttcagcgcaggcggaacaggcggcgcaggtggatgccctgggcctggagggcggccaggtagagcacgccgccgaacagcaggcaggccagggcggcggggagagcttccaggccggcgcggcggagcacctggaacagaaggttgatcaccagccccatgagcagggcggagagggcgggggcggtgcaccactgaaaaatctgggcccgcaggccggtcgcccggcggacggcccaccagttgaggagtacccccagggcggcggaggcgagaaagcccgccacatagcccttgagccccacgccgggcaggcccatgaggaagaaggtacagccgagctgcaccacgccgcagaggatggagttgcgggcggcggcccccggacggcccacgccgttgagggcgctggcgaggacggactggtagcaggacaggagcaccccgacggacagggggagaatagagcggcccacggtgggttcccggaacagggcggcgcccagggtggggcccagcaccaccagaaaggccatggcggggaggatcagcaccgaggtggccagcatggagcggtccacccggtgctgcaccagacctcgctgccccagggcggcaccctcggccagcttgggcaccagcaccaggcccagcgccccgatgaaggcggtgggcaggcagagcatgggcagggtcatgccgcacagcacgccgaaggcgctcatggcctccgagacctccgcccccgcgtggaccagccgctgggggatgagcacagaggtggccgagcccatcaggttgcccagcaggctggtcagcccgatagggacggcgatggaggcgatgcggcggttgagctgccggtgctccagcggcgcgccggtcaggccgcccgcccggttcaggtgccgccgggccagcaggagcagggtaacggcggagaacagctcgcacaggatcatgccggtgacaatcagccccaccgtccgctccgggttctgggggagaaagaccaccagcagccccagcaccgctccggtgcggatgaactgttcacacagctccaccgccgccggcggacggatgttgcccgtgccgtagaagaagtgcttgtgcaggttctccaccccggtgagcaggatgcagggcagcaggagcagcaggcccagctgggtgcgggcgtcccccagcagatagaccgagatggggtcgtagagcaggaccaccaccgcagccaccgccgcaaagaggaggagaaacaccgccaggcagcggcggagcacctgggcgatggcggcccggttgcccctggcgtgatactgggaggagaggttggacactgccaccgtcagacccacggcggtgagggccatgatgacggagaacaccggcatgatgagctggtacagccccatgacctccgcgccgatcagccgggagagcaggatgcggtacacgaacccgagaaattgggagacgatactggtgcccgtgaggatcagggtaccgtagagcatagaggtacggtcgagtttcaaggcgcaccctcctttccctaaaccctattcaccacgggttgtcccccatacgcgggaaaatctttgacaaaacggccgcaagcgcgtatgataaatccattcatactttgtagtatggaagaaagggccaaccgtggcggccaaagtgatccatgtgccctgatgttccccagcagcgcgccggctctcctgttcaaacactacgggagggcaccgggcccagcataccgggccttccacgtgggcaaaggataccgccccatgttcctgtccctggccgatctgcctgtgcgggatgcgctgccggatctgcgggtatgggtggagaccgcccggctggcctgccatgaaaaaccggccggtttgctgattatcctgagagatctggggtggccttttcctgatttatgcatcctgaccacaaattttgataaaaaaataacgcttttttcttgcatttcacttgcctgttggcgtggaaagcagtatacttattaggaaggtttgtgttaaaaaaataacgattataatcgcaggctttgatattcgattaaggaggcagaacaaatgggatttgtgaagctggaaaagcagggccatgtgggcatcgtgacgatcgaccgtcaggaggccctgaacgccctgaacagccaagttctgagcgatctggacgcggttatcgaccaggtggcggcggacgatgagatctatgtgatgattctgaccggcgcgggccgctcctttgtggcgggagccgacatcggcgagatgaagggcttctcctcgatcgacggcaagaagttcggcgtgcacggcggcggcgtgttcctcaagctggagaacctgtccaagcccgtgattgcggcggtaaacggcttcgccctgggcggcggctgtgagctgagcatggcctgcgacatccgactggccagcgagaaggcccggttcggccagcccgaggtgggcctgggcattacccccggcttcggcggcacccagcggctgccccgcatcgtgggcgtcagcaaggctatggagctgattctgacagccaagaccatcaaggccgacgaggccaaggccatcggcctggtcagcgaggtctaccccgccgaggagctgatggataaggccatggagctggccaacgcgatctgcgccaacgcccagatcgccgtgtgcgaatccaagcgctgcatccgcatgggcatgcagaccgacatccacaccggctccgctttcgaggccgaggccttcggcgttacctgcggcaccgaggacaagaacgagggcatgggcgcgttcctggagaagcgggctgagaagcacttccagaaccggtaagcggtacatatgacgcctgtcatcgcaaacctgtccgaccaggtatggaatgttctgatcaaaccaatagaaaagaggttttttactatgaagaagattgtggtcatcggcggcggtaccatggggctggacatcgcccaggtatttgcccgcaacggctatgacgttgtggtgcgcgacatcaaggacgagatcatccaggccagcgaggcccggctgaacaagggcctggataagctggtgagcaagggcaagctggacgaggccaagaaggctgagatcctgtcccacatgagcttcaccaccgagctggccgccgctgccgatgccgatctggtggtggaggccgccatcgagaacctggacatcaagaagagcatcttcgcggagctggacagcctctgcaagccggagaccatcctggcctccaacacgtcctccatctccatcaccgccatcgcggcggccaccaagcgggccgacaagttcatcggcatgcacttctttaaccccgccaccgtcatgaagctggtggaggtcatccggggcacccacacctccgatgagacctacaagaccattgccgagctggccgccgccatcggcaaggagcccgttgaagtcaatgaggcccccggctttgtggtgaacaagattctggttcccatgatcaacgagggcatcgacctggtctacaccggcgtggccagtgtggagggcgtggacaccgccatgaagctgggcgccaaccaccccatgggccccctggccctgggcgatctgatcggcctggacgtatgcctggccatcatggacaccctgtacgacgagacccacgatcccaagtaccgcgcctccctactgctgcgcaagatggtccgcgccggcaagctgggccgtaagaccggcatcggcttctacgactactccaaaaagtaaacagggcagacgcagttccctatgcgagcaacgacgggcgggagcccctgactcccgcccgcccgttctgaaatataaatcttaggaggaaggcaacaaatggatctgcacctttccagagagcaggaaatgctccgcaagatgtaccgtgacttcgccgaaaatgaagtcaagcccctggccgagtgggtggacgagaacgaggcgttccccgaggagaccgtcaagaagatggccaagctggggatgatgggcatctatttccccaaggagtacggcggcgccggcgcggacgttctgtcctatgtcatggccgtcgaggagatgagcaaggtctgcggcaccaccggcgttatcatctccgcccacacctccctgtgctgcgctcccatctatgagaacggcaccgaggagcagaagaagtattacctgcccaagctgtgctccggcgagtggatcggcgcgttcggcctgaccgagcccggcgccggcaccgacgcccagggccagcagaccaccgccgtgctggacgagaagggggagaactggatcctcaacggctccaagatcttcatcaccaacgccggctacgccaacgtgttcgtgatctttgccatcaccggcgttaccaccgacaagcgcggccgcaagaagaaggagatctccgccttcatcgtggagcgcaccgaccccggcttctccgtgggcaagcacgagaagaagatgggcatcaagggctcctccacctgtgagctgattatggaggactgcatcatccccaaggaccgcctgctgggcaagcagggcaagggcttcggtatcgccatgaagaccctggacggcggccgtatcggtattgcctcccaggccctgggtctggccgagggcgccatcgaggagaccatcaagtacaccaaggagcgcgtccagttcggccggcgcatctcccagttccagaacacccagttccagctggctgacatgcacgccaagaccgaggcggccaagtggctggtgtactccgcggccatgaagaaggagaaccatgagccctacactgtggacgccgccatggccaagctggtggcggctgagacggccagcgacgtgacccgccgctgcgtgcagctgttcggcggctatggctacacccgtgagtaccccatggagcgcatgatgcgcgacgcgaagatcaccgagatctacgagggtaccagcgaggtgcagcgcatggtcatctccgccaacctgggcgtgaactaaaggaactggagggaaaattacgatatgaaatgcatcgtttgtgtcaagcaggtacctgatacctccggcgtggtggcggtgaaggaagacggcaccatggaccgcgcggccatggccaccatcaccaaccacgacgacctggctgcggttgaggccgcgctgcgcatcaaggacgccaccggctgcaaggtggttgtggtctccatgggccctcctcccgccgaggggatgctgcgtgagctgctggccatgggctgcgatgaggccgtgctggtctccgcccgcgagttcggcggttccgatacttacgccacctctcagattctcgccgccgccatcaagaaggtgggcgtggacgaggacgacatcgtgttctgcggccgccaggccatcgacggcgacaccgcccaggtgggcccccagatcgccgagaagctgcacctgccccaggtctcctatgtggcggagatcgcggtggagaacaaggccgtcaccgtgaagcgtctgctggaggacggctacatgaccatcaaggttcagacgccctgcctgctgacctgcgtgaaggagctgaacgacgcccgctacatgagcgtgggcggcatcatggagtgctacaacaagcctctggagatctacaactacgagactctgaaggacgatcccctcatcgacgtggataccatcggcctgaaaggctctcccacgaatgtgtacaagtccttctctcccccggtgaagggcgccggtatgatgatggagggcgccgacaaggcgaccgtcgagaagctggtctccatcctcaacgacaagcacatcatctgatagagtgaaaggagagcaacacaatggcttttgatagtaaggataccgccgccttcaagggcgtatgggttttctgtgagcagcgcgagggcgtgattatgtccaccagctaccagctcctctccgagggccgcaagctggccaacgacctgggcgtggagctgtgcggcgtggtgctgggcaaggacatcaaggaggactacctgaaggccctgggcggctacggcgccgacaaggtgtactactgcaaccacgagctgctggatgtctacaccaccgacgcctacaccaaggtcatctgtgacctggtggaggacaagaagcccgagatcttcctcatcggcgccaccaacatcggccgtgacctgggcccccgctgcgcggcccgcctgcacaccggcctgaccgccgactgcacccacctggacgtggacgtggagaagtacaaggccttcctgaagaccacctccaccatcgacgtggacaacaccaagttcgaggagaacaccaacctgaagatgacccgtccggccttcggcggtcacctgatggccaccatcatctgcccccgcttccgtccccagatgtccaccgtgcgtcccggcgtcatgcagacccagccctatgacgaggccggcgccgcgaagacggagatcgtcaacgtggacgtgaagctggacaagtccgacatccatgtggatgtgctggaggtcaagaaggccgccaagaagctggtcgatctgatcggcgccgacgtggtggtttccgtgggccgcggcatcagcaaggacgtcgagggcggcatcaagctggctgaggagctggcgggcgtcctgggcggcgtcgtgggctcctcccgcgcctgtgtcgacgcgggctggatctccgccgaccaccaggtgggccagaccggcaagacagtgcacccccgcatctatgtggccctgggcatctccggcgccatccagcacctggctggcatgcaggactccgagtgcatcatcgcggtgaacaagaacgagtccgcccccatcttcgacgtggcttcttacggcatcgtgggcgacctctacaaggtcacccccatgctcatcgaggccatccgcgccgccaaggccgcgaagtaa

SEQ ID NO: 473 - DNA, 7067 bp, unidentified
  source 1..7067: mol_type = unassigned DNA
atggacactcaacaaatagatgttatggtagccgacgcctcacatgaggtttacgttgacactattttggaaactatcagaaatgctgctgccgtacgaggaaccggaatcgcagagcgcacacacgaatacgtagcgactaaaatgaaagagggcaaagcaataatcgcgctctgtggcgacacattcgcaggtttcacctatatcgaatcatggggaaacaagcaatacgtagcaacctccggtctgattgtacatcccgattttcgcggattaggattggcaaagcgcatcaaacaagcatctttccaactggcacgtctccgatggccgaaagctaagattttcagtctgacatccggagccgcagtgatgaaaatgaacaccgaactaggatatgtccccgtcactttcaatgaactgacagacgacgaggctttctggaaaggatgcgaaggctgcaccaaccacgatatactggtagctaaaaaccgtaagttctgcatctgcacagccatgctgtacgatccgacagacccacggaacataaaaaaagaacaagaaagaaataacatttaatatatacagcactatggaagaaaagaagaaaaaagtagtggtggcattcagcggcggactggacacatcgttcaccgtcatgtacctcgctaaagaaaaaggttacgaagtatatgcagcttgtgccaatacgggcggtttcagcgaagaacagctgaagacaaacgaagaaaacgcctacaaactgggagcagtgaaatatgtaacattggacgttactcaggaatactacgaaaagagtctgaaatatatggttttcggaaatgtgctgcgtaatggtacttacccgatctccgtcagctcggaacgtatcttccaggcattggccatcgcacgttatgccaacgaaatcggtgcggatgccattgcccacggttctaccggagcaggtaacgaccagattcgttttgacatgactttccttgtactggctccgaatgtagaaatcatcacgctgacccgtgatatggcattaagccgtcaggaagaaatcgactatctgaacaaacatggtttcagtgcagactttaccaagctgaaatactcttataacgtaggtttgtggggtacatccatctgtggtggcgaaatcctcgactccgcacagggattaccggaaacagcctacctgaaacatgtggaaaaagaaggcagcgaacaactccgtctcactttcgaaaagggagaactgaaagctgtcaatgacgaaacattcgatgatccgatccaagctatccaaaaggtagaagagatcggtgccgcatacggtatcggacgtgatatgcacgtgggcgataccatcatcggcatcaaaggccgtgtaggtttcgaggctgccgctccgatgttgattatcggtgctcaccgcttcctcgaaaaatacacattgagcaaatggcagcaatactggaaagatcaggtggccaactggtacggaatgttcctccacgaaagccagtatctcgaaccggtgatgcgtgacatcgaagccatgcttcaggaaagccagcgtaacgttaacggtacggcaatcctcgagctccgcccgctttctttctctaccgtcggtgtagaatcggaagacgacctcgtgaaaacgaagttcggcgaatatggtgaaatgcagaagggctggacagccgaagatgctaagggctttattaaggtaacttctactccgctgcgtgtttactacaataaccataaagacgaagagatatgattaaagcaggaatcattggtggcgcaggatatacagcaggcgaattaatccgtctgctgctcaaccatccggaaactgaaatcgtattcatcaacagcagcagtaatgccggaaaccgaatcaccgacgtacacgaaggactatacggagaaaccgacctgagatttaccgaccagttacctctggacgcaatagatgtactattcttctgtaccgcccacggtgacacgaagaaattcatggaaagccacaacgtgccggaagatttgaaaatcatcgacctctcgatggattatcgcatcaagagtgacgatcatgacttcatctacggtctgccggaactgaaccgtcgtgctacctgtacggcgaagcacgtagccaaccccggttgttttgctacctgcatccagttaggtttgcttccgctagccaagaatctgatgttgacaggcgatgtttcggtcaatgccatcaccggaagtaccggtgccggcgtgaagcccggtgctaccagtcatttcagttggcgtaacaataacatcagcatatacaaggccttcgatcatcagcacgtgccggaaatcaagcaatcactgaagcagttgcagaacagcttcgattcagagatcgactttattccttatcggggagatttcccgcgcggcatctttgccactcttgtcgtaaaaacgaaagttgcactcgaagaaatcgttcgcatgtatgaggaatattatgcaaaagactccttcgtgcatattgtagataagaatatagacttgaaacaagtcgtaaataccaataaatgtctgatacatctggagaaacatggtgacaaattactgattatctcctgtatcgacaacttgctgaagggtgccagcggacaagcagttcataacatgaacctgatgttcaacctggaagaaaccgtaggattacggctgaaaccttccgctttctaaaaacagaagaattatgaaattattcgacgtatatcctttatatgacatcaatatagtcaaaggacaaggctgtaaagtatgggatgagaacggtacggaatatctggacctctacggaggccatgccgtcatctccatcggacacgcgcatccccactatgtggagatgatcagcaatcaggtagcaacccttggtttctattcaaactcggtgatcaataagctgcagcaacaagtagccgaacgattgggaaagatttccggttatgaagactactcgctgtttctgatcaacagcggagccgaagccaatgaaaacgcgctgaagctggcttctttctataacggacgcaccaaagtcatttctttcagcaaagccttccacggacgtacatcccttgcagtggaggctacgaacaaccccaccatcattgctccgatcaacaacaacggtcatgtgacctatctccctctgaatgacatcgaagcgatgaagcaggaactggcgaaaggtgacgtatgcgctgttatcatcgaaggaatacaaggagtgggcggtatcaaaataccgactaccgaatttatgcaggaacttcgcaaggtttgtaccgaaaccggaacgattctgattctggacgaaatccagagtggatacggccgtagcggaaaattctttgcccatcaatacaaccatatccagccggacatcatcaccgtagccaaaggcattggaaacggattcccgatggcaggtgtactgatcagcccgatgttcaagcccgtctacggacaactgggaactacattcggcggaaatcacctggcctgctcggcagcccttgccgtaatggacgtcatcgaacaggacaatctgatagaaaatgcaaaagcagtcggcgactacctgctggaagaactcaagaaattcccgcaaatcaaagaagtgcgcggacgcggactgatgatcggactcgaatttgaagaaccgatcaaggaattgcgcagccgcctcatctacgacgaacacgtatttacgggagccagcgggacaaatgtactccgcttattgccccctctctgcctcagcatggaggaagcggacgagttccttgcccgtttcaaaagagtactctaactgatatttgattaataaacagcgaacaaaaaagcagcctcgaacagaaaaacagttcttattcaggctgctttttgttttttcgcaatttaccgttacctttgtctgtaagaatacattaaaaaagaagcgcatatgaaaatagctattatcggtgcaggaaacatgggtggttctatagcccgcggcctggcaaaaggaagtctgatagcagactcagatatcattgtatccaaccccagcgcaggcaaactggagaaactgaaagaagaatttccgggcatttccaccactctgagcaatacggaagcggcaacgggagcagatgttgtcattctcgccgtgaagccctggtttgtggagtccgtcatgcgcgagctgaagctgaagagcaaacagacgctcgtatccgtagcggcaggtatcagctttgaagaactcgcacactttgtgatagcaccggagatgccgatgttccgcctgattccgaacactgccatcagcgaactggaaagtatgacgcttatcgcagcacgcaacacgaacgatgaacagaaccagtttatgctccgcctgttcaacgaaatgggaatggccatgctcatccccgaagataagatagccgccaccacggcactgacttcctgcggcatcgcttacgtattgaaatacatccaggcagccatgcaggccggcatcgaaatgggcatccgtcccaaagatgcgatggaaatggtagcccagtccgtcaagggagccgccgcattaattctgaacaatgacacccaccccagcgtagaaatcgacaaagtgactactccgggcggaattacaatcaagggaatcaacgaactggaacacaacggatttacctccgccgtcatcaaagcgatgaaagcatccaaataataccgcaaaattattaataatcaaaaaacaaccacttgtatgaatgaccaaattaaacagatcgcagaacgccttcgcggattacgtgacgtactggaactaacgtctgaagatatcgcccgcgactgcgacatatctgccgaagaataccggctcgcagaaacaggacaatacgacatttccgttagtatgctacaaaagatagcccgtacctacaacatcgcactggatgctttgatgtttggcgaagagccgaaaatgaacagctacttcgtgacccgtgccggcaaaggagtcagcatcgaacgtaccagggcttacaaataccagtcactggcgtcgggcttcatgaaccgcaccgccgatcctttcatcgtcacggtcgaaccgaagggagacgatgagccgatccattataaccaccacaacggacaggaattcaacctggtggttgaaggccgtatgcttatcaacatcgagggcaaggaaatcatcctgaaccaaggagacagtatttattttaattcaaaacttccacatggcatgaaagcgctcgatggcaaaacggtacgttttctggccgtaattatgtaataacgttatggtagaaagatttttagcacagactagctttgcctcacaagaggatttcatcaagaacctgaaaataaacgtaccggagaatttcaacttcggctacgacgtagtagatgcctgggctgccgaacaacccgacaagaacgctctgctctggaccaatgaccaaggcgaaagccgtcagttctccttcgccgacatgaaacgctatacggacatgacggcctcttacttccagagcctcggcatcggtcgcggagacatggtgatgctgattctgaagcgccgctatgagttctggtacagcaccatcgccctgcataagctgggagcaacggtgatccccgccactcacctgctgacaaagaaagatatcatctatcgctgcaacgctgccgacatcaaaatgattgtggctgccggcgaaggaatcatactgcaacacatcaaagatgctcttcccgagtgtccgagcgtggaaaagctggtcagtgtaggtccggaagttccggaaggattcgaagatttccatcagggaatcgataatgctgcccctttcatccgcccgagacatgccaatacgaatgacgacatctcactgatgtacttcacttccggcactaccggcgaacctaaaatggtagcacatgactttacgtatccgttaggtcatatcgttacgggtagtttctggcacaatctggatgagaacagcctccacctcaccatcgccgataccggctggggaaaagccgtatggggaaaactctacggacaatggatcgccggagccaacattttcgtctatgaccacgaaaagttcacgcccgcagctattctggaaaagatacaggagtatcaggtgacttccctttgcgcacctccaaccatcttccgttttctgattcatgaagacctgactaaatatgacttgtcttcactgcggtattgcaccattgccggagaagcactgaaccctgccgtattcgaaaccttcaagaaactgacaggcatcaagctgatggaaggtttcggacagacggaaacgacactgacagttgccaccatgccttggatggaaccgaaaccgggaagcatgggactgcccaatccgcagtatgacgtagacctgatcgacagtgaaggtcgctccgtggaagccggagagcaaggacaaattgtgatccgtaccagcaaaggcaaacctctcggacttttcaaagagtactatcgggatgcagaacgtacacacgaggcttggcacgacggcatttactacacaggtgatgtagcatggaaagacgaagacggatacctttggtttgtaggacgtgcagacgacgtaatcaagagttccggttaccgtatcggcccgttcgaagtggaaagcgctttgatgacgcaccctgccgtcatagaatgtgctatcaccggagtacccgatgagattcgcggacaggtagttaaagctactatcgtattgtccaaagactataaagcacgtgccggagaagaactgatcaaggaattgcagaaccacgtcaagaaggtgactgctccttataaatatccgcgtgtgattgagttcgttgacgaactgcccaagactatcagcggcaagattcgtcgcgtggaaattcgcgagaacgatgagaaataa

SEQ ID NO: 474 - DNA, 9641 bp, unidentified
  source 1..9641: mol_type = unassigned DNA
ttatatggagccgtgctcgcaggagtaaacgtgtacgtccccgcgccgtaaaaatcccatcgacgaccagaacgcctgccccgcctgattatcggaaaacacgaaaatatgcgttttatcgatgccctcccttttgagcccttccagcgcttcctgggccatttgccttgccacgccgtgcctgcggtagccgggcagtacagccatatgatggagaaatccgcgccgcccgtcatgtccggcgagcaccgcgccgatgattttcccgtcctcttgcgcgacgacgctcaaaccctcgttgcgctttaagtaacggcagatttcttcccgcccgtccgatttcgacagcgcgcgctttgaagtcacctgccacatggcgcggacttcattataatcgttttccttcattttcctgatggtcatagggtacctcttttttagtaaaacatcgtgccgatgccctcgtcggagaacatctcgattaaaatggagtgctcaatcctgccgtcgataatatgcgcccgcttgacgccctgccgtacggcctcgacgcagcaatcgattttaggaatcatgccgccgcttatgattttttcccgcttgaggctcgggacgtcgctgacgttgacaacaggaatcagcgtgctttcgtcttccctgtcgcgcagaaggccgcggatgtcggtcatcaggattagcttgcacgcgccgagcttcgccgcgatgctggccgccgcgatatccgcgttgatattgtaaacctcgccatggtacccgcccgcgatggtcgagattatcggcacatagcctttttcaatcgcgtcttcgattacgccggaattgacctctgtgatttcgcctacaaagcccaaatcctcagctgaagccagcttttccgccataatcatgcgggagtcgagcccgcaaaggccaagcgccctgccgccatgcccctcaagctgctggacaagccccttgttgaccttgcccgcgagtaccatctggacgatttcgacagtctcttcgtcggtgacgcgcattccgtttacgaatttgctttccttaccgacctttttgagcatttcgctgatttccggaccgcccccgtggacgagcacaacgttgatgcccacaagctgcatcaggacgatatcgctcatgaccgcgcttttaagctgggggcttatcatcgcgttgccgccgtattttacgacaatcgtctgtcccgcaaatttttgtatgtacggcagcgcctgtatgagcacctgggctcgcttttcgcttgttatatccataatagttcctcccggaatcagattatccattctatcttttacggccgttataaagccatcaattctttccttattttttcatcgaacttttccagcgcatagcggaaagcggttctcggcatttctttatggcgcagggccaggtattctttcacagattccatatctgccgttgataagcatttcagcatccagccatagcccttttgaacaaggtcatgcccgtcatacataagcaaatcgctaatttgatatgggtaaaggccctcataatcgttatgtaaaatcgcggggattagtattacggcagaagcgcgccgtacccaaaaatccttgtccgccgtccaatcggttatttttgcaaacagcgatttatctctttgtaataaagcgccaaacgcgtgcgtacagaaatcgtcacagtcgccccagccccgtacataccttttcagccagctataaaaaacatcatatgtagcttcgttatattggcctcttacccggaacgcccagtcatacgctatcacgcctaacgcccagctttgctgttccagcagctcttcgcagagggccaggacattccctattgttttatcttccagttcccgaaacagcttggcagacaattttctgatatcgcctgtaatgatatgcttcccttgcggaacagcggacgcaagcttttcaatttcctccattgcccggaggattatttcattcatattttctgtctcctataaagtatacacatgacaggtaaaaggcggccgccgcatatctaagctaagtaagggcgcggcagtcccggtatacgccaatttactgaaaagtcggctcaggtgcggtagtcgccgtttattttaacataatcatacgtcaaatcacagccgtaggcctccgcacaggatgaaccgtcgtttaaggatacctcaatggtaatttccttttcgctgagaatctcttttgccttatcctcagaaaattcaattcccgcgccgtttttgcagacgggaagcgttcctttgccggaggcaaacgccacatctactttatggatatcaacgtcacagccgctgtagccgatggcgcacagcaccctgccccagtttgcgtccgcgccgaacatagcggccttgagcaagctcgagcaaatgaccgttttcgcaacgccctttgcgtcctcctttgtctttgcaccggtgacggaacagacgagaagcttcgtcgcgccctcgccgtcccccgcaagcattttggaaagctttttgcacagtgctgtcagcgcctgcacaaaggccctgtaatcttcgttcttttctgtaatttcggcgttgcccgccttgccggacgccataatggtgagcgtatcgtttgtggaggtgtcgccatcgacgcttaccatattataggaatccccggctgcctccttgagcgcttcataaagcatgccggaggaaaccgcggcgtcggtcgtcaggaagctcagcatcgttcccatgttgatatgtatcatgccgctgccctttgcaatgccgccgatggttacggttttaccatccagggtaagcacggcggccgcttcctttttgacggtgtctgtcgtcatgatggcttccgccgcgtcggtaccgccagctttggagagatgggcaaaaagctcatccgctttattttcgattggctcaatcggaagaacctggccgattacccctgtagaagcgacaataacgtcttcgggaacaatctgaagcttttccgccgcaatttcacacatacggtttgctttttccataccgtctgcgttgcaggtgttggcgttgccgctgtttgcgataaccgcctgtgcccttccgttttttaaatgttcctgtgtaacaagaaccgcggagcttttgactaagttttgtgtgtagacgcccgccgcgctgcagggtacgtcgcaggcaagcagcatcaaatcacgcttcgtatggttattcggtttgatggaacagcatatacccgccgccgtaaagccctgcggggttgtgaccgtcccgtctatcagctgataaggcataatatcctcctaaagccgccgcgcgttaaaaagcaggcggcacaatttcgagccctgttttttcgtcgagcccgaacacgatattcatattctgaacggcctgccccgccgcgcccttgaccatgttgtcgatggcggaaacggcgatgagcctgttcgcgcgcgtatcgatatgcagcgaaatatcgcagaagtttgagtatttgatgtcgtggatgtccgcgtacgcgccgtcgggcaaaagccggacaaaatattcatcatggtaaaattcctcgtaggcagccctgattttttctttcgtcgcgccctcgcttaacattgcgtagcaagtggaaagaatgccgcggtttatcggcagcaggtgcggtacaaaggtaatcgtcacattttcgcccgcgagatgggaaagcgtttgctcgatttccggcgtatggcggtgggccgccaccttatatgggtggaacccttcgttcaaatcgggataatgcgtgttctgggacagccccctgcccgcgcccgttacgcctgatttgcagtccgctacaatacctttggcggagataagcccagcgctgattgcgggggcgagcgccagcggcacgcccgtcgtatagcagccggggttcgctattgtttttttgccctttatctggtcgcggaacagctccggcagcgcgtacacggaattcctgtgcagctccttgtccttatactccccgccgtaccattccttatagtcgtcctcgttttccagcctgaagtccgcgccaaggtcgataaagattttttcccgctcgtaacattcctttgcgatgtcctgggaaagcccgtgcgggagcgccgcgaacaccacgtcgcttttatctatcacatcctgcgcggttgtgcaaaccatatcgtttagccggcggtatgcgggataaacggaagaaaccggctttccttcaaaagatacggagctaatcgcggcgatttccgcctgcgggtgctgcatgagcaggcgcacaagctccgcgcccgcgtaacccgtcgcgccgatgattcctgcttttatcataaaaggtctccccttctgttttccttagttactgaataatctgcccagcggcagagcgcgcccgcttccgcgtcctttgctctatcggccagccattattgcaaagccttacgtacctttgcggcctgttcaagcacgtttttggtagcggggccgccgtatgccgcgcgcccgttgacgcacgcctccagcgaaatcgcgtcaaaaacgccctcgtcgaacgtaccgcatacctttttatattcctcaagcggcagcgtttcgagcgtcagccccagttcgatgcactttgcgacgagcgttcccgtcgccttatatgcgtcgcggaacggcaggccctttttaaccaggtagtcggcgcagtcggtcgcgttgataaacccgcccgcggcggcacggcgcatattttccggcagcaccttcatggtgtctagcatcggggtaaaggcagtcaggcacatcctgaccgtgtcaaccgcgtcgaaaatggcctccttgtcctcctgcatatccttgttgtatgcaagcgggatacccttcatgacggtaagcagcgtcatcaaatccccgaatacgcgcccggattttccgcgcacaagctccgcgatgtccgggttctttttttgcggcatgatgctggagcccgtcgaaaacgcgtcgtccagctcaatgaacttgaactcccatgaacaccacatgatgatttcctcggaaaagcgtgacaggtgcaccattacgatggaaagcactcccgccagctccatacagaaatcacggtctgaaacgccgtcgaggctgttcatggtaatatctgaaaaatcaagaagctttgccgttaccgaccggtcaatcggataggtggtgcaggcaagcgctcccgagccgagcggcataacgtccatgcgccccctgcaatcttgaaggcgcgacaaatcgcgcatgagcatctgcgcgtacgccataagatgatggccgaaggtaatcggctgtgcccgctgcaaatgggtataaccgggcataacggttgcggcatactgctccgccttgtcacagatgaccattacaagctccttgagcagggcctcaatgcgtccgcattcgtttttaagcgtcatttttatatcgagcgccacctggtcgttgcggctgcgcgccgtatgcaggcgcttacccgtatctcccaggcgagcggtcagctcgccctcaatgaacgtgtggatatcctcggcctgagggtcgattgcaagcgtgccggactcaatatcctttaaaataccagagagcccttcgcagattttctccgcctcgcttttctcgataatgccgcactggccaagcatggcggcgtgggcgatgctgccttctatgtcctctttatacatgcgctggtcaaacgggatggaggaattgaaatcgtttgtggttttgctgatttccttctgaaaacgccctgtccaaagcttcaatgaaattcacctcataaaatcagtacacggggcggagaaagattcgtccgcccctgtaaatgttgatattttattttctgatggagtaattttgcgccggctgccatccggcgtaaacacaaaatgcggatatgtcaaacgccagcagcaaaataacgtgaaaaaattatttgattaagccctttttcgcccgcaccttaatcggcaggccgaacaggttgataaacccagcggaatcgttctggtcataaacctcatcctcgtcgaaggtcgcaatttcctcatcatagagggaatacggggaggttacgcccgcgtccatgatatttcccttgtaaagctttaattttacgtcgcccgtaacggtttgctgcgtgctgtcgacaaacgcggaaagcgcctcccttaaaggggtgtaccactgcccatagtaaacaagctccgcaaaacgggttgccacggtttccttataatgctgtgtatcgcggtcaaggcagatttcctcaagcttgctgtgcgcggcgtaaaggatagtgccgccgggcgtttcgtacacgcccctggccttcatgccgacgagcctgttctctaccatatcgacaatgccaacgccgtttcttccgccgatttcattaagcgtcttgacaatggaaaccgcgtcgagcttctggccgtttacggcaaccggctcgcctttttcaaacgaaaccgtaacatactccggcttgtcgggcgcctgctccggtgatacgccgagctcgaggaaccccggctcgttatacttcggctcgttcgccgggtcctcaaggtcgagaccctcatgcgaaaggtgccagatgtttttatccttgctgtagtttgtttccctgttgattttcagcggaatacccttctcctccgcgtaggcaatctcttcctccctggatttgaactcccacgtcctccaaggcgcgataatcgtcatatccggagcatacgccttaatagcgagctcaaaacgcacctggtcgttgcccttgcccgtacagccgtggcagatggcgtcggcgccttccttaagcgcgatttcgacaatcctcttcgcgataatcggccttgcaaacgacgtgcccagcaggtacttaccctcatacacggcgcccgccttgagcgtgggccatacgtattcctcaataaattccttgttcaggtcttctatgtaaagctttgacgcgcctgtcttaatcgccttttcctcaaggccgtcaagctcggtaccctgcccgacatcgccggacacggcaatcacctcgcagttgtcataattctccttgagccacgggataataatagacgtgtcgagcccgccggaataagccaatacaaccttttttatcttcttttccataataaattcctccgtatctaaaatataagctgattttctgttaaccgtatggctatcattatacaccccttatgcaaaaaatcaagtcttttatgtataattattcaagataaagcgtttttgtagccctcaacaaaaagacaacgaattgcggcggcggaactatacaaattatgggaaagctttcaattgcgccgctgcctatatttttattccgaccgcataacgtaaagccgccgccaggcggaaaccgcgcccgagtgcatattatgcataattttttgtatattatacacatcggtgctataatcagcataaactgaatcgaccaaaatcatacttggagggactgcaaatgaaaggctttcaggaaatcagctgcagccagctgaaagacaacccctttacgctcatcggcaaggactggatgctcgtcaccgcaggcacggaagaaaaatacaacaccatgaccgcaagctggggcggcgtcggttttttatggaacaaaaacgtcgcgtttacgtttatccgcccacagcgctatacgctcgaatttgtcgaccagaacgaatattacacactttccttttatggggaggaaatgcgtaaggcgctgtccttctgcggctcgaaatccggcagagattacgataaggccagggaaacggggcttgtgcccgtatttgacgaaaaagcgccgtactttgagcaggcgcgcctggtgcttgtctgccgtaagctttataagcaggacttttcacccgcctgctttatcgaccagtcgctcgattccaattataaagataaagactaccacaaaatgttcatcggcgaaatcgtgaaggtgctggttaaaaatggctgacctataccggcggaggaagtgcaaatggaaaaaaccgtactcattacgggcgcgtcgcgcggaatcggcgcaggctgcgcccagctttttgcgaaacacggctacaatatagcggttcactataataaaagtgaaaagcaggcgctgcagataaaggcgcacgcggagtccttcggcgtactcgccgcggcattccaggcggatgtaagcgacagcgcgcaggtaaaccggatggtagcagacgtgcttaaaacgtttgggcgtatcgatatcctcgttaacaacgcgggcattgcgcagcaaaagcttttgccagatattacggatgaagactggcagcatatgctcggtacgaatttaagcggcatgttctactgctgccgtgcggcgcttccccatatgatacgggagcaccggggctcaatcgtcaatattgcgtccatgtggggtatcaccggggcgagctgcgaggtacactattccgcggcaaagggcggcgccgtcacgatgacaaaggcgctggccaaagaggtcgcgcccagcggtatccgcgtcaactgcgtctgccccggtgtaatccaaacagaaatgaacgcgcagctgtccggcgacgctttggatgaactcaaggcagaaacgcccctcggccgccttggcctgcctctcgacgtggcaaaggccgtctgctttctggcggaggacgagtattcttcctttatcaccggccaggtattgagtgtagacggagggtttgccgtttaaaacaaggcgccccagcatatgttaaaaaaacaaggccatccggctttctcagaaccggatggccttgtttttcattctgctaaatgaagtattgcgctgtttatcttctgtatggctgcgaaacatccgtaagccccagaatataatcggtacttaccttataaaacctggccagggaaatcagcatttgtgcgggcgtatcctgttcgccccgttcacagcgggcgtatttatccgcttttacatttataatcgatgcaatttggttataggtaaggcagcgcattttgcgtatttccctcatcctttcataacggttcattttttcgcctcctttccaagccgcccgcggcttctctctgccatttaatttttactgacatttaattttactgaaatataaatgggcagattccctgttattttgagatttccacccctcgattttacaccatttcttttttcatacgtgaatttcacttaaaaagtcataagcgatatccacttaggcgataattgtacaggggtgtcgccatgagattaagaatcagagatttaagagaagaccgcaatctgcagcaaaaagatatcgccaaatacttgaacgttcatcaaacgacgtattcgagctatgaaaacggaaagctgaatttgccgatcagcgcgctcgacaagcttgccgatttctacaatacaagtacggattatttgatgggccgtaccaacaacccggatccgtatgaatag

SEQ ID NO: 475 - DNA, 8708 bp, unidentified
  source 1..8708: mol_type = unassigned DNA
ttagtcttcgccgtacccgttcggatgcgcggcgtgccacttccaggcggaagcgatgatctcctccacgccggtgtgtttgggctgccagcgcagtacctccatagccttccggctggaggcgatcagggtcgccgggtcgcccggacggcggggcgcttccgtgaccgggatgggatgaccggtgaccttccgggccgcctcgatgatctcgcggttggagaagccctggccgttgcccagattgaaggcggcggagggattgccctgtttcagatagtccagcgccagcaggtgagcgtcgatcagatcctccacatggatataatcccgcacgcaggtgccgtcccgggtgggatagtcggcgccgtaaagggagagacgctcccgcttgccctgggcgacctgaagaatgacggggatcagatgggtctcgggccggtgatcctccccaatggacccgtcgtgccaggcgcccgccacattaaagtagcgcagcgcgcagaatttgaggccgtgggcctggtcgcaccaccggagcatatgctccacgatgagcttgctctccccgtaagggttggtgggcagctggcggtcggtctccacaatggggatgtgttccggctcgccataagtggcggcggtggaggaaaagaccagataggggacctggaattcgatcatggtctcgatcagggagagtccggcggtcacgttgttgcggaaatagcgctcgggtacgtccatgctttcgcccaccagcgaataggcggcaaagtggatgaccgcctcgatggattccttctggaacacctcccgcagaaacgcgcgctcgcccacgttccccacatagagccgcccgcctttgagggcggcgcggtggcccttggacaggtcgtccacgaccgccacgtccgcgcccgcctccagcagggaggccacacagtgggagccgatatacccggcgccgccggtcactaggatcgccataatcacattacctccattatctataacgtttcaagcaggaaacggccgatgctctccatggcctcgttggcttttttcatggggaacatctggaatacgtgccaaagttccgtccatacctccagcttgcaggggacgttggcctggaccagccggtcccgcaggcggatggagtcggacagcagcagctcgttggtgcccgcctgaatgagggtgggcggaaagtgcttcaaatcgccgaagaggggagagagcaggggagaggaccagtcctgcccccgggcgtaagcgtcccgcacggcgtagatataattgagggtgagcaccgggtcgatctccgcgcgctcctgataggacttgccgctggcggtcatgtcggtccagggggagagcaggatgagggcgcggggcagtcggcgcttggccgcgcggagctgatgggtgagcaccagggccagattgcctccggcggagtcgccggccaccaccacgtcccgggcgccgaacccctggtacatcaagtgatcccaggccgccgcagcgtcctccacggcggcggggtaggggtgctccggcgccagacggtattcaaaggtcagcaccgggtaaccggacacgtgggccagcttggaggcaagaatgcgggaatccccgagggtaccgctggtatagccgccgccgtgacagtagaggatgcatcgccgccggtcgtagccacggctggggcgaacccaggcggcgttcataaaaccgagctggaagggctcccagctcatacccgccatgggggctaccaaacggcccagcagctcctgccccttgcgctgcttgtccagatcttccgggtccatggtctcgggcgtggccgcggagtggatggccttcagcgcgcgcaggaacgggtccagacgccgctgctcagcctcgcgccgctgctccggcgtacgccgggccagcttcatgtggggacggtcctgctccataaaaatccttccttccgccgccctgcgcggcataaatcagaccaaaccgctctcggggcaaaatgggcctggccgtccggcgacccggcaggggggatgttgcaccctgccggaaacgcccacagccgcagtgcctgcatgtgctttgcacggcggcacggcgccgccctgcaaagcacatgcaaagcggctgcttccgcaggcattattatagcatgcccggctgttaaaaggaaggggaagatacggcaggtttccccttgtggcgcgtgccgtaacgtggtatgctaaagaaaacggagttggacgaggggggcgggaacatggcgaaggaccggcggggcggcaagccggagtggtatccgctggacaacgcgggcgtactgtactccgccattcagaaggagaactattccgccatctaccgcttttccgccgtcatggccgctccggtggaccccgacgccctccagcgggcggtggagcggaccatgccccgctttcccagctttgccgtgcggatcaaacggggggcgttctggcattatttcgagcccaaccatgccgccggtcccttcgtgaagccggatatcgccaatccctgccagccggtgcgcttccaggaggacaacggctggctggtgcggttttactactatgaaacgcgcatctcgctggaggtcttccatgcggtgagcgacggcgctggggcgctggtctttttcaagaccctgctggcggtctatctgcgggaactgggccatatcattcccaatacctgcgggatcctggatgtggacgagccgccccgtccggaggagcgggaggacgcctatgagcgttatgccacggtaaaggcccggcggtccggcctggaaaagaaggcctatccgaataccggaacgccggagcccttttataccctgaatgtgaccatgggctttttgccggtggatcagctgaaggcccgggcgaagggatacggtgtgtcgatcacggagtatctgacggcggtgctgctgaaggttatcgtggacaagcagcaccgggagcgcccccgccgggagaagccggtggcgctggccatccccatcaacctgcgggcctggttcccgtcggagacgctgcgcaatttcatcctgaccgtacgcccctgcatcgatccctcgctgggggagtataccttcgcggaggtggtctcccaggtccaccactttctgcggctgaatatcaaccgccagcagatgcaggccctgttgacgggcaacgtgaagtttaccaccaaccgattgctgcagatcgtgcccatcgtgctgaaaaacccggtgatggccctgggctaccgcctttcgggcgtgcggccctattcgggtacctataccaatcccggccccttcccggtgccggaggagatggccccccacatccgccgcatggaggttattttggggcaggccaccaatccgcgggtccactgcgcctccatcagctacggcaataccatggagatcacgttcgccgggacccttcaggagaccgataccgagcgggatttcttccgcttcctggtgcgggagggcatccccgtaaaggtggagagcaaccgcacggtccgctccgaactgatgttttaaggaggcgtcccaatgtcctattgtgtcaactgcggggtggagctggacgccaccgcgtccttctgcccgctgtgccatacgccggtgctcaaccccggccagccggtggacgagcacgcgcccaagccctttcccacccagcggggcgaggtggcgcccgcctccaaacgggagctggcgctgctcatcacggccatgctggcctcggtggcggtatgctgcggcgtgctcaatctgtttttgaaccagcagcggccgtggtcgctttacgtcatcggcgcggcggtgatgctgtggatctggttcgtgccgccgctgctggcccgggggatgcacttgctgctgcggcttttgctggatgtggcggcggtggccatctatgtgttcctcatctccgtggatctggacgggcgaagctggttctgcggtctggcgctgcccatcattctgtggggcggcgcgatcctgctgctgctggggctggtgctgcgggtctaccggcgaagcgtccttaccagtgtgaccatcctcatcggcagcgtcggcgtgcttttgttcggagtggaatttttcctggaccgctggctttccgggtcctgggagccctcctggtcggtggtggtgctggccgtctgcgccgggctgaccatcccgcttctggtcatccgcagggtgccctctctccgggaggaggtgcgcaggcgcttccacctgtaaggcacgggcgctgatatgcagaataaaacgaatattatgcataatgtgggaaaaatatcggaaaaatacgggggtcaattcgcatatttatgcgaattgacccttgctttttccaagggcgcgtggtacactgtttccaacatcagaaaacagtatcacaacggaggtcattaccatgtctgagatcaaaaaagtcgtgcttgcctattccggcggcctggatacgtccatcattatcccctggctgaaagagaactacaacgaccccgagatcatcgccgtctccgccgacgtgggccagggcgacgaactggacggtctggaggagaaagccatcaagaccggcgcggccaagctgtacatcgaggacctggtggacgagatggtggacgacgtcatcatcccctccatgcagatgggcgccaaatatgaggattatctgctgggcaccgcctttgcccggcccatcattgccaaacggctggtggagatcgcccggaaggagggggcggacgccatctgccacggctgtaccggcaagggcaacgatcaggtccgttttgaactggccatcaagcgtttcgccccggagatgaagatcatcgccccctggcgggagtggtccatcaagggccgggacgaggagatcgactacgccgaagcccacaacgtgcccctgaagatctcccgtgagaccaactattccaaagacaagaacctgtggcacctcagccatgagggcctggacctggaagacccggccagcgagcctcagtacgacaagcccggtttcctggagatgagcgtgtctcccgctatggcccccgaccaggccacctacgtgaccctggactttgcccagggcgtgcctgtggccatcgacggcgagcagaagaaggccagcgatatcatccgcaagctgaaccagctgggcggggccaacggtatcggcctgctggacatcgtggagaaccggctggtgggcatgaaggaccgcggcgtatacgagacccccggcggcgccattctctaccgcgcccatgaggtgctggagatgatcaccatcgacaaggacaccaagcatatgaagcagaagctggcggtggactttgccgacctggtctacaacggcaagtggttcacacccctgcgggaggcgctgtccgcgtttgtgaccgcgacccagaagcatgtgaccgggaccgtgaagctcaagctttacaagggcaacatcatcaccgccggcgttacctctcccgagaccctttattccgagaatctggtcacctttgaggagagcgattacaaccagaacgacgccaccggctttatcaacctctggggcctgccggatacggtgcaggcgctgcgggagcaggggaagctgtaatcggtaaaaaggctccgccttttcggcgattcggctgcaggccgccgcgcgcactcgccgcgcctgcacgcctggggcctgagcggtatgcctgcccggcgcatgtccgagcaaacacgatcggaattgacttgccgcttcggcggcagagctgtgatgctgaggaaggcggcggcggctggccgccgccttcgccttaggaaggagcgatactatgaaactctgggcaggccggttccaaaaggagaccgataccctggtcaatgattttaactcctcgatctcctttgacgcgcggatgtacaaggaggatattgcaggctccatcgcccatgcggccatgctgggcaagcaggggatcatcgaggcgcacgaggcggaaaagatcatcggcggcctccaggccatcctggcggacatcgagggcggccgggtggagttctccctggagaacgaagatatccacatgaatatcgagaccatgctcacccagcggatcggggacacgggcaagcgcctgcacaccgcccgcagccggaacgaccaggtggccgtggatttccgcctctttgtcaaagaggagatcccgcagatgatcgcccaggtgctggatttggagcgggtgctgatccagaaggcaaaggccaatctggagaccgttatgcccggctatacccacctccagcgggcccagcccaccacctttggccactatatgatggcctatgccaatatgctcaagcgggatgtgacccgtctggaggactgcctggaacggatggatgagtgcccgctgggggccggcgctctggctgcctccacctatccggtggaccgcttcgccaccgccgccgccctgggctttcggaagcccacggataactccatggattccgtctccgaccgggacttcgccatcgagctgctttcggcctgctccattttgatgatgcacctgtcccgcttttcggaggagatcatcctctggtgctcctgggagttcaagtatgtggagctggacgacgcttattccaccggctcttccatcatgccgcagaagaaaaaccccgacgtggccgaactggtccggggcaagaccggacgggtgtacggttcgctcgttaccctgctcaccgtcatgaagggcctgccgctggcctataacaaggacatgcaggaagataaggagtgcgtgttcgacgccatcgacacggtaaaaatgtgcctgccggtgtttaccgcgatgctggataccctgaccgtcaaggaaaaaaatatgcaccgcgcggccgcgggcggcttcatcaacgctacagattgcgccgactacctggtcaaaaagggtatgcccttccgggaggcgtatatgatcgtggggcggctggtgaatatgtgcatcaagaccggagagaccctggacaccttgccgctgaaggacttccgttcggtttccggcgtgttcgacgccgatgtgtatcaggcgctggaactgaagacctgcgtcaacggccgcaaagtctacggcggcccggccaaagaggcagtggagcggcagatcgaagccatcgagcagtttgtgagggagcggacatgatgggaaaaccggtcatctacatcgacggtcaggagggcacaaccggcctgcagatcgataaacgcttgggcagccgggacgatatcgagctgctgcgtatccgcgaggataaacgcaaggatctggaggagcgcagaaggctcatcaacgaggccgatctggtatttctctgcctgccggacgccgccgcggcggaggcggtgagcctcatcgaaaatcccaatacccgggttattgacgcatccaccgcccaccggaccgcccccggctgggtgtacggcttcccggagctgtacaaggacccggagcagaccattgggacggcccgcttcgtggccaaccccggctgccatgccacgggctttctggccacggtggccccgctgatccagatgcgcatcctgcatccggattaccccctgacctgctattccctcaccggctactccggcggaggaaagaagatgatcgcccagtacgagggggaggagaagccggaagagctgtacgccccgcgtacttacggcaccaccctcaagcacaagcatctggccgagatgcagaagatctccggcctggaggcgccgccggtgttctgccccatcgtggatgactacgagaagggcatggccaccacggtgatgctccataaccgttatctgaaggggcagcccaccgcccgggagctgagtctcatcctggcggcctattacgccaagcagcccgtcgtgcgcgtggcgccttatacgcagcagccgcagttcctcgcgtccaacgtgctggccgggtccgacgggttggagatcaccgtcagcggccatgagcggcagagcatcctgaccgcccgctttgacaacctgggcaagggcgcgtccggcgcggcggtacagaacatgaatctgatgctggggtttgcgcccacggccggactcagcctgtaggaggagaagaagatgaaacaagtacccggcggcgtgaccgcccccaagggatttaccgcgtccggcgtccactgcggcgtcaaaaagggcaagggggacggcaatcagccccccacgagcaagatgccggaggtgctggagggaaaaaaggatctggcgctcatcgtctccgagcagccctgtgcggcggcggccgtgtataccatgaaccgggtgaaggccgcgccgctgtatgtgacgatggaccacctggaaaacggcgaggcccaggccatcgtggccaactccggaaacgccaatgcctgcgcccccaacagccatgagcatgccgaggagatgtgcgccctggcggcccgggccacggggctcaaaccctccgactgtgtggtggcctccaccggcgtcatcgggcaggagctgaacatcgccgccatccgggcggggatgcccgcggcggcg

SEQ ID NO: 476 - DNA, 18248 bp, unidentified
  source 1..18248: mol_type = unassigned DNA
atgaacaagatctcgcgtaaaggctttctgaagatcgccgctgccgctgccatgtccggtgtcaccgccggtgcactggctgcctgcaacgctgcaagctcctccactgccgcttccgccggtgcagcaggcagctacacccccggtacctacaccggcactgccgagggcatttcctctaccgtcaaggtcaccatgaccttctctgacagtgctgtgaccgacgttgtggtcgatacctccggcgagaccgcttcctacggcgctgctgctgccgaggagctgaagaaccagctgctgaacgccggctctgacgagatcgacggtgtgtccggctctaccatcacctccgatgccgtgaagaaggccgccaagagctgctttgcacaggcaaagggagaggcaactgtaacttccgttcagctgcccaccggcgacgagaccgattggctgggcaaggagcctgacattgacgaggctgccatcaccgagaccgtggacaccgacatcctcatcgtgggtgccggcaacggcggtatgttcgctgctgcttatgccgctgccaagggcctgaacttccgtgtcatcgagcagaacggcaatgtgcaggatacccgtcactgggtgggtgccgtggacggctttggcgctcaggaacagggcatcaagatggatcgtgccaagctgctgagcgaggtctcccgttacgcctccggcaagtgtgatcagcgcgtggtcaagacctggatcaacgagtctgccgagatgatcgaatttgtccgctccatcatggaggacaagtacggcgtgaagatgatctacacctacggcgacgaggccaagtggcctgcagaaaacgccgagcacaacaccgattatatgtaccccgagatcgagtatacctatgatcgctccagtggtgccgcccggaacgagctgctgctgcagtacatccaggagctgggctacgatgtggacttcaagaccagtctggccaagctggaaaagaacagcgatggccgcattaccggcatcatcgcccagagcaccgaggatgaccacttcatccgctacaacgccaacaagggcgtgctgctggcctgcggcggcttccccggtaacccctacatgatggagcagctggacccgctgggcacctccgtcaccaccgcatgctcctactctccctccgataagggctacggcatccgggctgcaatgtgggcaggtgccaatctggacaaggaggctgctcccatgctgtttgaccgcggcatcgtggcccccggcgtggatggcggctatgtggacagcgacactgcctttggcggcaaggctttccctggtaccatccgtcagtacaaccccggcacccagcccttcctgaaggtgaaccgcaacggcgagcgctttgccaacgagagcagcccctacaatgacatcgtctacgccgctgctcaccagccgggccgtgtctacgctcagatctgcgatgccaacattctggaggacgcaaagcgtttccacaccatcggctgctctgcccagacccgtaacggcggtgagaagtacattcagggtaagatggacgaggcgatcgaggccggcgcattgttcaagtgcgatacgctggacgagctggctgacaagatgggctttactggcgctgccaaggacaccttccttgctaccgtggagcgctacaacgagctctacgacaagcagaacgacgaggacttcggcaagcccgcttaccgcctcagcgccatccgcaccgcgcccttctacggctgctggctgggtgcctctctgctgaccactgagcagggcattgccatcaacgaaaagggtcaggctctggacaacgataacaagcccatgcccggcctgtatatcaccggcgatatgtccggcagcttctttgccaacaactatccctgcctgatggctggtgttgccatgggccgcaccctgaccttcgccatgaaggctgttaaacagatggccggtctggaatgatgtcactccccggaaaatgaactgaaaaccgcataaaaatgcagcgccgctgaagccctgaaaagcttcggcggcgctgttttacgtttccctctatacacaaaaaatgtcaggcagtcctcagcacacggcacggcggggagcggccagaggctcgatcaccggcgggtgcatcccttcccggtagtccagatccccctgatccatgccgcggagcagtacctcggcggtggcaatgttggtggcaatgggtacgctgtgcatatcacacaggcggagcaggttctgctcgttggagctgccgctgtcggcccggagcgggtcgcggaagaacagcaccagatccacttcatcgcaggcaacacgggcggtgatctgctgaatgccgcccagctttccggagaggtaacagtgaactggcaagccggtggcctggttcaacatccggccggtggtaccggtggcaatgacagtgttccgggacaggatgccactgtaggcggtgcagaactgaagtgcaagttctttgcgggaatcatgtgcaaggatggcaattgtcataatccgctctctcctttgtactagtgtcgtcatgcggacatctgtttgaaatggattgcagttgtgagaaggacagttccgagcgcacttcagagcgccccgccgaacttgttcccacactttccaatatagttttaccgcgtcgaaatatgggttgtcaaggggaaaatgagaatttttaccctaatttccgataaaagtacgactttgtttttgtacagaatggagaaatgaaaaatacatcatggtacaaacggaaaaataattttcgaatttttggtccgaaagtgtttctataacaaaaacagtccatccctgcaaaacaaaaatacaggccgctgtccttccacggcggcctgtaagaaaaaaacggaaaaatgttttcgcaattgaacggttcagcggatctggccgctgccgtgaatgatgtacttgtagctgcacagctcttccagccccatggggccacgggcgtggagcttctgggtggaaatgcccatttcgcaccccagcccgaactccccgccatcggtaaagcgggtggagcagttgacgtagaccgccgcactgtccaccgccgccgtaaagagggcggcatgggcctcgtcccgggtcaggatagcttcgctgtggccggtggagtgcgcggcgatgtggctgacggcctcctccacgctgtccacgaccttgacagccaggatgtagtccaggaactcggtgtcaaaatccgcagggcctgcaggggtgccggggatgatggcggcggcacgcgggtccaaccgcagctccaccggatgcagtccctttgcagtgcggtcagggcccagccgccgggccagcttgggcagaaactctgccgcaatgtcacggtgcaccaggcacacctcctccgcgttgcagacgctggggcggctggccttggcgttttcgatgatgtccagcgccttatcctgctcggcagaagcatccacgaagatgtggcagatgccggtgccggtctggatgcaggggacttttgcattttccacacaggcgcggatgagcccggccccgccgcgcgggatgagcagatctacatagcccaccgccgtcatcagggcgttggccgaagcgtgggtggtgtcctcaatcaggcaaaccgctgtttcgggcaggctgtttgtccgcaggccctcccgcagagccattacaatggcgttggcactgcgccatgcctccctgccgcaccgcaggatgcaggcatttccgctcttgatggcaagggcggcagcatcgctggtcacgttggggcggctctcgtagatgatggcgatcacgcccatgggcacggcggtcttttcgatgaccagcccgttggggcgctccacccggcgcaggactttgcccaccgggtcgggcaggtcagccacttcccggatgccctttgccatggcgctgatgcgctccggtgtcagggccagccgatccagcatgacctccgagatgtgccctctggctgcttccaggtcggcggcattggcctccagaatggcctgctggcgggcaggggagcagagcgcatctgccatgcccagcagggcggcgcggcgtacctcgcccgaggaaaggcccagcgcgcttcttgccgcgcgggcggcttccagaatctcctgtgtcgtcatgggtcagccctcctttctgcccgcaaagcgggtgcctgcgggtctgccgtctgcaatgtcgtagagcagctccgggtgggagccgttggcgatcaccatgtccgcgccctctgccgttaccatctgggcggcacggagcttggtggacatgccgccggtgcccaatgcggagcctgccccgtctgccagcgccagcacctccggagtgatgcgctctaccaccgggatgagctttgcgtccgggtgggtgtgggggttggcggtgtacaggccgtcgatgtcgctcagcagcaccagcagatcggcatggatgcagcaggtgacgatggcggccagcgtgtcattgtcgccgatggaggtgatctcatcagtggcaacggtgtcgttctcattgatgatgggcagcgcacccagctccagcaaccgggtcagggtgttctggaaattcagccgccgtccctcgtgctccacatccacaccggtgagcaggatctgcgccacgttgtggttataggcggtgaacaggcggtcgtaggtgtacatcagctcacattggcccacagcggcacaggcctgcttggtggccatatcaccggggcgggagggcagggacagcttgcccactcccatgccgatggcaccggacgagacgaggatgacctcgtgccctgcgttcttcaggtcgctcagtaccttgaccagatcctctgtgtggcggatgttcagccgcccggtggagtgtgccagcgtggaggtgcccactttgacgacgatgcgcataaacttaaccctttcccatttcctttgtcttgtcgtaggcagcaatcaccgcatcggtcaccgcgccgcggaagccgtgctcttccagcacgcgcacgccctgaatggtgctgccgccggggctgcacaccgcatccttgagctcaccggggtgttttccgctctccagcaccagcttggcgctgcccaataccatctgggctgcgtattcctgtgccttggcccggggcaggccgcaggccacgccgccgtcggccagcgcttcaatgaactggtacacccaggccgggccgcagccggaaacgctgcttgccgcatcgatcagggcctcgggcacagcgtccagccgcccggcgggtgccatcagcttcagaaactcctgctcctcctccgctgtcacattggcggagcaatattggatcatacctgcccccaccgaagccggggtattgggcatgatgcggatcacggggtaatcttcccccgccatctcctggatgcgcgcgatggaaagccctgccgccatgctgcacaggatgaagcggctcggccgctcgttcagggtgaacttaagcggagccagcagggcctccatcatctggggcttgaccgccagaaagatcaggtcggagcggcccgccacctcggcattcgtggtggtgttgcagcccagctctgcggccaacgcctctgccttggcggcagtgcggttggcaagataaacattctgtgggtcggcagccttgcagacggcccgtgcaatggcactgcccatgttcccacagcctaaaaatccgatggtcttgatcatacttgctttcccttcctttctcactcagaaagaaataaatggaacgcacattcgttccactccatccattgtaagcgcccggagccagaaaatcaagagggaacctcccggaaacccggcaaaaaggcggcgggacggctgcaaaatggagaagaacgtgaaaaaaatatcaaaatgagagattttgaacttgcaaaacggggggcatttgcgttatagtataaaggaagtattcttacttctctggccccatagggcggccaccacggtcggcggcacagtgtgtgccgctgggaaaggatggatctcgtgtcacaaactacaaaaagggcgttggaggcatcgctgaaaaagctgctgcttcaaaagccgctgaataagatcaccatcaatgatatcaccgaggactgcggcgtgaaccgtatgaccttctactaccacttcaaggacatctacgacctcgtggattggatcatggtcgaggatgccgccaaggcgctggagggcagacagagctttgagaactggacagatgcctttctggacatcctgcatcaggtgcaggacaacaaggttctggtgatgaatgtttaccgctccgtgagccgtgagcagttggaacagtacttatataaactgctggactccatgctgcgggactttgtggaccgcagtgcgcagggctttaccgtgcaggattccgacaagcagttcatcatcgacttttacaaatacgcgctggtgggcatggcactggaatggatccgcagggatatgaaggaggaccccgtccggatgaccgagcggctgaatgttctgctccacggcgagcttgagcgggcgctccgccgcttccgcaccgaccgcagccccgcagatcttgacgactgacaatattttatcaatccgggcaccgtgatgggttttccatcacggtgctttttctgtttatggctttccgtttgacaaaatgttacagtatggtcagcgcaaaatgaaaggtgaaaacctggaaaccacagcaaacggagggaataaaatgtattattccagcgggaactatgaggcctttgcgcgcccgaaaaagcctgtgggagtggatcggaaatcggcctatctcgtgggcaccggtctggcggcgctgacagctgcctgctacctggtccgcgacggtcagatgaaaggggaacacatccatctctttgaaaagggatccatccccggcggtgcctgtgatggctgccagtaccccggcatcggttatgtgatgcggggcggccgggagatggatgaccattttgaagtcatgtgggatctgttccgttccatcccgtcgcttgagaccgagggcgcaagcgtgctggatgagtactactggctgaacaaggcagaccccaactactcgctctgccgcgccacggaaaaccgggggcagaacgcccacaccgatgggaagttcggcctttcggatcagggctgcatggagctcatcaagctcttttttaccccggatgagcagctctatgataagcgcatcaccgatgtctttgacgcggaggtgttctcttccaacttctggctctattggcgcaccatgttcgcctttgagaactggcacagcgcactggaaatgaagctctatctgaagcgctacatccaccatgtgggtggtctgcctgatctgcggacactgcgctttacccggtacaaccagtacgagagcatgatcctgcccatgatccgctatctggaggggcacggcgtgcgcttccactacaacaccaaggtcaccaacattgagtttgagctgaccgagggcaaaaagcaggccaggaccatctgcctgctggtggacgatgaagcggaacgggtggacctgaccgagaatgatctggtgttcatcaccaacggcggctgcgtggaaagcacttccatcggctcccaggatcagcctgcagtgttcaaccccacgctccggcccggcaacggctgggatctgtggaagaagatctccgcgcaggatgaggcctttggccgcccggaaaagttctgctccgatccggaacagaccaactggatgagcgccacggtcactacgctggacgaacgcatcgtgccctacatccagaacatctgccagcgtgacccgttcagcggcaggactgtcacgggcggcatcgtcacggcgcgggattccggctggctgctcagctggacattcaaccgtcagccccagttcagggatcagcccaagggccagctcgtgggctggatctacggcctgttcagcaacacgcccggcgactacatcaaaaagcccatgcgggattgcaccggcaaggagatctgcatggagtggctgtatcatctgggggtccccgaaaaccagatcgaggacctggcggagcacagtgccaatactgtgcctgtgatgatgccctatatcacagctttcttcatgccccgcaccgcaggcgaccgcccggcggtggtgccggagggcgcagtgaactttgccttcatcggccagtttgccgagacgaagcgggataccatcttcactaccgagtattccatgcgcaccggcatggaagccgtgtacaccctgctggatatcgaccggggcgtgccggaggtctggggcagcacctacgatgtccgcgacctgctgaacgccgctgttcagctgcgggatggcaaacccctgagtgatctgaaaatgaactggatcaaaaaatttgcactgggcaaagcggtagaaaaggtacaggacaccgacctgggccgtctgctgctggagtataagatcatctgagcgccgggaattcagcccggcaggcagggaagagagccctgtaaaattctattgaatctggaggaaataaaaatgaataccgcatttgattctctgacgcacaaaatgcagcgtgctgcactgggcaagactgtggatctcgtgctttctcatgccgagaaggaccccgccaagacggttggacagatcgtagatctttcaaagcagttctacggcgattccttcagcgaggagacctacacacacgccaagcagaccctgaccgaccccaacagcaagtggtcgaagctcatcaactgtatgctgaaccagctggaccccaacgtggcccgcaccacggccctgaacctgggctatgaggccttcttccgcggtaccaagaccatccgcgagaatcgtgtcaaatatcagtgcaacattccctggctgatcctgtttgaccccacctctgcctgcaatatgcactgcgtgggctgctgggccggtgagtacggccacaagaacaacctgagctttgacgatatggataagatcgtcaccgagggcaaggagctgggcgtttatctgtacatgctcaccggcggtgagccgctggtgcgcaaggctgatatcctcaagctggccgagaagcacaacgatgtgcagtttgccatctataccaactccaccctgatcgatgaacctttctgcaaggaagtggttcgtctgggcaacatcgccttcatgctgtccattgagggcaccccggagaccaacgatgcccgccgcggcgagggccactatgctgccgttatgcgcgccatggatctgctcaaggagcacggcatcctgttcggcacctccatctgctacacccgcgacaacatcgaagccgttaccagcgatgagttcatgcgtttcctctgcgagaagggtgcacacttcggcttctacttccactacatgcccgtgggcaacgaggcggctcccgagctgatgccctctcccgagcagcgcaagtacatgatccagcgcatccgctatctgcgcagtgaagcctgcgatatcccgttctaccccatggacttccagaacgatggcgagttcgtgggcggctgcattgccggcggccgcaactacttccacatcaactcggctggtgacgctgaaccctgcgtgttcatccactactccaatgccaacatccatgacagcagcatcctggagatcctgcagagtccgctgttcatggcctaccacaacggccagcccttcaataagaaccatctgcgcccctgccccatgctggaaaaccccgagctgctgcgcaagatggttcacgagaccggtgcccacagcaccgacctccagagtccggaaagcgtcgatcatctgtgcgacaagtgcaagagctacgcagccaattggcagccgaccgccgacgagatctggtcccataccaagatccgcgagagccgttacgagaactataaggattggaagcccaatcagcagtaattgcaggtactccccctgaaatcttcctttttggtttatctgccctgaaagccgaagctcccccttccccaagcgccgagacagcgccgggaagggggagctttgcgtttctcggctgctctgagaaaatcatgcggtaggaatacaaaaaccggccctgtctcccatgcaggagacagagccggttttgcgattctattgtgtttgggatcactcgtcgtcggggtcaccgaaggcatcgtgatagaggtttaccatgccggattcgtcgttgcgattcaggccgtggaacaccagctttttgatgacatcatagatgacagcaaacagcggcacaccgatgatcatgcctacaaagccccacaggccgccgaacagcaggatggcgaacagcacccagaagctggaaaggccggtggtgttgcccaggatcttgggtccgatgatgttgccgtccacctgctgcagcaccagaacgaacagcacgaaccagagcgccttgatggggttctggatcaggatgagcagggtggcggggatggcaccgatgaaggggccgaagaaggggataacattggtcacgccgatgatgaccgacaccagcagggcgctggggaacttgaagatcaggcaggcaatatagcacagcacgccgatgatggcggaatccaggatcttgccgttgatgaagccgccgaacatccggtcagcgtaacggacttcctccatgatgaggtcggcccagcggggcttgaccaaactataaaggatgagcttgccctgctgcccgaacttcttccggctggccagcagatacaccgaaacgatgaggccgataacgaaatttttgatccaggtcaccacgttcaccacgcccacggcagcaccgctgaggatgttctgcatggaggggagcagggtgttcttgatccaggcatccagattggcctccaggctgtcgtaagagttctcgatgaagtccagcagctttttgttgttggcaatgagctcctgcttggagatccactccacaaagtcgccgatgttgtcccgtgccgtgtagtacagggcggtcacactgttgatgagctgcggcacgatcatcatgatcagcgcgtagatcagcagcagaccaaacaggatggtcagagcaacggccagcatgttggcaaagcggtgcatcttttccgggaacagcttgtggagaaatgcttcaagccagttgcacaccggcttgagcagataggcaatgacactgccgtagataaagggcatcaggatgccggtcaaggtcgaaacggcattgccgaagccctgaaagcggtagatcaggaaaaagaagaggatgctcaggctgatcgcgccaaagcctgcgaacattccgtagagatagggtttgatatgcggttttttgtccatcatgtcatagaaactccattcctgccgcagacagcaggattccctgcggcaatgtcagcgcttgttgctcctgcgccagatgtgcagtttttcggcttcggcgatcagctcgtcccggaaatcggggtgtgccacgctgatcagtgcttctgccttttcccagctggtcagtcccttcaggttcacacagccgtactcggtgcacaggtagtgcacgtttgcgcgggtgtcggtgacgatgctgccgttttccagggtaggacggatgcggctctcaagcttgccggtctttttattcataaaggtagaggacaggcagatgaagctcttgccgccgttggaaaggtatgcgcccagaacaaagtccagctgaccgcctgcaccggaaatgtgcttgatgcctgcactctccgcgttcacctgaccgaacaggtcaatgtccaccgcgttgttgatggagatgaagttgtcaatggcggagatgctgcggatgtcgttggtgtactccacgggagcggccatgcactccgggttgttgttcaggtaatcgtacatcttctgggtgcctgcaccaaaggcatagacctgacggcccttgtccagattcttgtggcggccggtgatcttgcctgcctttgcaatatccacaaaggcatccacatacatctcggtgtgcacgcccagatccttcaggtcactctgcgcgatcaggttgccgatggcgttgggcataccgccgatgcccagctgcaggcaggcaccgtcggggatctgcgggacgatgaggtttgccaccttcagatcgacctcggtggcggcaccggcagcggccatctggccgatgggcgggttgctgccctccacaacaccggcaacctgggagatgtgcacccagttctcggtgccacccaggcatttgggcatgttccggttgacctcaacgatgatctttttggccttatcgcagacggcacccaggtgggaagcacaggggccaaagttgaaatagccgtgctcgtccatgggggtcacctggaacaccgccacatccacggggtcagagctgtcgcgatagtagcggggcagttcagagtagcggatgggggagtagaaggagaagccctgggcgatggccttgcgctcaatgccgcccatgtgccagctgttccaggtcatgtgggcagcaggatcctcgatctggaagatggcgggcacccacatcaggatgccgccgcggaagttaacatcctccagctcgggcagacgctttgcaatggcagcgtccactgcaacgggggtgttcacggcccagccgtaatccacccagtcgccgcttttgaccaacgcggcagcctggtcagctgtcattttcttctgcgcatacaattccgtaaaatccattataaaccatcctctcttacaataacataaaggaattgtaaattccaacttagttatatcattaacaaacgggagaatcaatactttcctagcaaaaaacagggctggatgcaatataactaaaaatcttagctttttgtagagattctttggtgcacaaaaaataaattttacacaaaaaatacttgataaaattttgacgatgtgctttacttatagcgtagcaggatgcagcgtggcactgcgggtgggattgtttaaaaattaacgatataccgtagcagaagaaaagaacatcttgcacagcaaactggaaagtgctatcatgtcagaaccaatgcgcttttcaaaggcgcacaaggaggacaaaaccgatggcaactgcagtttaccccgggtcgttcgatccggtcacacgaggtcatctcgatatcatcaagcgcgcggcaaagatcaatgatcacctgatcgtggccgtgctcatcaacagtgcaaagcacccattgttcaccgtggaggagcgggtggccctgctgcaggaatgctgcaagggtatccccaatgtcacggtggagagcttcgacggcctgaccgtggagttcgccaagaagcgccacgcttcggtcatggtgcggggcctgcgggcggtaacggattttgaaaacgagatccagctggcgcagaccaatcacgcgctgatgcccggtattgagaccatgttccttgcaaccagcatcaagtggagctatctttcctctaccattgtaaaggaagccgcccgctacggcagtagcatctccaagttcgttaccccgaatgtggaagccgccgtggggcagaagatggccgagctgcgcagcaggggagagaacgtctgacccccattccttatgcaagaaacgcttcggcgttttgataaaacagtctttcttaaatcacaacatacacaatcaggaggctattcacatgaaaaagatcgttatcgcatctgcatgccgtaccgccattggtaagttcggtggcactcttgccaacgtccccgctgctgagctgggctccatcgtcatcaaggaggctctgaaccgcgcaaacgtcaagcctgagcaggtcgatcatgtttacatgggctgtgtgatccaggctggtctgggccagaatgttgcccgtcaggcttccctgaaggctggcctgcccatcgagacccccgctgtcaccgtcaacgtggtctgcggttccggtctgaactgcgtgaacatggctgctcagatgatcgaggcaggcgatgctgatatcgtggtcgcaggcggcatggagaacatggacatggctccctttgcaatgatgaagggccgttacggctaccgcatgggctctcccatgggcaagagcgagctggtcgataccatggtcaacgatgctctgtgggatgccaccggcttcaacaagcacatgggcatgaccgctgagaatgtctgcaccaacgagaccttccagaagaagtacggctacagccccatcacccgcgagatgctggatgagttctcctacaacagccaggtcaaggctgacaaggccatcaaggacggcgctttcaaggacgagatcgttcctgttgtcatcaagggcaagaagggcgacaccgtgttcgataccgatgaaggcccccgtctgaccccggtcgagaagctggcaaccctgaagcccgctttcaccaaggacggcatcgtgaccgcaggcaactcttccgccatcaacgacggcgctgctgctctggtcattatgagcgaggaaaaggccaaggagctgggcgttgagcctctggcaacctgggtcgctggcgctctggccggtgttgagcctgaggtcatgggtctgggccccatcgcagcaaccaagaaggtcatggcaaagactggcctgactgttgctgatatggacctgatcgaggccaacgaggcattcgctgcacagtctgtggctgtcagccaggctctgaacttcgatatgagcaaggtgaacgtcaacggcggcgccatcgctctgggccacccggtcggcgcttccggcgctcgtattctggtcaccctgctgtacgctatgaagcaccgtggtgcccacaagggtctggctaccctgtgcatcggcggcggcatgggctgtgctaccatcgttgagatgtaagctccccctttggaattgaaatgaatgacagcccgcgccccggctcagaccggagactctgccggggcgcgggagctgttttgaaacactgagaatctgaattggaggttttcacaatggcttttgtaaaaaccgaggtgcagggcgctgtcgagatcatcaccatcgaccgtcccaaggcactgaatgccctgaaccccgaggttctggcagacctgaaggcagcttttgaggctgtcgatcaggagaccatccgctgcatcgtcctgaccggcgaaggcgacaagagcttcgttgcaggcgctgatatcggctccatgagcaccatgaccaaggcagagggtgaggccttcggcaagctgggcaatgacgtgttcctgatgatcgagagcttccccatccccgtcattgcagccgtcaacggctttgcactgggcggcggcaatgagctggccatgagctgcgacatccgcatttgctctgacaacgctgtgtttggtcagcccgaagttggtctgggcatcaccccgggcttcggcggcacccagcgtctggcacgtctggtcggcatgggcatggcaaagcagctggtctactctgccctgaacatcaaggcagacgaggcataccgcattggtctggtcaacgctgtgtatccgcaggctgaactgatggagaacgtgctgaagctggccggcaagatcgccaagaacgctcccattgcagtgcgcaactgcaagaaggccatcaacggtggcatcagcctgcccattgagaaagctgtggaagttgaggagaagctgttcggtgcttgcttcgagacccacgatcagcaggagggcatggcctgcttcctgagccgtgagaaaccgaagcccaaggcagtgttcaccaacaactaatccgttacataatttttgatattaaaggagagatttcctatgaagatcggtgttatcggcgctggcactatgggccagggcatcgcaaaggcatttgcacaggttgagggcaacaccgttgctctgtgcgacatcaagcaggagtgggctgagaacggcctggcaaagatcaagaagggctacgagaagctggttgctaagggcaagatcccccaggaaaaggctgacgtgatcgttgcagccatcaccccgggtctgaaggaagatctgtgcgcagactgcgacctgatcgttgaggctgcttttgaggatatgaaggtcaagcagaccactttcggcgagctggataagatctgcaagcccgagtgcatcttcgcttccaacacttcctccctgtccatcaccgagatcggcaagggcctgagccgtcctctggtcggtatgcacttcttcaaccccgctgaccgcatgaagctgatcgaggtcatcgctggctgcaacacccccgccgagactgttgagaagatcaaggagatctccgtggccatcggcaagaatcctgttcaggtcaacgaggctgcaggctttgtggtcaaccgcatcctgatccccatgatcaacgaggctgccttcatcaagatggagggcgtttctgatatcgcaggcatcgacactgctatgaagctgggtgccaaccaccccatgggacccctggagctgggcgacttcatcggcctggatatctgcctggccatcatggatgtcctgtaccatgagaccggcgacagcaagtatcgcgcctgcccgctgatccgcaagatggtccgcggcggcaacctgggctgcaagaccggcaagggcttctacgtttacaacgcagaccgcaccaagactcctgttgaccagctgtaatttctgataaacatttctcctggccgtggggaaagcggtcaggaggaatttgtttgcaaccgggtaggggagaaccccgaccccgggagataaaaaacacccgttaggaggatatagcgatggattttactctgtccaagcagcagcagatggtgcagaagatgtaccgcgagtttgctgaaaacgaagtcaagcccctggctaagaaggttgatgcagaagagtacttccccaaagagaccgtcgagaagatgggcaagctgggcatgatgggcatttacttccccacctctgtcggcggtgcaggcggcgatgtgctgtcctacgtcatggcagtggaggagctgagcaaggtctgtggcaccaccggtgtcatcgtctccgctcacaccagcctgtgcgctgctcctatttatgagaacggcacccccgagcagaaggcaaagtatctgcccaagctgtgcagcggcgagtggctgggcgctttcggcctgaccgagccgggcgctggtaccgatgcacagggtcagcagaccattgccaaggaagaggatgactgctgggtcctgaatggctccaagatcttcatcaccaacgccggtttcgctgatgtctttatcgtcatcgctgtcaccgaccgcgttctggataagaagggccgtcccaccaagctgtgctctgccttcatcgttgagcgcaccgatccgggcttctccgtcggcaaggctgaggataagatgggcatccgtggttcttccacctgcgagctgatcttcgaggattgccgtatcccgaaggatcgtatgctgggcgtgcgcggcaagggcttccagctggccatggctaccctggatggcggccgtatcggcatcgcttctcaggctctgggcattgctgagggcgctctggaggagaccgttgcctacgtcaaggagcgcaagcagtttggccgcagcatctccgcattccagaacacccagttcgagctggctgagatgaaggcccgcgttgaggctgccaagtatctggtctacgctgccgctctgaagaagcagcaggccatggacggcgcaaaggtccgttacagtgtcgaggctgctcaggctaaactgatcgcagcccgcaccgcaagcgatgtgacccgccgctgcctgcagctgttcggcggttacggctacacccgtgactaccccatcgagcgcatgatgcgtgatgccaagatcactgagatctatgagggcaccagcgaagtgcagatgatggtcatttccggcgctctgctgaagtaa

SEQ ID NO: 477 - DNA, 10804 bp, unidentified
  source 1..10804: mol_type = unassigned DNA
atggaaaaattcagcgtcaaaaaaccgttcaccgttctggttgcagtcatcatggtcatcatgctgggccttgtgtccgtgcagaatatgcagaccaacctgctgccaaacgtgaacacaccgtacctgatggtggtcacggtctatcccggtgccagcccggagcgtgtggagagcgaggtctccgacgtgatggagagcgcgctgggcaccatctcgggcgtgaaaaacgtcaccgccacctcggcagaaaactacagtctgctgctgatggagtttgaggatgatacggacatgaacagtgccgtagtcaaggtgtccaacaaggtggatcagaccaccgccagcctgccaagcacctgtatgaccccctccatcattgaatataccctgaacatgaatgcttttatgaccgtggccgtcagccgcgagggcagcgattcctatgagctggccgatttcgtcaacgacaccatggtcccctatattgagcgtcagggcggcgtttccaatatttccgccaacggcctggtcacccggatggtgcaggtgcagctcgatcaggaaaagatcgatgccatcaacgaaaagctgctggaggtcattgacgtgcagctggccgatgcaaaggcccagctggatgatgccgaggcccagatcgaggcaggcagaaaggagtacgagacccagctggccaattacgacaagctggtcagcgataccatcaacagccagtactccggcgagctgcaggattccttcatgctggtcaagaagcaggcacaggcccttctggagagcgtcaaccagctcattgccgtggtcaacgagcctgagatccagcaggccctgatcgatgtgcgggacggcctgcagcgagtcgtggacaagttcaacgagaccggaatgcaggatatcgattctctgatcgagatcgtggcggagctgcgcgatatcaccgataagctgaccaccgctctgcaggatctgcagcagcgcctgaacgcgcagggcgacaccgccggcacaacggccggggagctggtcgatgacctgcaggtgcagcagagcctgagcaacatttataacacgctggagagcaccatcaaggccatggacaacgtgcccggcctgatggatcagttcacccagatcgtgggcagctattcccagcagcagctgcaggcctatatcaagttcaccgaggcccgcgagatgctgaacgattacgagaagcagctggaagatgccaagcagcagtacgaggatgccaagcagatggccatggagaactccgacgtggccaagatgctggatatcgacacgctggcacagctgatctatgcccagaacttctccatgcctgccggttatgtcaaggattccagcaacaagtcctggctgctgaaggtcggcgaggagtacgacagcatcgaggatatctccggtgccctgctgctccatgtggacggctttggcgatgtccgcctgtctgacgtggccgatgtgcagatcatcgacaacgcggaggacagctttacccgcctgaacggcgagcgctctgtggtgctgaagatcttcaagagcaattcttccagcgccggtgaagtttccggcaactgcaaggctgccttcaaggagctggaacagaaatacgatggcctgcatgtggtcgtgctgtccaaccagggcaactacatcagcatcatcgtcagcagcatcctgagcagtatgctcatcggtgcggcccttgccatcatcgtgctggccatcttcctcaaggatatcaagcccacgctggtggtcggcatcagtatcccgctgtcggtgctgtttgccgtggtgctcatgtacttcaccggtctggatatgaacattatgacgctggcgggcctgtccctcggcattggtatgctggtggataactccatcgtcgtcatcgagaacatctaccgtctgcgcagccgcggcgtgcccgctgcccgcgcggcggtccagggcaccaagcaggtgggcatggccatcatggcttccaccctcacctctgtctgcgtgttcctgcccgtcatcttcacatcgggtgtcatcaagagcctgctgcagcccatgtccatgtgcatcggctactgtctggctgcttccctcatcgtggccctgacggttgccccggcggcctcctctaccctgctgaaaaactccaagcccaaagagctcaagtggttcgacaaggtgcaggaaaagtacgtcaagagcctggaatggtgcttccagcaccgctgggcaccgctgggcgcggcagtggtactgctggtgttctgcggctggcgcgtgatgtccatgggcgttgagatgctgcccaccatcaccagcaacgaggccatcgtcaccctctccaccgagaaggatctgaccaaggaagaatcctatgctgtggccgagaatgtcattgatgccctgctggctgtggacaacgtggaagaggtgggcgttaccaccgacagccgcgtggccggaatggatgtcggccagctgggtctgccccagaccatcaccgacctgctgaaagccgccaacagctacggcacctaccagatcaacgtgatgctggacgagagcctctcctcccggcagatcgaacaggcccgcgaggcgctggaggaagctgtgaacggcgtggagaactgcaccgccacagttgagatcagcggaatgcaggagctgaccagccagctggatatgggcctgaccgtccagatctccggcaacgacatcgacaccatgactgccctctccgagaaggtggtggatatggtcaacgagatggacggctttaccaatgccaccaacggtctgggcagcggcgatgccaccatcaacctgcagatcgaccgagataaggttcgttcctacggcctgaccgtggcgcaggtctaccagcagatcgccgccaagctgaccaccaccaccacggcccagacccccgttgccatcgatggctccaccatgaatgtccagatcagcaacaatctggaccccatgaccaaggaaaacatgatggatatgacctttacgacctccgtcatggccgccgacggcaccaccgagaccggcacctgcacgttgggcgatatggccacctgggtcaccggctccaccccggactccatcaccagcaagaaccagacccgctatatcagcgtgacggcggacgcggtggagggaaccaataccaccaccgagacccgcgcgctggaaaagaagctgaacgagtttgccgcatccgatgaaatgcccgagggctgcagcttctatatgggtggcggctctgagatcaacggcatggtggtggatcagatgggccagtggatgttcctggcgctgcccttcgtctaccttgttatggtggcccagttccagagcctgctctcccccttcattgttctgttcaccattccgctggcctttaccggcggcctgctgggcctgctgctcaccggccagcagctgaccatgatctccctgatgggcttcattgtcctgatgggcacggtcgtcaacaacggcatcgtgttcgtggattacgccaaccagctgcgcatcggcggcatggagcgccgtgcggccctgatcgccaccggcaaaacacgaatgcgccccatcctgatgaccaccctgaccaccgttctggccatgctccagctggtgttcagcggcgatatggccagccagctgatgagcggcatggccatcgtcatcatcttcggcctgacttacgccaccctgatgaccctgtacgttgtgcccctgatgtacgacatcctcttcaagaagccgccgctgaacgtggatatcggcgatgagaaccttgacgacatccccgatgatgccgccgagtatatcgcccagaacaccgctcagccggagtaagaaaacttccccaaagcacccttcacagccatgtgaggggtgcttttttgatacttgcagtatagataaaatgatgataaaatataaacgtagaaaagtactctttttctgaaacgaaaggatggcggaaatgcggttcgtacagttggatgagaagaatgaagaacgcatgaatgctatccgtaaattcaccctgatggatgacacctttatgacacaggtgttttcaggagataaagagagcacacaggagctgcttcgcatcatcctgaaacgaaaggacctgaccgtcgcaaggtctgcaacacagcttacgatcggcaatctgtttggccgttctgtacggctggacatttatgcaacagatgatgcaggcaggcagtatgatatcgaggtacagcaggaagataagggagccgctccggaacgggcgcggctgaacagtgcgatgtttgattcccgcctgacaacttctggtgaaaaatattctgacctgcctgagacatatatcatatttattacggcaaatgatgttttgggagatggtcttccggtttacaatattgaacggacgattcaggaaaccgggaagctgtttcacgaccgtgcacatattgtatatgtgaacggcgcatatcgaggaacggatgaggtcggcgcgctgatgcaggatttccgctgtgatgactatcgggatatccggaaccccaaaataagggcaagagtaaaatactttaaagaagaaacggaaggagtggcagctatgtgcaagacaatgcaggtgatcgttgatcgggaacgagaagatgccgaggtggcaaagggaaagcgcattgcgctcaatctctggaagaacggagagcatgatctggataagatcgcccagaccacagaactttcgttagaacaggtgcgggaggcaattaccgaaccgtattctgcataagaaaccttctccaaagcacccttcacagccatgtgaggggtgctttttgtcaacttgctaaaaaaatcgccgcagctttggcacagtctccaaaaattgaggaattcaataaaaaatattgacaggggggggggtagatgtaaaatgagttcacaatacagaaggtgtaggggtatgctttctgtgtggtaaaatatcattttacattggaggttctacaaatgaaaatgctcaagaaaatggccgcccttctgctggccggcgttatggcaatggcactgctcaccgcttgcggcgatgacagcacgccttcttttggtaagcaggttgaggatgcaacttttgcttctgtaaaggcatctactggtattcaggtaaatgatgcagatctgaagaaactcgctgagagcaagattgatctgattgacaccgagaagggcacttttgattttaagaaatcctactccgctgaggaagcccaaaagttccaggaagatgtgtattcgactggtaagggttctatgacgatggcattacctctgatgaaggatggcaaaatgcagaacaatggtacctatgaagtaatggaaattactgcggataacattggaagtctgaatcagggtacggatgctatgcacgatttgctggataagatggcaagtgtaaatggtatgtctatcaaaattacgaaaattggtgttgcagctaagactgtaaatggaaagacttacgctgcaattgcaatgacctatgaggttacagttgatacatctgcaatgcccaagcagtaatatctaatctgacaatacaagccccggagcgcctacccctggccctccggggcttttttgggcttatggggcagaacttacaaaaaaattctcaaaatattggatagaatcccttaaaaaatgccaacacagaaggagaaaactgtgatataatcaaaacaataaaggataaaatagagagtgtgctgtcctgaaaaaatacaaaaggaggcgagccctatggcacagtttctctccaagccctttggcatgaccccaaacggcgaaaagatcaatgaatacatcatctcgaaccccggcgggctggcggtcagtgtgctgaactacggctgtatcatcaagaatatctgggtgcccaccaagcgcgggccggtggatgtggtgctgggccacgacacctacgccgattacgtcaaggactttgaatcgtccggcagtacctgctgcggcgcgttcgtgggccggtacgccaaccgcattgagaatgccgtgttcaatgtgggcggcaagacctaccagctggaagccaacaacggcaaaaaccacctgcacggtaccttcccgcgcaagctgtatgaggtaaagacctttggcgataccctgcttctggaggcggaaagccccgatggagaggatggtttcccgggaaatctgaagatctcggtgcggtatatcctgaccgaggacaacgccctgcggatggattaccgtgtctcctctgatgccgacaccatcatcaacctgaccaaccacacctacttcaatctggatggcggcggcgatgtgctgggccagaagctgcgcatctatgcgtcccgctatctggagggcaacaacgagacctgccccaccggcaatatcctgcccgtggcgggcacgccgatggatttccgggcgggcaagcccattggccgggacatcgacaccggcttttcccagaccaccatggtgggcggcggctatgaccactgctttgtcatcgacaggggccgcggtgccagccagagcctgtgcgcctgggcttccagcgataagaccggcatcagcatgaaggtctataccacccagcccggcgtgcagctctacaccggcaatttcctgcaggactgccctgcccccggcaagggcggcgtgccgatgcagaaatacggcggctttgcgctggagacccagcacttcccctgcagcccctcccacccggagttcccctccaccgccctgcgggccgggaaagtgttccgcgccaacaccaccctgcggttcttcaccggcaaacagtgcgggaaactgtaaaatgcagccctctcaggcaaagcctgacggctttgcctgagagggctttttctctgatttgcacaaagcgttccatcactccatgtgcaaaacacaaaaaacgcttgtaaatcaatgcgcggaaaaataaatggaaacaaaaatccatccttataaaattcccgttacttgattctgcggccaaaacgttgtatccttgtggcagaaggcgggcctgccccgcgcaagcaactttggtgacgagaagagaggtacttttatggcaattttggtttccggcggtgccggttatatcggcagccacacctgtatcgaactgctgaacgctggctttgacatcgtggtggcagataactattacaacgcttcccccgtggtgctggatcgggtcaagcagatcaccggcaaggacttccggttctatcaggctgatatgacaaagcacgaggacgtggagaagatcttcaccgagtgccctgatatcgatgccgtcatccagtttgccgcctacaaggctgtgggcgagagcgtttccaagcccatcgagtactactataacaacctcaactgcacgctggtcattctggacgtgatgcgccgccacaactgccgcaacttcgtgttcagctcttccgccactgtttacggcgaccccgccagcgtgcccatcaccgaggacttccccgtgggtgccaccaccaacccctacggcaccaccaaggcctttaccgagcgcatcctgaccgatgtctgcaaggctgaccccactctgaatgtggccctgctccgttacttcaaccccatcggtgcccacaagtccggcctgatcggcgaggaccccaacggcatccccaacaacctgatgccctacatcgccaaggtggccgtgggcaagctggaaaaggtgcacgtctttggcaacgactaccccacccccgatggcaccggcgtgcgcgattacatccatgtggttgacctggcccggggccatgtctgcgccatcaagaagctgcagaccaactgcggcctgttcatctgcaatctgggcaccggccacggctacagcgtgctggatgtcatccatgcctttgagaaggcctgcggcaagaagctcccctatgtgatcgatccccgccgtcccggcgatatcgccgagtgctatgccgaccccaccaaggccaagaacgagctgggctgggtggctgagtacggcatcgaggagatgtgtgccgacagctggaactggcagaagaacaaccccgatggctaccacaccgtgaagtaaacagaactgttctcaaaacgcacctttgaacgtgaaaattcaggggtgcgttttcttttgcccggaaacctgccggaacaggagaaagatctctacaaaaaacagcggggacaggcgggaatttttgccgctccctgccttgacaatgcctttgagttagcttatattaagactgttcatatacactaacattttgtcgaaggaaaggcatctgccatgacattaaaggaactgaagatcggcgaaagtgccgtgatcgatacagtgggcggaacgggagaactccgccagcattttctggatatggggctgattcccggcgagaaggtcacgctggtgaaattcgcgcccatgggggaccccatggagctgcagatccacggctatgagctgaccctgcggctggacgatgcggcacggatcgagatcaccccggcggaagcacccgcagcagccccggcacggaaggccggccggatggtggagcacccgggcctgggcgagggcggccgctaccacaccaaaaagggcgaacacccgctgccggatggaacggtgctgacatttgcgctggccggaaatcagaactgcggcaaaacgaccctgttcaaccagctcaccggctccaaccagcatgtgggcaactttccgggcgtgacggtggaccgcaagagcggtgccatccgggaacaccccgataccgaagtcaccgacctgcccggcatctactccatgtcgccctattccagcgaggagatcgtgacccgccagttcatcatcggcgaaaagcccacgggcatcatcaacatcgtggatgccaccaacatcgagcgcaacctgtacttaacgatgcagctgatggagctggacacccccatggtgctggcactgaatatgatggatgaggtgcgcggcaacggcggcaccatcaacatcaacgagatggaagcgatgctgggcatcccggtggtccccatttccgccgccaagaacgagggcgtggatgagctggtggatcacgccatccatgtggcaaagtatcaggagcgtccgggccggatggacttctgcggcgaggatgaccacggcggtgcggtgcaccgctgcatccacggcatcatccatctcatcgaggatcacgcccgggcggcggggatcccggtgcgctttgccgccacaaagctggtggagggcgacccccgcattgaggaggccctgaagctggatcagaacgaaaaagagatgatcgagcatatcatcctgcagatggagcaggagcgcggtctggaccgcgccgccgccattgcagatatgcggttccactttatccatcagctggtgaatcagaccgtggtaaagccccaccagagcaaggagcagctgcgcagcgcaaggatcgaccgcttcctcactggaaaatatacggcgatcccggcgtttgtgggcattatggcgctggtgttttatctgaccttcggcgtgatcggcgcggggctgcaaagcctgctggaattgggcattgagaacctgacgatccttgtggacaatgccctgacggcatggaacgtcaacgatgcagtgcattcgctggtgatcgacggcatctttaccggtgtgggcagtgtgctgagcttcctgcccatcatcgtgaccctgttcttcttcctttccctgctggaggataccggctatatggcccgcgtggcctttgtgatggacaagctgctgcggcgcatcggtctttcgggccgcagcatcgtgcccatgctcatcggctttggctgcacggtccccggtgtgatggcaagccgcacgctgccctcggagcgggaccggaaaatgaccatcctgctcacgccctttatgagctgctcggccaagctcccgatctacagcctgtttgcggtgaccttcttcccggagtacgccgcactggtcatggtgggcctgtatttcctgggcatccttgtgggcattggtatggcctttctgctcaagggaacgctgttcaaaggcgaggccgtgccctttgtcatggagctgcccaactaccgcctgcccggcctgaaaaatgtggcccagctgctctgggaaaaggcccgggattttctcgagcgtgcctttacggtcatcttcctggcaaccatcatcatctggttcctgcagaactttgacttccagctcagtctgaccgcagacccgcaggagagcatcctggcctggatcgccagcggcatcgcgccgttgttcgcaccgctgggctttggcgactggcgggtgtccacggcgctgatcaccggctttatggcaaaggagagcgttgtctccacccttaccatcctgtatggctcctctgccgcactgggcgcggcgctcagcccggcggctgcggctcccctgttggtgttctgcctgctctacaccccctgcatcgccgctgtggcatcggtcaagcgggaaatgggcggccgctgggccaccgttatggtcgtaaaccagtgcgttgtggcatggcttgccgcgctcgttgtgcgtttcctcgccgtggcggtgctgtga

SEQ ID NO: 478 - DNA, 7396 bp, unidentified
  source 1..7396: mol_type = unassigned DNA
atggcagcaagaatttcaaaggcggatttcgatgaaaaagtattaaaaagcaagcttccggtaattgttgatttttactcggattcatgtgtggcctgcaagaagctggcaccggttctcggagatatcgaggatgattatgaggataagcttcacgtatacaaggtcaacacaaactttgacggagagctcgctgatgagtatgaggtgactgcgaatccgacactgcttttcgtaaaagacgcagaggtcttagacagaaaggtcggcgcacaaaagcctgccgatttgaaggcgtgggttgaagcattattatagtttttagattattatataaagcagtctgatacaggataataacacttacagataccacaatctgtgacacaggaggaaataaaatgactatcacagtagcaggagaaaagaaagaatataaggatggacttacattaccggagcttattgagcttgagaatgtagatatgcctgagtatgtaacagtttcaataaatgaggaatttgttgccacagaggataagccaaagacagtgcttaaggatggcgacaatgtagagttcctttacttcatgggaggtggatgctaatggcaatgactgatgagcagatcgaacgctattcacgccacattatccttaatgaggtgggcgttaaaggtcagaagaaattattaaagggcaaggtgcttattatcggtgccggcggacttggagctccggcagcaatgtatcttgcagcagcaggagttggcacaatcggtattgtggatgcggatgaggtagatttatccaacctgcagagacagattatccacggaacagccgatgtgggcaaagccaaggtaaagtcagcaaaagagacaatgaacgccatgaacccggacgttcaggtcaatacataccgtatgtttgtagatgcgtcaaacatcagagagcttatcagggattatgatttcatcatcgatggaactgacaatttcccggcaaagttcttaatcaacgatgcatgtgtgcttgagaaaaagccgttttcacatgcaggaatcatccgtttcaagggtcagctcatgacatatgtgccgggagagggaccttgctacagatgtgtattcaagaatccgccaccaaaggatgcagtgcctacatgtaagcaggcaggcgttatcggagctatgggcggagtaatcggttcgcttcaggctatggaggctatcaagtatttaatcggtgttggagagttgctcacaggatatctgcttacatatgatgcactcaccatggagttccacaagattaagcttccaaaggatacacacaactgtgcagtctgtggcgaccatccgaccattctcgagccaatcgactacgagcaggaggtctgcgaggagacagcgggcagatttgatgcacctcgtacacaggaataaaaagacagtaaggaaaggaacgatatgagtatcataagaatgaaatatccgtttctggatgaaatagcaaaatatgctaaagagcatctgccggaggaggcgtgcggtctgatagcaggcagtgaggacgaaaacggtcgtctcatcacaaaggtatattacctgacgaatacagaccatgccgaggaccatttcacaatggatccaaaggagcagctggcagccataaaggacatgagagcaaacggccttaagccgcttggcaactggcattcacacccgtctagcccttcaaggccatcggatgaggatataaagcttgcatacgatccgaatgcaagctacatgataatgtcgcttatggcagaaaatcctgtaatcaactcgtttcatatcaagggtggacaggtcacgaaagaggatttacgaatatattctgatgaatattacttctaaatcatatgttaatgttttgagtcgcagcgaaagctgcaaagaaaagtcagcttcatcgaagatggcttttcttttttagagaaagatgttattatagcatgtatatttaataaaacgaaagagcgtgcgaaaatgaaattaaaaacgaaggaacttacaacatgtgcactttttgcagcgcttattgtagttggagcatttatcaagattgatatcccgcttcctatgtacaccatgcattttacattacagtggttttttgtgctgatggcgggatttctgcttggggcaaagctggcatcgcttagcgtgatagtatatttgtgcatcggactggtgggagtgcctgtatttgcggcaggcggcggtcctacatacattttaagaccgggctttggattcctcttaggctttgtgcttgcagcatttttaatcggagcaatcacagaaaagcttaaaaagaccaatgcgtttacactcattcttccggcaacggtcggactggtggcatattatacagttggagcaatatacttttactgcatgaaaaatttctatgcggcaacacctgtcagctggggcatagtaatagtggattactgtctgataactgttgcaccggactttatattatgcgtatcggcagcagtgttttctgctaagcttcgtcctgtttttgcaggaatattaaacggttacagtgtgaagaataaggcggaaaataaagcataaagcgtataataaagtataaaataaggcatgaaataaagtatggatatggtattacagggagataaaaatggcgtattttccgatgtttgtggatatgacggaaagagagtgtctgatcgtcggcggtggaaatgtggcataccgcaaggtgatcgtaatgctggattttggtgcgaaggtcacggttgtggcagaggatatatgtgatgagctgagaaagcttacaattgatgatatagcaagcgatgataaaacgggctcatatacggcaaataaagaaaacaatcagacagactcggatgcagcagatagaattatgttcataaaaagaaagtttgaacgaaaagactgtgacggcatggaaatggttatcgctgccactgatgacaatgctttaaatcatgagattgcagagtattgcagagctaatggcatcatggtaaatgcggtcgatcagaaggctgattgcagctttatttttccgtcatacataaaggaaaagaatcttgttgcggcattttcgagcggaggaaacagccctgtgctgactcagtatctgaaaggcaaagagcaggagattcttactccgtttcttggtgagctgaacgaatacatgggacagatccgcgaaaaagtaatagcgcaatatgacacggaagccgagagaaagcgtgtatttaaagaaatattgtgtgcagctattgataatggaaaaattccggaaatatagtttaaagtatggtattacagattttaagttgttgttcatttataaattataaatggaaaatggcatgatccgtaggagagtaaaatgaggtatttaataggaacgagaggctcaaagcttgctcttgttcagactgattacgtgatagataagttaaaaagggcatatccggatgatgattttaaggctgttatcataaagacaacaggcgatttagagcagaaaaaggcactcgataagattggctcaaagggtatctttgtaaaggagatagaggaagagcttttatcgggaaagattcatatggcagtccattctatgaaggatatgcctgatgaaccggcagtagggcttacatttgcaaaggcatggaagcgtgaagatccaagggatgttttggtgctaaaaaatgccgcttcactggatgagcttccttatggtgccgtgataggaaccggaagcaagcgcagaaagtatcagcttttaaagctgcgtcctgaccttaaggtggttggcatacgcggaaatatcgatacgaggcttcgtaagctatatgatggtgaaattatatatgaagaggtttccgataatactgtaaataacaatgagatagctaacgaaaaacagaataagtataacgaatatagactggatggaatcgtacttgcagcggcgggaataaagcgtatcggaagagattctgagatcacacagtacttttcagaggatgatatgattccggctccggcacagggcacacttgcgcttgagctacgtgctgacaatgctaagctgatggcaaagcttgatgctttgtcagatgagaaaaccaatctgtgcgcaggcattgagagagaatttttaaagcgaatcggtggaaactgtcatctgcctgtggctgcatactgtgatattgtaagtgaaaaagaccgcggtaatgatagcaacaaaaataacaggctaaagcttcttgcgatgtttggctcagaggatggaaaacagcttgcaaggacagagcaggtatgggatatgacatcagacagaaacgatattgtggagcgtgcggtgcacgatattcggtataaattagaaattgactaaagtttattgataccttttgaccctttaatcataataattcagtagaaaaataattaggaaaatcatgagagaaaacacaggaaaagtagtattagttggagcaggaccgggagatacgggcctgctcactttaaaaggagaaaaatatataaaacaggcggattgtctggtgtatgacaggctgtcatcaccagagtttctttcaatggcaaaggcaggctgtgagcttatttatgtgggcaaggaaaatcacaagcatgtcatgaagcagaatgccataaacgagcttttgtacgagaaatcaaaatatcatgagcttgtagtccgtttaaagggcggagatccgtatgtctttggaagaggcggagaggaagctctctacctggtagatagaaatgtggaggtagaagtggtaccgggtgtcagttcatcggttgcagcgcttgcggctgcaggaatacctatcacacacagaggtatagcaaaaggctttcaggtcatcactgcgcacagcagaaaggatgaggaggcagatatagactattcccttcttacagatgagacaatcacctgcgtatttttgatgggtcttgcgcatgtaaaaagcattgcagcagggcttatgaaagcaggacgaagagcggatactccggcagcagtgatatcgaacggcacacttgccgcacagcgcaaatgtataggaacgcttgcggatatcggagaaaagattgaggaagcaaagctgacatcaccggctataatcgttgtgggagatgtggtttcactgaatgacaggcttgatttctttgaaaaaagaccgctgtttggaagaaaaatcacagtaccgtatatcaaaacaaacgaattgatagcaaaattacagcagcttggagcagatgtcacaccggttaagacaggcataataaagccgataataattcctgaatttgccgataaagtaagatcggcagactggatagtttttacaagcaaaaatggtgtaagatcatttctctataatctggatctggcaggggcagacatcagacttatagcaaatgcaaggtttgcagtagttggaaaagctacagaaaaagagcttgcaaagcatcacataaaggcagatattattccggcagaacagaccggaaaaggacttgcaggagaattgagttcgtatatgggcgataatgatgaaatcaaagtctgcattttctcggcaaaggaggcttcacctgacattgaggcagggcttaaagaaatatgtgaattagaaaaaattgatgcatatgtaaatgagcaggcatatgagagtattcctgaaagcattggaaaaatggtaagtgaagcggtttttacaagcgcatcaaatgtggaaagattttttcatatgctgccggagaatgcatacgtggaaacagcatactcgataggtgaaaaaacaacagcagcattagagcagcacaatgtcagagagatactgcaagctgatgacagcagctatgaagcactggtagatacaatatgttataaagcttaagaatttatgatgacaaaagttatataatctgaatttgtcaaaacgcgccaaatgtaatatactatatccaaccgaaacattaacataataaaggagaagcacaatgaaagaatacagtataggtacaaagtgtgtacaggcaggctataaagccggaaacggagagccgagacagattccgattattcagtcaactacattcaaatatgacacaagcgaggacatgggaaagctttttgaccttgaggcagagggctatttctacagcagactgcagaatccgacctgtgacacggtagcaagaaaaatcgcagctatggagggtggcactgctgccatgctcacatcatcaggacaggcagccaatttctatgccatgttcaacatatgtgagtgcggagaccatatcgtggcatcatcatccatctatggaggcaccttcaacctcatcgcggtaactatggcaaagatgggtattacagctacattcgtatctcctgatgctacagaggaggagctgaatgcagcattcagaccgaacacaaagcttatgtttggtgagactattgccaatcctgcgcttacggtgcttgatatagagctttttgcaaaggtggcacacgagcacggagtaccgcttatagtggacaataccttcccgacacctgtaaactgcagaccaattgagtggggcgcagatattgtcacacactctaccacaaagtacatggacggacacggagccacactcggcggagcaatcgtagacagcggcaaattcgactggatggcacatgcagataaatatccgggactgtgcacacctgatgacagctatcatggcatcacatatgcagagaaattcggcaaggaaggtgcgttcatcactaaatgtacagcacagcttatgcgcgattttggttctatgcagtcaccacagaatgcatttatgctgaatcttggccttgagtcacttcatgtgcgtatgccaaagcatgtggaaaatggacaggcagtggctgaatttttggaaaatcatccaaaggttgcctatgtaaactactcagggcttccttcaaacaaatactatgagagagcacagaagtatcttccaaacggaggctgcggagtcgtatcatttggcttaaagggcggcagagaggcagcgtctgcatttatgaaggcattaaagcttggtgcaatcgagacacatgtggcagatgcgagaacctgctgcttaaatccggcaacaagcacgcatcgtcagatgaatgatgagcagcttaaggaagcaggagtgccggcagagcttatcagaataagcttaggtcttgaggacaaggtagatttgattgcagatatctcaaacgcactcgatgccataaaataa

SEQ ID NO: 479 - DNA, 5387 bp, unidentified
  source 1..5387: mol_type = unassigned DNA
ttagttcacaccaagatacttggcaacgaccatacgctggacttcggaagtgccctcgtagatctcggtgatcttggcatcgcgcatcatgcgctcaacgggatactcacgggtgtagccatagccgccgaagagctgaacagcgcggcgggtgacgtcggaagcggtctcggccgcgaagagcttggccatggcagcgtccatggagtaatcctcgtgattctgcttcttcatagcggcagcgtaaacgaggtactgggcagcctgagtgcgggtgtgcatgtcggccagctggaactgggtgttctggaactggctcaggcggcgaccaaactggatacgctccttggtgtacttgacagcctcgttgatggcgccttcggcaagaccgagagcctgggaggcgataccgatacggccgccgtcgagggtcttcatggcgatcttgaagccttcgccttccttaccgagcaggttctccttggggacgacgcagtcttcgaagacgaggtcgcaggtagagctgccgcggatacccatcttcttctcgtgcttaccggtggagaagccggggaagtccttctcaacgatgaaggcggtgataccgtggttacccttgctcttgtcggtcatggcgaacacgacgaaagtggaggcaacgttaccgttggtgatgaagcacttgctgccgttgaggacgtagtcgccgttctcgttcttgacagcggtggtctgctggccggaggcgtcggtaccggcgccgggctcggtcagaccgaacgcgccgatcttgcggccggacagaaggtcaggcagatacttcatcttctgctcctcggtgccgttctcgaaaatgggagcgcagcagagggaggtgtgggcggaaacgataacagcggtggtgccgcaaaccttagcgagctcctccacgcacatggcataactgagaacatcgccgccggcgccgccgtactgcttcgggaagtaaatacccatcatgccgagcttggccatcttttcgacggtctccatggggaagcgctcttcctcatcgagttcctcagctaaaggcttgacttcattttctgcaaattcgcgatacattttgcggaccagcagatgttctttggacagatggaaatccatagtcttttgctccttcactataaaaataattggattgtctaatttttcacaaatcagttccgtgacttacattatatcctgtgcgttttattttcgcaagaggaactatcattcctttttggaattcgtgctttttgccgaattcattaaagtctttttgacatttccgttccttttatgacagttttctgtcattttcaggaatcctttccattccaaaagagaaaaagggaggcagtttttgtaaactgcctctcctttttatccttttagggacggattacttcttgctgtaatcgtagaagcccttgccggacttcttgccgagctggccgccgcggaccatcttcttgagcagcagagcgggacgatacttcggatcgccggtctcgctgtagaggacgttcataatggcgaggcacacatcaaggccgatgaagtcgcccagggcgagggggcccatggggtggttcgcgccgagcatcatggccttgtcgatatcctcgacagaggcaacgccggtctcgaccaggccgatggcctcgttgatcatcgggatcaggatcttgttgacgacgaagcccggagcctcagcgacctcgacaggctccttgccgatctccttggagaggttgtagatgaagtcgaaggtctcctgcgtggtgttggcgccgcggatgacctcaacgagcttcatgctgggcacggggttgaagaagtgcatgccgatgacggcgtgcttgaggccgagacccatctcggtgacagacagagaagaggtgttggtcgcgaagacggcgctctccttgcacatctcgtcgagctcgccgaggagctgacgcttggtgtccatgttctccgccacacactcgatgacgaggtcggcgtccgccgcggcagacttctcctcgacgaggatgttgttcaggatggcgtccttggcctcttcggtcatcttgcccttctcgacgcgcttctgcagggaagcggcgagcttatccttgtggcgctgagcggaagcgacgctggaagcgtacatcagagcggtgtggcccttggccgcgaagacctgagcgatgccgctgcccatggtgccggcgccgaaaactgcaactttcattgtgtgtatcctcctacaatataaatagataattctatggaatcacttgttgataaagggctcgtgcttgcgcttttcgaggaaggcgcccatgccctcctgctggtcggcgctctggaagcaggagccgaaggccttctcctcgatcacgacggcgcggtcaatgtcgacctgaagaccgtcgttgatggcctgcttggacgcgcgcaccgcgatgggcgcgttgccagcgatctggccggcgagcttttccgccgcggcgtagaggtcagaaagcggatagaccgcgttgacaaggccgatgcggtaggcctcgtccgccttgatgttgcgggcggtgtagatcatctgcttggccatgccggggccgacgaggcgggcaaggcgctgtgtgccgccaaagcccggcgtgatgccaaggcctgtctcgggctggccgaagacggcggtatcggagcagatgcggaaatcgcagctcatcgcgagctcgcagccgccgccgagggcatagccgcccaccgccgcgatcgtcgggatggggaacgcttcgagcttgcgcatgacgtcgttgccctgcttgccgaaggcctcggcctcctccttgctgagctccttcatctgcgcgatgtccgcgccggcgacaaaggacttctcgcccgcgccgcggacgatcaggcagcggatctcgcttaagtccaccgcgtcgagcgcggcatcgagatcggcgagcacctgagaattgagcgcgttgagcgccttttcgcggtcaatgatgagataggcaatgttgcccttgggttcatatttgacaaaagacatcgtgtgtctcctcctgtcttcttcaactcccccctattatatgggcggcaaggcatatttgcaagagaaaaatcacttttttcaaaaaagtttcacacttttccagtgtcattgcaagaaacgttgcattttaaatgatcttttctcccaatgcagcaactcttgtataaaatttttaaaatgacttgtctcttgcaccaattttcgatatgataggctttaattataggaaaacgaggttcattctatgcgaatgcgcaaaaagaaaaacctgcttccccgcatggagcggtgcggggcgtatcagatcaaggacccctacgagcgcaagggccgctggcacgacttgatgcccgaggcgaaggagatccgcgtggagctcggctgcggcaagggccgcttcaccgtcgagacggcggcggcggagcccgacgtgctgctcatcgcggtcgaaaaggtgcccgacgcgatggtcgtcgcgatggagcgcgcggcgaaggcagagctgcacaacgtcttcttcatcgacatcgacgccaaccagctccctgagatttttgatcagggcgaggtcgaccgcatctatgtcaacttctgcgacccgtggccgcccaagcggcaggccaagcgccggctgacgcacggcaatttcttgaaactctaccgcaaggtgctcaaggacaacggccaaattcatttcaagaccgacaacgacccgctgtttgagtggtcgatcgaggagatcccgcagttcggcttcaccctctctgaggtcacacgcgatctgcacgcgaacggacagcgcggcgtgatgaccgactacgaggccaaattctatgccgagggcaagaacatcaaccgctgcgtcgccacgatgcagccgtgggaagagcccgaggaagaggatgcgcccgaagaggcggacgaaacggctgaataaaaggaaggctttcagccttcctttttgctttcttccagatacggcgaatacatcatcaccgcgtcgttcacggcgacaggcgtctccgcgagcagcttgccctgcaaatcaaacgtctgccggtagagctcgttgtggcggatgtagccgccccagtactgcgcgcgcatctcgtggttgcgctcgacgacctcatagcgctcggtcggctcggcgctcacgcgccactcgccctcaaggtctgttttgccgacgcggacgcgcatctgataggtgtcctgtgtgtcgttgcggatcatcaggtcaagataggggtaaaagcaggtcgcaccgctgccgaagggctgcgtgcggttcgcgtcgggaaagacgtcgtagccgtggcggtggcgctcgacgaccgtgagcggcgtgtgcagcgtcatccagtagatgaggtttgagagctggcagagcccgccgcccgtcgcggccagatacccgccgttgcgcaggatcatgccgggcagataccccttccccgccgtcggctttccgatgagataccagtagctcatcgtttcaccggggcgcagcaaaagcccgtcgagccgcgcacaggcgaggcggagattcgtcaccttgttgcgctggagctgcatgtcgacgtccttgagctttcgcatgagcggtgtatggtgggaaaacgcctgatatgctaagtcttccccgctgcgctcgcgcgcaaaatgcttccgcatcgaaagccatctgagttttcgctgcgcgctaaaatacgcgccgccgagcttcagccgcaaattagagcgttttttcggttcgcggacggtcatatgcttccctcccctgtttttctgcttttatagacgcaaaacggcgggaaaaagttccaacattttcttatttcaggctcatcacgtagatttgacacgggttccactcgtcccagagcgtcgggaatacctcaaactcgccaaaaccgagggcgagatagaagcggttcgtcgcgtcgtactcagggtacttccccatctgcacggtcttgacctgcaaaaacgagtagccaagctccttcgcccgctgcttcgctgcggcaaagagcatcttgccgacgccgcggcggtggtattctttcagcacacccatgacatagagttccgccgtatccctccccgtttcggcaaggtaaaggaagccgacggcgttctcgccgtcgaacgcggcgaaaaacggctgcttaacactcttttcgatgtattcctcgcgcgcctctggaatgccaaaccagtcgggcagcgattctaaaataaagcgcgtaatgcgccgcttttcatcgggagtcgtaatttctctgatctccat

SEQ ID NO: 480 - DNA, 6884 bp, unidentified
  source 1..6884: mol_type = unassigned DNA
gtaatatttgattttatatttgtacaagctctaatttgctgtttttttcgctttgattgcatttttattgagttaaagctcttttgtatatcttcatggtatgatgaacgtataggcctttacaatcattcttattgtggcatatatctttttcttgacttatattttcaagcgtattatctattgttactgtgtcgtgaacgagggaatgtctttttatttgagaaaaagatagccgattttgcttttcacatctttcatactcattattcgtcttgtatcgtgatacccattttcttcatgagaaaacatgcattcatattttgtgccacaccttcccgtaatttataagagaagctgagctcattgtcttttatatctgcttcgaaacagtaattgcgtattttttccgggaactgatctgctagtgtgcctagtaaaagatcgtgtgtagctatgataccatttgcctgtagatgcatgaactgacggatcagatcgagtgaacctttttgtttgtccgcagagtttgttccttttaggatctcatctaaaataatgaacaattcttttccttcattcagtaagtcgatgatacgtttcaatcgcttgagctcggcaaagaaatacgattcattatcagtaagggaatcggatgtacgcaagctggtaatgagttgtgcaggatacaaggtcaattgcttacagcaaacaggacagccgatacatgccagcagatagttgacgccaatcgtacgtaggtatgtgctttttcctgccatgttagctcctgttataattaaaaagaacggtctggatgggatgacggcatcatttttcacacattgctccgcagacatcaatggatgtcccatagccgttgccacaaactggaaaggtttgtttgaaatagaaggataagtgtattccggatgattgtatgcaaaagtacccagtgaacaaagagcatccagttcgcctacagtttccagccatttcatcagatggcgtccgtagcgttccttccatcgctcgatacggacaacttgtcttagctgaaagaaaatacttccttccaatatcacataaagtaattgattattgcgaagatccagcctgtccagttctttggagagctgcatcagagcttcagcaggtgaatgtccgtcgatattaagccggtctattaattgttgtagttcggttgctttccatgtttcctgacgggctaatgtaatcagtttggcataactgtttagtgttttcagtttttcgccgtatgcttgctgaactaacgttgctcttttgataatagcgaagctgataatgacaaacagcataaataccagtccgaaccagctcattgagcacattcccgtcaatcctcctgcaagcaatacgatgttaataagaggtacaccccataatgccaattttacccatgtcgcttgcaataaatctgagggactttcactccatcggcgtatttcttcttcgtcggatatctttccatggtttactgttcccattatccgaaactgttcacggaactcatgcctttcgctcatgtcccttacagcctgttggcggcgttctattaatgctttttctgttaagtgctcttgcatccagctggcgattgtttcttttccaatatgcgtacatgtacggttgattgcttgaaacagcgagcggcgtccgaataagtcgagatcgaacgaatacgggtgttctggattggcaaattcttttccttcatcaaaatccgagaagtcaccttccagtcctttcagctcctcctggttgatttgtaattgagtttccaaccactctttccgtgcgaataaccggttatgcagctttatcaagattagaaaaggcagaaacgtgcaacatgctgcgccgatcagaacccaggtcccggcgtgaaagaagataatgatagccgctattcctgccagaaaaaatgcgatacgtagcagactgatatgcagaatatgtttttttactcggattaattcttttgtcgtttcggtaattcgtgaattataccaatctttgggagttgtcataaataaaaaatgatgatttgcggacaaatgtaatgaaagagagactattctacaaccttcagatattaaatactcgaaaaatgcggtctagatgcaatcatacaccgtgaggtgctttagatgttgtaatagcttgcagaaaactaaaatatcgtttacggtgaagggatgagataacagaagcagaaaaccaagaaagacagaaagctagaatatcgcttactatgaagcttgtaagaggtgaaacaactattgtgcagcaaactctggatatttgcttaatttgttgtacaaaactttctgtagtttgtacgaattttaaaaaaacttcatgatgttttcgggaaaacttcagcttgttttctgacaatattgggcaagaatctccaatacctgtttctggcgtggaataaacaaggttgagagaatttatatataaaaaatagcaaggatattgaatgcttacaaaaaagtcgctccagtagacttagtgagaatactgaagcgacctcttggattattcatgtggctatctgccgaaaatcaaatacattgcatagcctgttccagatcggcaatgatatcatctacgttttcgatacccactgacaaacgaatcagatctggagctactccagcttctatcagctgttcgtcggtcagctggcggtgagtatgacttgccggatgaagcacgcaggtacgtgcgtcagcaacgtgtgtcacgatacatgccagtttcagttcatccatgaacttgatagcatcttcacggctacctttcaatccgaatgcaataacaccgcatgaaccgtttggcatatatttctgagccagttcatagtatttgctgctcttcagtccgcagtaatttacccattttacctttggattagcttccagccattcggcaaccttctgtgcattttcacaatgacgaggtacgcgcaaatgcagcgtttccagtcccagattcagcaggaaggcattttctggtgattgtatagaaccgaggtcacgcatcagctgtgctgttgctttagtaatgtaagccattttgccgaaagctttggtataggtcagtccgtgataagattcatccggctgagtcagtccggggaatttatcagcatgtgcttcccagtcgaaattaccgctgtctactacagctccgcctacacacgttgcgtgtccgtccatgtatttggtagtagagtgtgttacgatatcggctccccattcgaacggacggcagttgataggtgtggcaaacgtattgtcaacaatcaaaggaactccgtgcttgtgagcgatacgtgcaaatttttcgatatccagaacattaatgctcggatttgagattgtttcgccaaacaaacatttggtgttcgggcggaaagctttttcgatttcttcttccggtgcatcagcatcaacaaatgtacactctatgccaagttttttcattgtcacggcgaagaggttgaacgtacctccgtagattgttgacgagcagacaaaatggtcgcctgcttcacagatattgaatactgcataaaaattggcagcctgtcctgacgaagtaagcatagcagctacaccaccttccagtgcagcaattttagcagcaacggcatcattagtcggattttgcagacgagtatagaagtatccgctttcttccaggtcaaacagttttgccatctgttcgctggtgtcgtatttaaatgttgtactttgataaataggcagtacgcggggctctccctttttcggagtccatcctgcctgtacacacagggtttcctttttgaatttctgttccatattgtaaagtttaaattttctttttaatttctacgacgggcaaaagtaagaaataatcttcctttattgtgcgttttcaggaaaaaagatttatatttgagattatataaaaacaaatgatatggaagatgatatgaaattcaggcatacattgccggtacagattcgtttcagtgatgtcgatcagtatggtcatatgaataactcttcgtacttctctttatacgatttggcgaaaacctcgtatatgcgtgaggtgttcggagataaagactggaaacacatcggtattgtggttgccaatatcaatgcagactttctggctccggtctttttctcggatgatttggttatccatacttcggtgatacatttgggacacaagagctttacattgcttcagcgtgcggtcaataaagcgagtggtgtcttgaaatgccagtgccgtaccattatggtaggatatgatgtagccagtaaggaaccggtagaattgccggccgattttaaacgtgctatttgcgattatgaaggcaaaacactcgaagagttgtcacaaccgttgaaataatctgtttattattaatcaagaagaatcagataacaagatatgaaagtagcgattatcggagccggcaatatgggcggagctattgcacgcgggctggcacaaggccattatgtgaaagctagtgacattatagtaaccaatcccagcatacccaaactggaaaaactgaaggctgagtttcctgaaatccatacttcttccaataacagggatgccgctgatgcagatgtagtgattgttgctgtcaagccgtggaaagtagaagaggtattaaaacctttgcgccttcgtcagccccagatactggtttcagtagcagccggactgacattcgaggatctggcacattttgttgacccggaaatgcctatattccgtgttattccgaatacagctattgccgaacgtgccagtatgaccttgattgcatgtcgtaatgctacagaggagcagactgaagccatgctgggagtctttaatgaaatgggacttgccatgctgatagaagaaaagcagtttgccgctgctacatcgctcgcttcgtgtggtatagcgtatgtcatgaagtatgtacaagctgccatgcaggctggtgtggaagctggattgcgtccggctgaagccaagaaaatggtggctcagacattggatggtgcagcacgactgcttctgcgcgatgaacatacacatccggcaattgagatagaaaaagtgacaacaccgggtggaataaccatcaagggagtcaattcactggagcacgatggatttacttcggctgttatcaaagcttttaaggcaagcatgtaatatctccattctcaatactcaatattatgaaaaataacattctgataacgatggctatcctgattcttgtcggtcttgctgtacagggaatttttggagtggcagcggggatattggtatcctccatcatcggtatcatttatggtactgtaaaaaagaacaggcagtttgtaaagtggtcggtgacagctctcgtcatcgacctgatttgcatcgtgctgttctatgtaggattggcaggaggaatgtaatatttattttacgaatcctttcttagcccatttcagactgttccagcgtctgacgaaaagaatggcacgtatgttttcgtcgagcaggaaggcacaccacatgccggcaagaccccatccccagtggatgcccagcaggtaactgaagccgacagaaacagtccattgtacggtaaatcccatgtagaaggggtagtttacgtcacctgccgaacgtagtgcattggtggcgtagatgtttacggcgcgtcctatttctactactacatcgataatcatgactgtcacccccagacggataatttcttcattgtcggtcaggaggctgaatatgaaatgtcctcctgctgcccagatacatgaaagaacgagtgaaaccagtatggaaagccgcattacatatttccccagtaaataggctgcacgtattttcttttgtcctaccagatgcccgatgctgattgctcctccctgagccattgcaatggcaaacagataaacgaacataataatgtttacactgtaagtgcgggttgccagtgcattattgcctagcatgttgatcagataagtgattactacctgagagaagctgtaagagaggttttcgccggctgatggcaaaccaactttcagcagattcttcagctcaatccacgggaaaggacggaaatatgcaagtgggaaacttggtatatgtttacggaacaggataatgaatagtacaatcatacttactccccgggctacggaggtagatattgcagctccttcagcgccaagtaccggcataccgaactttccgaatatcagggagtagtttcccactatattcatgatatttaccagcacggtgaccagcatggggtatatggctttattggcgctgcgcagcgatgcagagattgtgagtgatatggcctgaaagaaagcgaatgcacctacaatttccatgtagccgataccatatttcagcaattctggccgaagtcccatccagcctaatagcgtggtagcaccgaagtggaggataatacttattaaaatccctacgacaagattcaggagcaatgaaactcctgttacttgtatcatgttcttgtgcattttagctcccagatattgggaacataatacggatgtaccgatgttgataacttcgaataccagaaaagcaaacataactatctggtttactactcctacggcagctacactttcgtcagaatactggctgagcatgattgtatctactgctcccagcatcattatcaataacgtttcaataaaaatcgggataaccagtttggtaagtcctttacgaatatttgtctgttgaattgtctgttccac

SEQ ID NO: 481 - DNA, 13808 bp, unidentified
  source 1..13808: mol_type = unassigned DNA
atgaaaaacattttatttggagttttactattaactggtatttgtttttctacttgtaaggtagaaaaggatgtggaaatagttcaagaagaaatagctccgggagttattaaattgactaaaggggaagttgatacttatactccttatgctgttttgggaggaaaacctgtttctgaggctatgcacgaattgtctgaaggaaaacttccttttagtttggatgatgtttgtttaaaggtatgcgatcgaggatgtgtggtagagattcctttggataaagatgaacaactgtatggatttggattacaatatggaacatttggccaacgtggtttacgtaaacgtccaattgtaaatgataatcctttaaacgatttgggatacactcatgcaccacaaccattttatgtttctactaaaggatatggtattttagttaatacagcacgctatacaacatttctttgtggatcaaatcaacagattagtcaaaatgtacgtccaacagaaggaaatagaaataaaatagctgtcaatacagaggaactttatgaaaatcgtagtggtggaaataaggtttttatagatatacctggagcaaaaggtattgagattttcgttattgcaggacctactctgaaagatgttgtaaaacgttataacttattgtctggaggaggttgtttaccacctatgtgggggttagggtttaagtatcgtgtaaaaggagatgctgttcaggatagtgtaattcgttttgcacgttattttcgagaagcaaagattccttgtgatgttttgggcttggaacctggttggcaaactgcaacgtattcttgttcttacttatggaatgaagaacgttttcctgatcacaaagagatgctgaataaattaaatagcttaggatataaagttaatctttgggaacatgcttatatacatccaacctcacctattcgagaggctatgatgccatatgctggagattttttagtttggaatggtttggttcctgatttcttgttgcctgaggcacgtaaaatatactctgattatcatcgtacgttagtaaaagaaggtatttcagctttcaagctagatgaatgtgataattcaaatattgcatatggttctgcaacatggggattccccgatatgagtcatttcccatcgggagtagatggagaacagatgcatcaaatgtttggttcgctttatgtcaacactatagacagtatttatagagggatgaatcaacgtacgtatcttgattatcgttcttctggtatgtttatgtcatcgcgtaatgctgttctttatagcgatacttataaccataaagattatattcaagctatttgtaattcggcttttggtggtttgctttggtgtcctgaagtgcgtgaagcttattcggataaagacttttttcatcgtcttcagacagtgattctttcaccgcaggcaatggttaatgcatggtatttacagtatgctccgtggatgcagtttgaccgtagtaagaatgatcgaggagagttccttccggaagctaaactgtatgaagactatacacgtacgttgataaatttacgtatgcaacttattccctacctttatagtgctttttataaatatcataaagaaggggttccacctttccgaccattacttatggattatccagatgatatacgtttacgtgatatctctgatcaatatttgataggtgatggattaatggctgctcccctatatgaaaatgcaaattctaggaaagtgtatttcccagcaggcatttggtataattttaatacaaatgaaagatatgagggaaacagagagtatgaagttgcaacagattttgatcagcttccactttttgtgcgtgagggtactttattacccttagccgatgctgtgccttatgttactcaagaaacagtatttaagttgcattgcaaagtttatggagtatctgaagcatcatgtcttttattagaagatgatggggtttcttatgactttgaaaaaggattgtttaatttggttactttagaagccgttgataaaaaagtaaaaatgaataggacaggtaaatgtaaacttaagcgttatgaaataaaaagttacgaattcataaactgataactcattgacagattgattcttcctgtttatttgataatatattatatttgtttttaataaaattaatctatgaagaaactattagttataactttatgtttaagctcattattctcttgtagtacgcataaaaagaaaagtcagtgtgaactctcttcatatgctgtagctttattggatagtacattaaagtattatagtacagctagaattggattatttcatgaaaactatccttcaaaagatgatgatatggttacttatctggctggtgaggatactattcgaaagaatagagttgcttatttatggccaacatctggaatgttttctgctgtaaatgctttgttacgggcaagtgatgataaccgatttaaacaaatgttggattcaatgattattcctgggcttgagtgttactgggattcgttacgccttccagtctgttatcagtcgtatattgcagaagcggggtattcagaccgtttttatgatgataatttgtggattggtattgattttcttgagagttataaattaacccaaaaatcaaattatttatcttctgctgaaaaaatatggaaatttatagaaagtggacgagattcagttttgaacgatggtatatattggtgtgagcagaagaagttatcaaagaatacatgttctaatgctccggcagctgtatttgcgttaaaactgtatgaggctacaaatgaaaaaaaatacttagaagcaggaaaggaattatatcattggacaaaaagttgtttgcaggattctgcagattatttgtactttgataatatttctctggatggtaagatcaatgaaacaaagtttcagtataatagtgggcaaatgcttcaagcagcttctcttttatataagcaaactggagaaaaggaatatcttaccgatgctcataatctggcaaaggcttgtaatgattacttttttgaggatttccaaacagaagagaatcataactttagagctttaaaaaatggtaatatatggtttgttgcaataatgctaagaggttttgaagagctttatcagatagataaaaatccggtttacttaaataatttcaaagaaacattggtatatatgtggaagcataatccaaatactaacggcttgtttggaaatgatgtttttgttcatgatattgataaacaaaaggaatcgaagtggttactgactcaagctgccttaattgaaatgtatgcgcgtttgtcagtttttgaataatgaaaagaacagaaagctaaagctttagcaattgataaatttgaagaacttacctgagtttacagtattaatgtattcttaggtaagttgtttttattaccatagcgaacttttgtaaaatagatataatgttatatactatgaagattaaccgtgttttattattgggactggttttagtcaaatcagtctttgttgctgtttctcaggagcggtgtgtgcctgtagggatgctttgtgaatatttgagtaatcctttaggtattgatgcattacatccacgtttaagatggcatttggatgatgtaagagataaggctatgcaaaaagcttgtagagtattagtaagtactgattctttaaagcttgctgataaaaattatgcagattgttgggatacaggtaaaaggaaaacagagacaatgcaatttgtatataatggaaagaagctgctgccgtttacaaaatatttttggaaagttgaggtatgggataaagatggtaataagacgagttctgatattgccagctttgaaaccggaatgcttgaaatgcataattggcgaggatcctggattagcgatgggagagatatggattataagcctgctccttatttccgtaaggaatttgttgtaaataagagtatatattccgctagagcatatattgcagtagctggattatatgaactttatatgaatggacagaaggttggaaatcatcgactggatccgatgtatacacgttttgacagacgaaatttatatgtaacttatgatgtaaccaagcttatacaggaggggaagaatgcgataggtgtcttattaggcaatggatggtataatcatcagtcgattgctgtttgggattttcatcatgcgccttggagaaatcgtcctgctttctgtatggatttgcatattatgtatgctgatggtacaaaagatattatctgtacagaccgtgactggcgtaccagagaagggggattattgtttaatagtatttatacgggagaacactatgatgctcaagcggagttagatggttggaatcttccaggatatgatgattcaacgtggcgggaatcgtcttatcgcagtgtcccatcaacttgcttgactgcacagcaattacatcctattcgctctgtagagacatatgtagctcgtcgtatgaccagtctgtcagattcggtttatgtatttgatttcggacaaaatatgtcaggggttacatctcttaaagtgacaggagagaaaggtacagtgattcgtttaaagcatggagaaagactttattctaacggtagggtgaatacatccaatatagatgtgtatcatcgtccggtagatgattcggacccttttcagactgacataataatattaaaagggcagggagaagaagaatttatgccaaagttcaattataagggatttcgttatgtcgaggtgataagtagccatcctataaagctgaatgaacgaagtctgacggcctattttgttcatagtgatgtaccacaagtgggatttatacaatcttccgatacaataattaatcgcttgtggagagccacaaacaaagcatatctttcaaacttgatgggatatcctacagattgtccccaaagagaaaaaaatggttggacaggagatgcacatttcgcgattgaaacggctttatataattatgacggaattacagtatatgaaaagtggcttgccgatcatcgtgatgaacaacagcctaacggagtccttcctgatataattcctactggaggatggggatatggaacagataatggtcttgattggacaagtactattgccattattccttggaatttatatctgttctatggcgatcttaaacctttgactgactgctatgaagcaataaaaaaatatgtagattatgctgaacggaaaagtataggccgtttgacggactggggaagaggtgattgggtcccggttaaatctcattcctctaaggagttgacatcttctacctatttttatgtagatgcaaagatattgtctgagacggctaaattgctgggtaagaaagaggattacctctactattcgaaattagctgaagaaataaagcaagccattaatgctaaatatttaaactatgagacaggggtttacgccagtggtactcagacagaacagagtgtacctcttatgtggggagtaactccggaacatatgaaacgtaaagtcgcacataatttggcttgtaaagtcagagaatgtggatttcatttagatgttggtgtattaggagcaaaagcattgttgaacgctttgagtgagaatggagaggctgaaactgcttatcggctagctgtacaggatacgtatccttcatggggaaattgggttgctaatggtgcaactaccttgcttgaaaattgggatttaaatgcaactcgcgatatttcggataatcatatgatgtttggcgagattggcggatggttatataaaggtttgggaggcatttatcctgatgtcaagttcccaggttttaaacatataatattaaagccgtatgtccctagggatttaaagcaatttgaggcgacttatcattcttcttatggtaaaatatactcaggatgggaacaagtgaatggtaaaatcacgtataaagttattgttcctcctaattcaacagctactttgtatcttccggataatttgtctggtgatgataaaagtatagagttggaatcaggaacttatatttttgatttgaagtttaaagaatagggatttaaatctagaattttgggatgcataatacaaaaaggagttgtatcaatgggatacaactcctttttgtttatcaacagtggattttataaaacttcggtattgtcttgttgtttggctggatgcggatagtctatggtgtaatgtagccctctgctttctttacgttccatagcctgacgcgtaattaaatagccgacattaatcatattacgcagttcacagatttcacgtgaagcctttacacgcttaaacaatcgttctgtttcttcgtataagatgtccagacgattccatgcacgaacaagacgaagattgcttcgtacgatacctacgtatgattccataatctgatttacttctttcatgctctgagtaatcaggatgcgttcttcattgctgattgtaccttctgcattccattcaggaatatcttcattgaagtcatagcggtcgagaacgcttaaagcatgtttcgcagcagagtctgcatatacgatagcctcaataagcgaattggaagcaagacggtttcctccatgcaatccggtacaagagcattctccgatagcatacagacgtttgatgctagattgtccgtccaagtcaactttgataccgccacacaagtaatgagcggcaggagccaccggaatataatccttggtaatatctatacccaggctaagacattttttataaatattggggaagtgtttctttgtttcttccggatctttatgagttacatccaaatatacatgatcttcaccccgttgtttcatttcactatctatggcacgggctacgatgtcgcgcggagcaagtgataaacgtggatcatatttttgcataaattcttctccgccgagatttcttaatacagctccatatccacgcatggcttctgttattaagaaactaggacggtctcccggatgatacaaggctgttggatggaactggatgaattccatatcctttacaagtcccttagcacgataaaccattgcgataccgtcaccagtggcaaccagcggattggttgtatgggtatatacagcttcacatcctcctgtagccattactgtgacttttgaaaggaaggtatctacatctcctgttttttcattcaatacataagcaccaaagcatttaatgcccggtgtatgacgagttacgatgatgccaagatgatgctgagtgataatttctacagcatagaagttggtaaatactgtgatattaggatgtttttttacagcttcgatcaggctggtctgaatttctgctccagtattgtccttatggtgtaaaatgcggaattcagagtgccctccttctttatgtaaatcgaattctccgttttcggttttatcgaagttaactccccagtttattaattcttcaatctgagcaggggcattacgcactactttttctacagcttccgggtcgctaatccagtcgccagctaccattgtatcgtggatatgcttttcgaagttatccactttcagattcgttacagaagcaattcctccttgtgcatagtaggtattggcctcttctagtccggctttgcagatcagtgcaaccgaacctttatgcgcaactttcagcgcaaagctcattccggcaattcctgaaccgataacgagaaaatcgaattttcttaccataataaaatatgtatatattgttgcaaaactacaaaaaaactgacatgagagcactgtctctttgttttttttctaaagaaccttatgataagtatggttttcggtgataaattgctatcttcacaaagaattaataaatctcgtagatataatggacaggacttttcactctaaagtagactggtggtactggttactgatggctgttaccgcttttttattgttcgatttcttttggtttcattataccatagccacattactggttgctgctgtgatgatatttgaaattgaaatgttaatacatacacgttatattgttacgggtagtggcaagttattgattgaaacaggacgttttgtggctgataaaactatattactgaatactattgtcggcatgtgcgaagtaaattctttctccattgctcctgccctttctgttcatcgagttgagataacttatcgtgtcggtgataaacatgaaaaagtttttgtctctcctcaaaatgcggaagattttatccgatgggtacagaaaaaaatgaaaagtggcgaaaatacagatatgatcgataactaaaatatgttttatgaaaaatttcaaacctcgaaaatcggtaaagagatttatatgtgaaactcttataagtgctcttgtcctgactgttatattaggtataatctattatcaggaaagactttgggtacttgctatggtattgatttttatacttgatgtattgttctgcatgtttgaagaaataaaagaataccggatagatgatgatggaacagtacatgtagtttgttatttaggcttttcaaaagtcgttttgaagggaattaccaaagtgtattttgacccccagcgtaaagctctgcgtatcattgctgaaaaaagtgacaggtggtatcctttacaggagccggaattgtttgtagatactctatacgaatattatccggatatggaatacgaaaactggagctgatataaattgaaacctattaatctaaataaaataatatgaaattccaacttgcaattattggtggaggtcctgccggatatacagctgccgaagctgccggtaaggctggattgagtgttgttctgttcgaaaagaatagtttgggaggtgtttgtctgaatgaaggatgtataccgacgaagacattgctttattcagctaaagtatacgattatgcccgtcatgcatcgaaatatgctgtaagtgtaccagacgcttcttttgatttgccgaaaattatttcacgaaaagccaaggttgtccgtaaactggttttagggattaaggctaaactggcagcacagcaggttactgttgttaatggagaagcttatattgtggataagaatactgtacgttgtgcagatgaaacgtacgaatgtgaacatctgattatttgtacaggtagtcagactgttattcctccgatacaaggtattgatcaggttagttattggactcaccgtgatgcactcgataataaagaattgcctcgttcgcttgctattgtagggggaggagttatcggaatggagtttgcttctttcttttctagcctgggagtacaagtaaccgtcatcgaaatgatgaatgaaatcttgaatggcatcgatcgtgaacttgcggcttctcttcgcacagaatattcaaagaaaggagttaaattcctgcttggcgccaaagtaaccagtctttcacaggatgacgaaggaatacatgtacattatgaaaatgcggatggagcaaacagtatatgtgccgataagctgttgatgagtgtaggtcgtcggcctgttacagaaggctttggtcttgaaaatctgaacctggagctaacagagcgtaggcatatccgtgtcgatgctcatttacgtacctctgttcctggagtatatgtatgtggtgatctgaatggcgtttctttgctggctcatacggctgtgagagaagcagaaatagccgtaaaagatattttgggtgagccggaagaaatgagttaccgtgctattccaggagttgtttataccaatccggaaattgcttctgtaggacagacagaagaggtgttgcaggcaaatggtacttcatatcgtacagtgaaattgcccatggcatattcaggacggtttgttgctgaaaatgaaggttcaaatggagttattaaagttttggtagacgataaagatacggtgcttggcgtacatatattgggaaatcctgcttccgagttaattgtcttgggaggtatgatggtagaagaacaccgtaatctggaatattttaaacgttttgtttttccgcacccaacagtaggtgaaatctttagagaattgtaatatatgaagcgaacaggactagtattaatctctctcataatatgttgttgtacactggctgcccagtctattgccggaaagctggatgcattggtttcttcagaaaaagtattgacgacttcggaggttggcattagtgttttcaatttgacacaaggaaagcaggtgtatgcctatcaggataaaaaactttatcgtcctgcctccattgaaaaagtgataacatcggttactgcattggcagagcttagagaatattatcttttcaatacacggattgcttatacaggaactatcgttcaggacagtatattacagggagatttatatctagtcggtggattcgatccggagtttatggatgaggatatgaataaactggtagaagctgttcataactccggaatacgttgtattcaagggagcctgattgcagatgtatcgttgacagactctatttattggggggcaggatggtcttgggatgatactcccgaagcctttcagccatatttatctccgctcatgttaaacagaggatgcgtaaatgtaacagtaattcccacatcgaagggaagaaagccgaaaatagaggttataccagaatctgattattacaccgtttgcaatttagctcagagctatgctccgcaatgtggaaaactgaaagttacccgtaactggctggataatggtaatacgatttgtgtggatggaaatgctaattacagatgtacaaagacactgaatatgtattcgtcaaaagatttttttctgcatacatttgcttatcgtttaaaagaaacgggtatttctatacagtcagtccggtatggaatatgtccggatgaggcaactggtatgtatacattttcacgaccgttggaacctgtattaaaacgtgcgttgaagaaaagtgataatctgtctgccgaagcaatgttttatcatctggctatcagtcgttctgggaaaaaaaatgtaggttttaaggatgcgcaggaagttattcactcctttatgaagcatgagatcgggcgtaatcccgataattacagtatcgtagatggcagtggtgtatcactttacaattatatctctcccgatttgatgatggagtatctgaaatatgcttatgcacatcctgagatctttcatacattttatgaggctcttcccgttgcgggagtagatgggacactgcattatcgtatgaagcagggaaaagcatatcggaatgtacgtgccaagaccggtactgttacagggataagttcacttgccggatatgtaaaagcaggaaatggcgatatgcttgcttttgttattatcaaccagaatgttttacgaggtaaggaagctcgtgcgtttcaagataagatttgcgaaatattagcacactaataaaaagaaattagtatatttgtgaacttagaaaattagaataaataaatccgtgttcgtaaacggaaaaacaatttgcttttttaaggttgatattagttattaacaatataaacactaaagaaaactatggttaatttttcactcgaaggtaaagtagctcttgtaacaggagcttcttacggtatcggttttgcaattgcaacaggttttgcacaggctggtgcaaaaattgtattcaacgacatcaagcaggaactggtagacaaaggtcttgcagcatataaggaactgggtattgatgctcgtggttatgtttgtgatgtaaccaacgaagaagctgtaaatgctttggttgcccagattgaaaaggaagtaggtgttatcgatattctggtaaacaatgcaggtatcatcaagcgtattccgatgtgtgagatgtcagcagccgaattccgtcaggtaatcgatgttgatttgaatgctccgttcatcgtatcaaaagctgttattcctagcatgatcaagaaaggtcacggaaagattatcaacatctgttcaatgatgagtgaacttggccgtgaaacagtatcggcttatgcagcagcaaaaggtggcttgaagatgcttacccgcaacatcgcatctgaatatggtgaattcaacatccagtgtaacggtatcggtccgggttatatcgctactcctcagaccgctcctttgcgtgaacgtcaggcagacggttcccgtcatcctttcgatgctttcattgttgccaagactcctgctgcacgctggggaaatccggaagacctgatgggtccggctattttccttgcttcggatgcttcaaacttcgtaaacggtcatgtgctttacgtagacggtggtattctggcttatattggaaagcagcctaaataattttagctcttcccgagcgatataaaaaaactagctgaagtttttcctaaaacttcagctagtttttttattttttgtacaaattttcggtcaaacttcacgatgttttttccggcttatgcgctttatccaaagataatatcctgtaagtggtaaaatacctcctacgaatgcagacagaaaatatagaatacgggttatgatacctccccattgtccggtatggaatgaatatatgattcctttcatcttgctggatataggttgttcattggtatcatagattgttatttctgtaatttttccagtatgagcatcaaacaatgctgtgtcacctttccgttttcctgtctgaatgatctgtgcattatttttgtttaactggattgtgccatagctgttatactttgtttgcagttccgcaagggcagtatcccaggccagatagtttgtttgctctgctcgctttcttttttctttattattatgtccttctccatgtgcggcagtctgctgtggctgttcggtagaagctccaaagagtgcataaaatccggtacgataccatcggaacgaccacgttagtccggtaagagccatgattagcagaaagatggttgcatagaaacctaatgatacatgactgtcgtaccagaaacggaaccagcctttgttgcatgataatttaagccggttttgcagacttttgcggctacggggccaccagattactaaacctgatatcagaataaccaccatgagcagggtacttatacctacaatggtttttcctgttgacggagctcctttctgagcaggagcatccagtaaccagcgatgcaatttgcggacagtctggaagaaagaacttccttctacccatccgtttatttctcccgaataggggttaatacttaactggcggcgtccggcatttttaaagcttaccatccaggcttcttcaggatttcgagccatttgcaagctgtttacttccagggtatcacttatttggttattaataagtgcgacaatctgcgaaggttttagcggcgtagccccttctgtatagtctacggtatatagatgaggactgactgcacgggttatttccttctcgaataccaggagtgcccctgtcaggcagacaattgaaataatcagcccgacaggaacagatatccataagtgtatttgtttgaataattttctcat

SEQ ID NO: 482 - DNA, 6122 bp, unidentified
  source 1..6122: mol_type = unassigned DNA
ccgctgatccttgccggtgtcgccgccgtaggtaaagcgcttggctacggtctgaaaggttgctgccagactatcgccgaagttgccggtgaacacgctgggctcggtggaggaattgaaggtatactcgcccggttcggcgcacacctccaccacgcggccctgctccacgatgagcatgcactgtccgtctgccacggcgatgccgctgccgttggtgatgatgttgtcctcgccgttgttggagctgcggcgggaggtgcgcttctggcccttgaccatcagcacatccttgtccagagaatcgcagtagaaaaattccttccactggtctgcaagagttccgcccagtgcgcccatacctgctttgatcaaacccataataatttcctcctgtatgttttattgtttttgctctcttctttatcatgcagaacgatttcgtttgtaaaaaaggttctgcctgctcaggggtaagggtcagataattgatattataatcatactgcaatgcggcgctgaacgcaaggaatttctaaccgttgccacctgcctttgcagcttctttcacaaaaaagaacaccggagcgtccatagagactccggtgttccgaaataatatttttatgcttgtcccgtacccaaaaaaggcttagaaccgccgccatgtatccggcataaacagcaccagcatggggaagatctccagacgtccggccagcatatcgaagatgagcaccagctttgcggggtctgcaaagcagccgaagttctgcattgggcctgccatttccaagcccgggccgatgttgttcagggtagcagccacggcggtaaagttcgtcaccatatcaaagccgttcaggctgatgaggaagaaggaggccgcaaagataaagatataggccgcaatgaacacgttggtggtgcggatggtctcgtggttcagcagcttgccgtccatgcgggcgggcgctaccacctgcgggtgcagggcggtcttgagctccttggccagggtcttacccagaatgaggaaacggctcaccttgatgccgccgccggtactgccggcgcaggcgccaatgaacatgagcatgaccagaatctctttcgagagggtcggccacaggtcaaaatcgcagctggaaaagccggtggtggtgatgatggagcccacctgaaaagcggcctgccgcagcgcctcgccaaagctgttgtacatactataaatattcgcagtgatgatacccactgccacgacgatgaccacaaagtagccccgcacctcctcgctggcagcagcgcggcggaacttgcgcatgagcagcaggaagtaggcgttgaagttgacgccgaacaggatcatgaaaatggtcacgacccactggatgtagggcgaaaagctggcaaagctgtcgttgcggaagccgaagccgccggtacccgccgtaccaaaggcagtgagcatggcttcgaacaggggcattcggccaatcagcaggaacaccagctccagcacggtaagggcaaagtagatgccgtacaggatcttagcggtggactgcaccttaggcacaagcttgtccacctgcgggccggggctttcggctttcatcaggttgacgtgagagccgccagtcagcggcagcagcgagagcagaaacaccagaacacccatgccgccaatccagtgggtgaagctgcgccagaacagaatgccgttgggcagcccctccacggcgggcaggatgctggcaccggtggtggtaaagccggagaccgtctcaaacagggcatccacggggttcgggatgcagccggtgagcacaaagggcaccgcgcccatcaccgagatgaacacccagcacagcgaggtagccgcaaagccttcgcgcatatagaacaccttactgcggggtttgatggtgtgcagggcgtagccgatgccagcgctgacggcagctgtgagcagaaacacgcccagcaccatccactcgccatacactaagctggcggcggctggcagcagcaacaacgcgccctcgatcatcagcacatagcccagcagacggaaaacgatcgcatagttcatagtccgcctccgtcagtgctccacgatatcgcgcagatcgtgcagaccgtgctccagcgtaaccacgatgacgttatcgcccacttggatttggtcgccgccgcggggaatcaggatcttgctgccgcgggtaatacagcacagcagcaggttctttttcaggtgcagctggctcaggggcacaccggtagcggcgctctcctcgtgcactgtaaactccagcgcctccacgcggtcatccagtatgcggtacagagtcttgatgttgttgcctgcctcgttttgcagggcgcggacgtactgcacgatgtagtcacaggtcatgtacttggggtagaccacgctgcccagatccagcccggccagaatatcgtcaaattccagacggttgaccttggtcaccagcttgccattggagtgctttttggcaaacagggtcagcagcacgttctcctcgtcgatgttggtcagcgccacaaaggcttcggtggattccagaccctcggaaagcagaaactcgcggttggagccgtcctcgttcaggatctgtgcgccgggcagctgctcggccagttctacgcagcgggcggcatcccgctccacgatacgcacccgcacatggttttccagcagttcctgactgaggtagtaggcaatggcaccgccgcccacgatgagggcgttgcgtaccggctgcaccggcagatgcagctgctggaagaaggcatgggccttttcctgcgtagcaaggaaggtgacctgatcgcccttttgcagcacaaagttaccgttggggatgatgaccccgccctcacgctccaccgcgcacaccagaatatcgctcttgagccgggtggggatctctcgaatggctacgccgtccagtgcatcgggcagcgcaaacttgatcagccgcacacggccgtccgcaaaggtatcgatcttgctggcaccggggaaacgcagcagatgagagatctcctttgccgctgccatttccgggttgatgatggcggaaatgccgatctgctttttgataaagtccagctcgtggctgtaggatgggttgcgcacgcgggcaatgccgtggcagtggcccgcctttttggcaaacatgcagcaaagcaggttcagttcgtccgagccggtgaccgcaatgaacacgtccgcatcctcaatgcccgcctcagacagggtggtgatggacgagccattgcctacaatgcccagcacgtcgtagctttcggtcaggtgctccacgcgcgctttgttggtgtccaccacagtcacgttgtggccttcctcgctgagctggcgcgccagagccgtgccgaccttgccgccgcccaccagaatgatcttcataacaagtcctttctcctttggcagccccttttcccggggcatacaagtacagtgtagtataccatatcccgatgcaaagttctaccgtttgtcccgcaaatacagcgaattgcttaaaaagcgacagttcttttgtgcaagatggcctgttctcagcgtgaaagcgcaaaaagggactgccacacagctttgtgcagcagtccccttgggacgaaacgatttagaatgcccaccgcgtacgctttgggcatcctcagcggaaaaaaaaattgttataagagcaatgccgggccgcctgcgggctgcccggcattgcattttcacggaaaaacaggtttttcccctgctgtccggtctcagtaccgctctacgccgtccttggtgacaagggcgtacaccagcggagcttcctccggcttttcagcgccgtacacaaggccgctgcggtactcggctgcggcagcttcaaacttgtccgcagcgccgtagaaggtggcaaggctttcgcccttatggacgtagtcaccgcgctttttgtgcagggtgatgccggcggcaaagtccagcgggtcgccctttttctggcggcctgcgcccagcagcacactggcagaaccgatcttttcggcatcgttggccgtgatgtagccgtcctgctcggccagcagctcgtagctggcggcgggctgtgcaaacaggctgtaatcgtccagtacccggatgtcgccgccctgtgcggcaaacatttccttgcacttggcaaaggcagagccgtccgcaatgacagcctcggccatagcgcggcagtgggcggcatcgcccttgcctgccagcaccagcatattggccgccaattgcaggcacacctcggtcaggtctgccgggccgtggcccttgagcacgtccatgctctccatcacttccagactgttgccgatgttgtggcccagcggggtgtccatatcggtgatcatggcagctacccggcggccgtggtgggtaccgatggcaaccatcagctgcgccagctcaatgctctggtcaacagttttcataaaagcaccggtgccggtggtgacgtccagcaggatggcgtccgagccggaggccagctttttggacatgatgctggaggcgatcagcgggatgcagctgacggtagcggtaacgtcccgcagggcgtacatctttttatccgccacagcgataccctcgctctggccgatgaccgacagaccgatctggttcacctgtgcaaaaaactcctcctgcgagagggcggtctttgtgccgggcacgctctccatcttgtcgatggtaccgccggtgtggccgagaccccggccgctcattttagcgatcttcaccccgcaggccgccacgatgggtgcaatgaccagcgtggtcttatcacccacgccgccggtggagtgcttgtccaccttgatgcccggaatgggcgaaaggtctaccatcacaccgctgtgcgccatcacatcagtcagttcggcggtctcctcattggtcatgccgcgcagatacaccgccatcatccatgcagccatctgatagtcggccacttccccgctgacaaagccgttgacaatagcttccagctcttcccgggtgtgggtgccgccatcccgcttttttgcgatcagatcataaatacgcatcgtttcacgctcctgttcttactgtttttgggggcgttttatgcccggatttcctgccatacgctcttgccgtccagcgtggaggcgtccacttccagatattcgcagatggtctgggcgatggtgccgaagcacagcttggtgcccagatccatacccgcctttacgcccttgccgcagaccagatacggcacatactcgcgggtatggtcggtggtcttggtgtaagaggggtcacagccgtggtcggcagtgatcatgagcaggtcaccctcccgcatacccggcaggaaatcggccagaaaacggtcgaactcggtggcggcggcagcgtagcctgccacgtcgcggcggtggccgtaaagcatatcaaagtccaccaagttcacaaacgccagaccctcaaaatcccgggtctgcaaggccttggtaaaggcaatgccgttggtgttgccggtggtcttgatcttttcggtcacgccctcgccgtcaaagatatcgtagatcttgcccacagcgatcacgtccttacctgcgtctttcagcagatccagcatggtggcgcggggcggcttcaggctcaggtcgtggcggttggtggtgcgataaaaggtgtcggcgctgttgccaaggaaggggcgggcgatcacacgacccacgccgtacttgcccttgagcatttcccgggcgatctcacagtagcggtacagctcgtgcaccggaacaagctcctcgttggcggccacctgaaaaacgctgtcggcgctggtgtagacgatgagggcgttttcccgcatggcctgctcgccgtagtccttcagtacctgcgtgccggaatagggcttgttgcacagtaccttgtggccggtcttttgctcatactcccggatcagctcctctgggaagccctcggggaaggtgggcagcggctccgggctgactacaccggcgatctcccagtggccgatggtggtatccttgcccat

SEQ ID NO: 483 - DNA, 23852 bp, unidentified
  source 1..23852: mol_type = unassigned DNA
ctactgcctgttctcccgcaggaagtcgatagcctgcagataaccgtccagtccctgtccgtaaatctgcctgttacataccggtgctgtcacagaaatcttgcggaactcttctctgctcgtaatatcggaaatatgaatctccaccttgggaatatccacgcttgccagagcatcccggatggcatagctgtaatgggtgtaggcaccggggttgatcacgatcccctccgttccgtcagaataagcctcctggatcctgtcgatgatggctccttcatggttgctctggaacacctggatctcctctccggtttcttttgcttttttgtcgatcagatccagtaaatactgatagtcctgtgttccgtagatctttttctcacggattcccagaaaattcagattcggtccgttgatcaccagaattttcatcttttttctctccttttttctctgtatgtctttctgcttccgtaactgcagctgtaactcttccgccagttcatcggaatgcctgttatccacatccagtataatgtccgcacattccgcatagattttgtcccggatctccagcagttcccggatccttgtcagaggatcctcacactgtagcaggggccttgtagtgtcatttttcagccgctcgtagaccacttccggcgacactcgcagatataccactgttccacactgatgcagcaggggccggttcaccggattgaccggagtgcctcctcccacagacaggatacgttcgtatttctgttccccgcattttcgcagcagttccgtctccagttcccggaaataggattcaccgtcatccgcaaaaatctgtgtgatgctcctgccctcctgtctctcgatcagcttgtccgtgtcttctaccggcatccgtagcagataggacagtttcagtcccagtgttgtcttccccgatcccataaagccgatcaggacgatattccttcgtttgtgtttcatttttttattttccgtcctctgtcttttttgctttctgcatccgttcatagactttgtctgcaagccagggttccacctgacagcctgtccacaattcaaaagcaatgattccctgatagagaagcatcttcgcaccattataggcttcaccgccctgtgcctccaccagttccataaaccgggtcttcggtggattgaagatcagatcatatccggtgtgtactctcttataaaatgtgggatcctcgatcaccgccgcatcacagtccggatacatacccacactggtggcctgtattgccagatagcgttctccttccggcagcgtatcatacgcatctatagacagggcttttgcaaatttccgtttttttccggtgaggtgattcacctcgtccgctatgctctgtgccttttccaccgtacggttcaggataatggcctctttcgcccccttatccaatagcatcatggctaccgctctggctactcctccggctcccaggatcagcactttctgtcccttgactttgacgccgtcctcgcacatggcccggtacaatcccggcatatcggtattgtagcctttatagcccttttccgtgcggaccagcgtatttacagcaccgatatttgatgccaacggatctatgtcatccaggtacgggatcacatcgcttttatagggaaccgttacatttattcccagcagattcagtgcaaaagcacccttcacggcatcctccagtcttccggtctccacatggaacgggacataggccagatttttcccaagcaccatggacagagtattgtggatcaccggagacagggtgtgctccaccgggtttccgatcagtccgcaggttctggtatagccattgatatcattcagcattttgatttcctttccgacgcttttctctatggtagaaaaacagtacgatcttttccagatatctcttgagtacgatctgaatctcttctttcggatgaatgggtttcgtcagataggtcacgatcccgcatttcttagctccccacacatcggtgaacagctgatcccccacaaaaagtgtggtatccgccccggtatgcatctgttccatagcccgcagataaccttctcttccgggtttcccggccttatagatataggaagcacctactgcatccgcaaaactttttacgcggggctccttgttgttcgataacagcagtgtctgaaatcccagttcccgcaatctgccgaagaactctgttgcctgcggtgttgccggtgccccgtgcggtacgagtgtattgtcaatatcaaaaatgattccgcgatacccctgttcatataatgttctgtaatctatgccataggcggaatccgcctcataatccgggtaaaactgatgcagcatctgtctcgcctttcgtctgttttataatgtaatcggtattctcctctagggaaaatgcctgaaaatatgcttcttccaacggaatccacagctgcaggaagtcctgtagtatgtcctctccgttcctcgtgcggatccgctccgtctgcgtctcatggtctatgtccagaaatactttccggtccatgtattctcccagtaccggatggcagctgtaagcgccttccacgaatacaaaaccgctattttgtaccgggagccagtctcccggtgccatacgggaacagtcaaatctctgataggaaaatgcttgtcccgatgcaagcttcggtatgacttccgtcaaaaatcgttcatagtgcacatttccgccaggctcgcttctgcgctcctgcgtccgaagtgcaggcggcagaaaaaaatcatccatatggatcacatctccgcccagttcttttgcaagtctggcagccagtgttgtcttcccggcggcgcatctgccgtcaatggcaataatgcgcattccggtgggaagcacacgcaattcctctgtcagctcagaaacagttctcagcgatctcatccacagcctccgcaatgtattctcccaggcgtctgctctcgactcccacgatagtggcatggcatttactcatggggatcaggatcagttttgcatcattcgaagctaccgctgctgccatggtgggggtgatctcacctaacatggcatccgccatgacgattcccaccggtcctacgatcacgtctgctctcttactgttatataccacggcattctccccggtggcaccgcttgtcacgccgctcttcatcatattcgccgtagctgtggcgttggttcccactgcgatcagttccgcctccggaaaccgttccttcagagcctccagcaggcttctgcctacgccgccgccctggccgtccattaccataatacgcataactttactcctgccaaaaataatacatacatgttccatgatagcatggcaaatgcttttttgcaatttatcttgacaaaaaaatgcccaccctttattatgtattatgcttcaggaaggagcttaacgccagaaggcatatttatcccagaagggaaaagtgtgccgttctggcttttttgttactgttcaggtttctccgtctcggagaggctttttgcgaatggagactctgaacagttatatcttatcaggaggttttccatgaaaaaattaactgttttaaacaagagcatcctcactgctctgtgtgttgccttatgtgtggttctgcccatgactctgcacgccattcccaagggcggtgtcctgttctcccccatgcatctgcccgtgcttctgtgcggtctggtctgtggagcacctttcggtctggtctgcggcattctcggacctctggtatccagtctgcttaccggtatgcccgttttcggatatatgcctgtcatgatgatcgagctggggctctatggtctgatcagcggtctggtcatgcagtttcttcgcagcggtaaactggttgttgatctgtatgcagctctggtcattgccatgctgggcggccgtgtgatcaccggtatcctgcgcgcactgatctttgcaggcggttcctacagctggtctgcctgggctgccggatatttcgtatcctgcctccccggtatcattatccagctgattctgatccccatcatctatgttgcactggaacgcgctcatctcctgccggttcgttacgctgctgtttctgctgccgcagagaccgaagctgcataaatccatacaccctcgagccggccggctcatcgcatcacagcaaaatggctcctctgtcttacgacaggagagccattttttgtctgtagatccgtatgaaatagaggatttccgccactgcggtgatactccatgaaaagacatacagcagatacagggacggtatcgtatggaaataggcaaatacggtgtagacccagattacacggaacacgcaggagcccatgatgacaatgaacataggtataatgctcttgcccatggctctggccgccgcaatggtacagtccataaatgccgaaatacaatacgaaaatcccatgattgtcagacggtacataccggcattcataactgccgcatctctggtaaacagggacaaaaacgctcttccgaaaaataccagtgacactcccaggatcagaccgatggcgaaggaatatgccaggctgatgaggtaactgttccgcacccttttcttcttgcccgcaccgtaattctgtcccataaagctgccgcaggcggtatagaatgccgccatgacatcgtataccatggcatctgcattggtggctgcggaattgcctgccaccatggtggcatcaaaggaattcacacccatctgcacaaagctgttggcaaactggaaaattacattctgcaatccggagggcattcccagcttcaggatatccttcgtaagttccggatccaaccgcagctttcccggatgcagggcataaatgtctttgcagcgaagcagtgcctgcaggattaatgctgcagatacatactgggaaatgatactggccaatgccactcctgccacatccatatgacagacgatcacaaaaaacaggttcagaataatattcagcactccggaaaaaccaagataatacagaggcttcttcgtattccccactgcgctgtacaccgcattaccaaagttgtaaatggccagcgccggcattcccagataatagatccgcaggtacaatactgctttgtccaaaagttcctctctggtcttcagcattgtcagcatccactcggataagccgactcccagtaccagtaacagcactcccatgatcaggctgaccagtgcggcggaatgaatcgtcttcgacaggctttccctatcctttgccccgtaatacagtgccgtcagtacattgataccgccggacagaccaatgaggaatccggtaaacatggtgaccagtgtggctgtggaccctaccgctcccagcgacagggaaccggcgaactgaccgatcaccgcaatatccgccatgttgaaaagcacttgtaacagattggacagcattaacggcacgctgaagatcagtattttctttcctaagggtccttccgtcagatcctgcatattctgtttcattttcaatcctatccttttatcttcttcccatatttgtatctctgttattactcttcccatcagcgtccactctgacgaaaagaacggtcaaagagttttttgctccttgaccgttccttattctagcatatcttatctttcttttctaccggaaaatcaatttttttgacaacttatgctgcctctttttctgaatttttcccggcaccgaacagcttgcggatgcagctgtaagcaaccataactcccagtaccataagcagtatggctacgatcagctgtaagccgtctaccaggaaggttgcctgtccggatgccacatttttcaccagggcaactgtcttctggatcaatgcagtaaaggttacgaccagcatcattcccatagggaagtacagtgtccagccggtacgaccggtagtctttaagaatactgacagggcgatcaataccagtgctgccagcagctggttcgcagaaccgaacagcggccatacattgttgtatccgccaagagtcagcagataaccgaaaaacaaagtgatcacagttgcaaaatacttattggtcagaactctctgcacgggagtcatctttgcggtatctgtggtgtctcccaggaacagctcctggaaggacatacgcccgattcttgctacggaatccagagaagtcagtgccaatgcagatacacacatggtcatgaatacagttgctacggttacgggaacccccatcttctccaggaatcctgcgacaccggaggagaaaatggagaacggtgtaccatcgggcttcgtgccattgactgcaactgcaccgacaactaccagtgcaaccacacccagcaggctctctacgatcatggcaccataacctaccatgggcatatctttttcattactgatggtcttggatgaagtaccggaggataccaggctgtggaagccggataccgcaccgcaggcgatggtgacgaacagagtcgggaacaggctgctgttacctacctgaaaaccgttaaatgcattcagctccatatcgggatgagccacaaccacaccaagtacggcaccgatgatcatacccagcagcataaaggtggtcatgtaatctctgggctgcatcagaagccacatgggcattacggatgcaaggaacaggtatgccatgatgatgtatatccatgcagtcttggaagcatagatgggaagatgcatacctacagcgaacattactaccaacagaccgatggctacgactgccttgacccactcgttcatcttgccgacctttttctggatcagaccgaagatcactgctacaacgatgaacaacatggaaatggatgccgcactgccgttggcatatgccacactggcatcttccagtccggtacctacgaaggtacctgccaccatatcggtaaatgctgcaatgactaacagagtgaacagccagcagaacagcatgaacaactttctgccggtcttaccaatgtatttttcaatgatcattcccatggattttccttcgttcttcacggaggcatacagcgcaccgaaatcctgtacggcaccgaagaacagaccgccgatcagaagccacaggagcacgggaacccatccgaataccgatgcgaggatgggacccgtcacaggacctgctccggcgatagaggaaaactgatgagaaaatacagtgaatttggaggaaggcacgaagtcctctccgtcttcatgggtaaacgcaggcgtcttcgccttctcatcgattccccacttttttgcaagccatcttccgtagaagacatagcctgctaccagcactaccattgcgatcagaatgattaccaaactgttcatttttgtttccttctttcttgtgtcttgttgttttgtcgtgacagaaagaaaaattctgattgcccgtaaaacaaaaaagctttccgtctccggtgctttataagcactcaaagacgaaaagctctaagctctccgcgttaccactttgcttgccatgttttatcacatgacctcttgttcccatctccatgaaatacaaatatctcatttccaacaggcttctaaataacggtagaataccggtgacacctacttaactgcttcagtgtacttctcacagaggatagtctgtcatactcacatgccgtctcacaccagccggcggctctctgaaatgcttccgtatgcagatcttgttctgttcatcgaatttcactttctgttcgatagcaaagataccactctgattttataatgtcaatagttttcttttaattttttgttgatctattttatcattttccctttttatccgcgatcagaggtttgatagcggaataaatctcgctggtacgtttgctgtccttgaactctttgttcagggcattgttgattccctgtttggtcttgtactggcggatgaattttaccacctgagggacgatggcctggtcggaaagcaccttttccactgcctgggccagttcatccggttcttctgctgccttcttctctgaagccttcttatcaacagttttctccgtcgttttcttttctgtcatatttgcagtattcttcttccgggtatttccgctctttttccttaccgtttttttcacgggttccacaggcacaggttccagtatctcaggcaacggttcttccaggatctgcacgctcacaaatgctggctctgcaatctcctctgcatccacttccgccttcggttcctccgtcattaccgctgttgcgttctctgtctcctgttctgtgatttccactgccatcggctctgcagcttccaccgacagagcctgcacgctctcctgttccgtactttccgttacttccattgcattttcttcggtcaggagattttgttccgccattggattctttccccacaagagattacggataatgcgcacgggaactccctgtgctttccagtataccatcagactggtgaatccattgtccttggtcacgataaagtaatccgggtgtatcccttccctctgctgctcacagatcaggtaaccgagatacgttgccagctggaaatccagtgcattcttggtacccactgctaccttgtggtaaatgatctgtgctttcgtctcattcaacttccgatgcaggtcaaaagtcatgctgtccgcattgtcactgtagaaaatgcagacggtatcctcctccgccagcagttccactccctccatgcctcggctctttacattttcaaaatcaatcagataataggccattatttctcctccccatttgttgtatcaatttcttccgctttaccagtctcttccggtgttccctgctccggttccgcaggtgcatccttctgttccacagtctctacaggctctgtgttttctaccggtccggttgtctccggcgtcccggactcctctgcacctgcctgcggcttttcctccgtcacggcttccggctcttttgagatgcctgtcttcgttctgctctcctctgtggctttcttcttcgccggaagcttttcgcgaatgctttctttccagccggtgagcttctcatccctccggttcttccgttcccttcgctttgctgcccgttcctgtctggcctcttccttaagttccagtttttcctgttttctggcctgttttgccagtgccttttcttccagttccacttccttgacagcggctttctctatatcccggatatagcggtccgcctttttgtggttcttacggtccaggcggtatgggtcatacacaaagtacgataccgctcccagcaccagaatcaccacaccggcaatcgtcagtaccggtacgacgatcccatactccgtaaatcccagttcaaaacagacaaatacgatcagcatggccggaaacaacagcagatacagaattcttgtcaccatatccaacaatgcatgctgtcttttcccattggtcagaagtgtcccctcaatagcggtataaaatgccataaaaatacacaattccgaaccgaagccatgaagatatccgcagattccggtcagaatcagcgacagaaaaaacatgccgaacgccgttccctgataccaggcattgcggtactccgtcattccctgcagcttgtcctcactgatgccgtgcatccgatagacatccttgcggatcagccgttcaaattcttcgttataccgctgttcctctctggtattgcgcaggtggtcttccactgccttgctcatctgctcgatatattcctgctccttgcggatccgtttggttctgagctgctccagctcattctggcgcctgacttcctcttccagtttccgtacctttccgatccggggattctttaccataatctccggattctccggaagcacagttgtttcgttcttctcctgattctccattgggtcctctttccgtttatattatcatccaatagccttattatagattttccggcccagaaaaacaaccttttgttccctgttttcattgctttggctcttcatcctgtcactcgagaaaaatgccgcaagtaccggcagcattaccataatggggaataaataacgtacctgcactaccggccccagcaacatggtcccaaagtataaaaacggcagtaaactcatctggaagcaccagtattttcttcgatacaggcacaacaccatcaaaaagaacaggctccagctgtatagagatccatgaaaaataacggaaagcaccggccattcattaaagcagttaccactgacgatcttttccagcactttttccagtgccgggaatttcgaccgatgttcaatactgccatagccttcgatttccgaggaagtataggtaaagagcacaccataccttgtgtctgtgccatagcccagattttccgcccaggagaaatcatcccagaaccagtatcctctggtcagttccagaaaagcatccaggaactcgttcggataccgtttgcccactcgtagccagtctctcaaaaactgcctggaattctccgtatatgccgaagcatttaccgcgcccttgatggtatctgccagcggcgcataataagcatcccaatgatctctcggcacatatttttccagcaatgccgccagctccggatcctgcgcctccagttcctctccatgataatatgccactctggcaaactgctggatgggaacgctgtaagcctcgatcttcggagcctccagccgggtccctatggctgtctggatcacatttcgcattccggtctctcccagtaccagacaaatccccagaatcagaatacccagtttttcctttttcggccgcaggatcaataacagcagcataaataccgccaccgcatatactgcgttattacgaaactgcatcatcagacagccctcagccaccagaagaatgttcatgaggattttcttttttccgttgctgaaataatttctctccagaaaaagtaaaaagaacaacgtaaacaatatagtaaacaaggtatcctttgtggtacacaccactaaaaccgtgttgtatgggaaaagcgccagaaatagtgttgttaccaccaccggccattttttagcagtcatccgccagatcatggacgttgcataacccatgaccagagcatacagcaccatctggaataccgccatacaggccattcccgcctcgtaggatccaatggccgttccaatctgtaaaaacagccggatcagccatgtatgtgcaatgggctgcaagggataaaaccattccaggcccttatacgcttcgttgacctgtctgtgaaaatcgtaagacatgatgatcgggtaataagccagccctaccggaatcaggcacaggaaaataacgactgccgttactgcgaatacaatgtcggtcttccaatatctccccgacatcgttgcttctcctctcgcagagagtcggtctatcccgtcaagcaacagatttgcaaaaggaaatgctgcaacacttaagcacagcgcacggatcagaatcatccctttgccccggactccgcaatccgtcattcccagattctgcaactgatatcccatgaccatggacaaggcaaacaggaagctgatcactgccacataacagattctgcgcttcctgtcccttttctcctctattttccggagattttgctccgtctgctgcaacatagaatagattcccacagccagcagcacattcagaacactgtaatagatccggttcaccggctgtaagctgaacagatatgccaccccgtagacaccgcacagagtcagaaccgttctgcccgaagttcctttgtatttcatccatttatcctttgcaatattcaatcgtgagatgcctccatacatttatttccatatcttccactatattgaaatttacactttctgtcaatcattgtaagttcttttctatttgatatattgtatatatttaacaaatatagtaatgattcctattattatatttataatttttgcgcatttcttttttttataaaaagagatatactatatacagaaacaaggaaatgtttccacaaactcataaaccaacagaaaggatgatagattatggcaaaattatatacgatcactttaaatggcgttacagaggaaacttacaatcaggctaccgattatattcagaaaaacgcactgcgtctgaactaccggccggttgcttccaccattgatgtggaatttcccgatgacatcgatcccgacaaagctccggaacttagcgaagccgtgatccgcgaggtgcatcagactctgtaatttttttgatttttacttttgtaaaatagcaacgcaaaagtccgtcgatgctttaacgctccgacggacttttttgttgtgcccgctaacttgcggacacttttcgcatgaagacccttaaggttcaagtggttgccggtattcctcatataagatatccatgtgcagccagtcatagtggttccgcatatagtaacaatgcccccggtatctgccacttattctgaatcctgccttctcgtaacacttaatggcaggggtgttcgtttccagtacatccagatgaacactatacactcccagcaccataaagcagtaccgcaagagtatctgcacgacttcggttccaatgccttttccacgcaccgccttttctccgatgttaatggataaccaggctgacatatcctcagttcgatggtcaatatgacaatatccaatcaatgtgtctgtctctttcaggacaattcccatccgcatgacagaatggtctcttacccaaccgggcatccgggtgatgtccaccacagaatgcgcatgctctataaagacacaggtggtttcatccgacatccacttcgcgtataagccgactgcctcctcatcatccctcagtacggataaaaaaatttgatttccatctaatctgcatatatttttactcatcatgccaccttacatctgctctgtgtgttgcgaagtccttgatgttatttgaattataacatagaacttcctttttgggcactatattcttcgaacatccgccgcttacgcaaagcccaaagtctccgcagacaatcacatagtcctgttcgccttcacaatctcattcaggcgtaccggtccgtatccatataacatgcagcccacattataagcgttctccccctgattcatatattcctatgcttcatccctcttatcgtgaatatgaccgtaaaagtgcaagtgacctctgtaagagccattccattccgacatcggataatggcacagacatatctctttcccactatccgacacgtacatcatcctatcgatggagtcacaatatcccattgcaatctcattatccagcagcctggtatcatggttgccaagaaccagatgcttatgtccctttagttgactcagataccattccgcacttttttcgtttctatagcagaaatcccccaaaatatacgcattgtcatcatgatttactctttgattccataaggatatcattgcctcatccatgacttccacatttttaaaggggcgatggtcaaagtcaattactcgccctgcatcttgggcataaagggatacccgcagggtgttttcttaattttgccctgctttctgggcatagaagtatgccgcaggcaagggcggaaaaaaggaactgccgcatagacagcccgaaaaacatggattccgtgtaattacggatttctttatttatctttacttccaatccataaacacctcctttttagcacaaaaaaatcgccatctttggaaaaatgacgattcttcaagttttactccgtttacttccaactcattcttgcgttatatacattgtttacagcttcaatatagcatatgaaagagggatggtcgtggtcgttctgccgcaggtatctgtttttgatattcaaatactgcgttctgacaagctgccattttccccttttcttaatatacttagcctttttctgtattcctgcggaatgaggggctttgttccaatagtattcatcccgataagtgaaccctgtttttttgtgaataagtctgtaaaaatcttcctctgtatctctgcatacaatgcagacatccattgaaaactcggtaggatttcctctaacaaaatgaatttcccccgtagtcagagaagatgttgaatcctcacaatctcctaaatcacgctcgtttaacgccttattaaaggatttcctcgcacattcttttagatttatgcgatcctcaaaatcttcacatcttacaatctcaaggttgtaatccaaatctatcgacaacgaagcattttgtaccccgtccttaaatatatatacacgtttcatccgctttctcccttacaagcccatcatttcacgcacgacacggtctgccatcttgaccgcaccgacaaggatgagcatattgaataccagttccccgatatagctccacaccatcgtgaccgcagccgcatcgggattgaccacgggcggggaagccgcaaacaccgaaaagataatgcaggcaagcacgatgattacaccctcaaggcacacggcacaataactcttgataaagctcctgccgacattctggctcggctctcccgcaaagaagaaagagggacgggagcgattgcggtataaaggtacagcttgaaaaacctgccgtacaccgacattatcataatgaacgacagcactgtgatgaacagcccgccgatgagcgtcaccgcccataggggaatgctttcaaaaaagccgcagtcctccacggctgtcacaatctctgtcgacaacaccgtctttttgcgatttgacatagatgcgtcctcctttcgcatagttttagccactttgtcaaggtggctatgtaaacaagtacaagagaacgcaaaaaaacgcctactcttaaaatcaataagaataagcggctttgtaatttgccttagacatattcaattttcattctcttggtcggtgcatttatgaccttaaaaataagctcgtcaacaaaatccgtatcttttcctgacttaatatccttcatcatctgattaaatgaaactcttccctcccataatatgaataccgaattttaatccaagttcatgtacataagaagcaggtgtgtaaatccgcttccgtctgctgatgacggaaatctgccgggactgggctgaaaacatacccagtcaatctttccaccttcacacatcataaagaatctggtgccattatccaatacttcaatacccttttgtacatagtcagataatgcccattctccatctgcacgatccatatcataatccatagcgtcggaatctgccagatgctcatccatcagaataacccttccatcttcagccgtaaccgcttctgcatcagcctgtgtataggtaaccttgtatcctgcttccggtccgtccagtactgctcctccacggtcttcatagctattgctcggaagtgccttgacataatcttcatctgctattgctccaagatagtcagatgctgcctgaaactggggatggctcataccatcaccaataaacagaaaacatatttcggtgcttttgctgtttcttcttgcgtctgcgtttctgcagatacttctgttacgattgtttcctgctctgttgctgctgtactttctgtctgtgccggtgacggtgactcagaagaagtctggtctgctgcaggtgctccggagcatgctgccatagacattgccattacaacagcaagcatacccttcatcatactcttaattctcataatcgtttctcctctctgaaacatgttttgtttttcctctgcttcactatacaataccgttgtaaaaaccaatgtccaaagtaggaaaaatttgagtaaattccgacacttattttatgcagttctatctttatgagatttcatcaacatcataatacttaaaatcccggaagcaggcacttcctcctgtttcctctgccgcatagcagaacagaccaaaccgacaaccagtaaaatgatccagtttgaagtacagcttatgcacggttccgatgggtagccagtctcccttatttacccggtaatagcagcgtgcttcatccttcatgttacagaaatctgcttcaagacgaaaatccatctggtgtgattcaacaacagttccttccgtcatatccaatataccatcttcttttttatccagcataaggacttcatattttccatgatgttttgtaatgccaactgcagcataacagccctgcaacgcacacaaacctgcgacatcgccctctttcaatgcagaagcatcaacagtaacctcagctgcgcaggacggataactcatcctttgcgtaagcgtatttactgcctgtgtaagctctgtacaaacttcccgtgttgtaattgtataggttccctgcgatgcatccagatgataataccgtggatctggatcatgattaaactgccagcgcggaagcagcccattacagaaatcatcacttcccactaatggctgataaatatatcctggtctggtactgtgaacctctatttcttccggcacatgtccgttctgtccaaaaaccggaaaatgatccttccaggtaaccggaagcagaataggaatccgtccaactgctccggaatcctgaaacagcattgcataccactttccatccggcgtatccactattcctccctgtgccacgccctgtccacaatatccacgatcatcacaaagtacatctccacccgtgaattctccttccagagaatcactgtaaaagcatgcttccgtccgcatccagcggtctctcagggaatgaatcagaaaaatataataatagccgtttattttttgaatatgagaaccctcatagcctagctccgggttcttatgatcactgactaaaagacgatgtaatccgtccttctttggtgcagtcaaatcttcattcaattctgtaatccagatttcatcatttccatatacaatatagtttctgccatcctcatcaaataataaagagccgtcatgataaaagccttctatcagctgctttttccatggaccatctattttttccgaagtatacaaataagtcttacgggtatcatttgccacaaaacagatataaaatcggccttcatgataacgcagggaagctgcccacatgccctgtccgtaaatattatgaccgcttttcagttgctgcgcatccgtatgatccaacgtctcatagacataagtcacatgctcccagtgcaccagatcaaaagactgcagaatctcacagccaggcataaagtgcatggttgtggataccatataataggtgtcttctacgcggatcacgtccggatctggataatccaatcttgttataggatttacattcattgtttattcctttctgttttatctccatattctttctttgttctattctatttttactattttatctttgtttcttatccgtctgccttttcaactcttctctgccccatttcactattgctaatatcacaatctcacagtaaaatataataatcgaaaacgatcctgcaccatgttattcatcagaaatttccggtttgcacagatttaccgggaataaacagaaggagaccagcatgaaggaaaaccgcaaactattaaaagaattgcttaaagaaattcgcgccatgatatgaccaatgaggaggtcctgaatctgcttgccgtcaaagcctttgatccattcccttttatcctgcttaatctcgtgctgtcctgtgtagctgcgattcaggcacctcttatcatgatgagtcagaaccggcaagaagaaaaagatcgccaacgtgctgaaaatgactataaggttaatctcaaaactgagatcatgattgaagatctccatacattaacagtagtatgctttttagttgtacgtaaaatgatatgccctagcaccatgactctttaatgacacactaaggctctttggctcttccacgtgctctccgctccaaagctccgttccatttactccatcataaatctccagatcggcaagcggtatggatatgtcactgtctttatcacccagattaaataccgcgacataatatccaccctttgtatctgctgcaatccacaatgcatgctctataccatcgatttcacgtctccacacctcatgcgaatgccgtgcatttgcatgcatggcaagtatttcagaattggttaccagattcatagtgaattcgtcaaaccctgtcagctctcctcccagcatcaaaggagaacgcatgatactccagagtgtcagcatggtgatctgctcatcctgtgtgaaattcgtccagttattcacatcatatacctgccgtatcggtccgaccggaagcatatcggcatccggccagtgccctgcacctgcatgggtgcaccatttttctgctcttgaaaacatatcatataacagttcccacttatcccagaaatcatcggtgattctccacatattggaaatctgcttataaagctctgccttttctaaaagagcaggtcccggcgacagacttaaaaccatgggtcttccgcaaccatgcaatgctttgctcagcataatcagttcggattcctcatgtggcagttcccgtgcaatatcatcacatttaataaaatccacaccccaggaagcatataattcaaaaatactgttatagtattcccgtgccccgtctttctcaggatctacaccatacatatccgtattccaggcacagatactgtttgttttggcaatttcccgggcatgtctgtcactgttcatgatttttgtgttctgatgtacagcctgtcgtggaatccctctcataatatgaatgccgaacttcaatccaagagaatggacatattctgccaatggtccaaagcccgcaccgtttgctgcggaaggaaaacgatttactgcgggaagcagtcttccatactcatccattactacatccgcaaaaggatgatactcattggttgcagcataaggctcataccattggatatccaccacaatatattcccaaccgtactccttcagatgctcagccataaattcagcgttccgtcgtacgatatcttctgtaacagccgctccataacaatcccagctgttccaccccataggtgctgttttcatcttcatctgttttataccctctcgatatcctgttaattctgtccgtaatatgcatctgcaccatgcttacggaaataatgcttatcctgtaattcctgcggatgaatcagctccagcatgaccgactttccgcagcggcggataccggtcataaccttgatcagctccgttccacttcggtccgcgctgagcaaaggtccaccggacctttagcgcccttggaaagtaagacaaccgtctcgacatttgcggtccaggggaactggtccacggccacggccttgtccacgcggtaaccgttctccagaaacacttccagatcccgcacaaggctggtgggtttacaggagatataaacgatatgatccacgccgtaagcaatgatcttcggcagtgccttggggtggatgccgtctctggggggatccaggatgatcatatccggcttctcttccacttcgtccagaaccttcagtacatctccggcgatgaattcgcagttatccagtccgttggcagcggcgtttttcttcgctgcctccacggcttcctccacgatctccacaccgatgactttcccggcggccggtgccatgagctgtgcgatggtgccggtgccgctgtagaggtcgaacacagtcttgtcgctgccgcccaggtcgcccacataatctctcgccgtctggtacagtacctccgcactgtaagagttggtctggaaaaaggagaatgtggagatcttgaatttcaaccccagcagttcctcataaaaatactcctgtccgtataacagctccgtacgatcactctgcaccacatctgcaatggaatcattggtaatatgtaagattcctgcgaattttccggctagcttcctatcctgttccagggaaagcagcagatccttaaatcctgtgatcagcgcatccacatccaagcttccttccaccgccgtctctccctgccagggatcctgggaggtcgtcaccagtgccaccagaatctctccggtgcgggatgccttacgtaccagcaggtgacgtaagtacccctcatggctcattctgtggaaaaagcttaccttcgcccgggcaaagtaatctctcactgtctgtaagatcaggcggtaatccgcatccacgatctcacagtccgctacggtcactatatcgtagaagctgcctctcttatgcatgcccagcgccagcggtccgtccttgtactcgtctccgaaggaaaattccatcttattacggtattcataagccttcgggctgcccttgatgccctcaaaagcccaggcttcctcctgcttgtttaacacactgtccagcaggcgttttacctgttcctccttgactttcagctgttcttcgtaaggaagagacagataggtacatccgccgcacaacccaaaaagggaacacgtccggccggtttccagaggtgacttttccgtcacctccaaaagccttccttccgccttccctttgcgcactttattcaccgagaacttgactttctgtccgggcaggctgttcttgactacagcagtctcatctcccacacagacgatccctttgttgggaaaatcgacccttacaacagatccttcatatacctgtccttttttcatgggttagttctctccttcatcctcgaagaagtcgtcatcatcctcttccacgtcatctgcttcatcttcgaagtcatcctcgaagtcttccagataatcctgtgcaaagaagaaacggtatacagcataagccactgctgcaacagctactacggcgccgatgatggccagtacccataacaggatattgcgttccttcttctcttctacttccttgcccaacagcttgttaagcttcttcagttcgctgactttcagctcatttaatttgtcaagatctaccagattttcaattctgttcatattatttacctgcctttcctgcatctattcgtatttatggatgcaaagcattttgttttcattcctttatatgataccatattttcatcaaaaatactatagaaaaaccatatttgaggaaatacatttcttattcttatattcttataatttcttacaactgctttagttttgcaaaagacgcatacataatcttctgccctgcctggtcgaattccacggtcaccttatagtctctgggttctctcacgatatttagtaccgtgccctcgccgtatttgatatggcgcactctgtcacctacctcgtagtccagtttctccggtgccttgaactccgtgcccttctgcagtccggccaactggttcagtccgctgatgcccttggaaatataaggtttatccgcctttgccgtaacacggggttttaaggtcgccttgggtcttggatcaaagccggtattaccgaagccgccaaaaccactatccgagccggatccagaccggggagatgcaattgcctccagtcccatggcacgaagagctgcttcattggctcttctcgcctgaaaatcttccagatcatcgtcccggtatcttctgctaggcggcagggtattatccaataattccttcggaatctccctcacaaaacggctcaccggattgtactgggtctccccacgcagcattctgctctttgcacatgtcagcgtcagatcctccttggctctggtgattcccacataagccagtcttctctcttcctcgatctccaacgggtcatcggaagcaatggtcataaagctggggaataatccatcttccatgccggcgagatacaccaccgggaattccaggcctttggcactgtgcagcgtcatgagcagcacccggttgtcaccgttctccacattgtcaatgtctgccaccagcatgatttcttccagaaattccgacagagaaggctcgtcgtgagtctcctcatatgcggccgccttggtgatcaattcatctacgttccccagacgatcctcagcggattcctcatcctgatcccgcagatattctgcataatcgatccgttccagcagagatttgatcagatccggcaatgtatacgaagacaatccgctgcgaagtacctcgatcagattcacaaatccacggatcttggtctccgctcttcccaatcccttgatctgatctgcttcacacaatgcatcaaataaagtaatatccttcatctgtgcatagtctgctaccttttccaaggatgccgcaccgatgcttcttttcggcacattaataattctgcgcagagccacttcatccctgccgttatcaatagttttcagatatgccagaatatcgcggatctcctgtctggcatagaagttcactccacctaccacatgataaggaatgccctccactaccatacgttcttccagaagtcgcgactgggcattggtacggtacagcaccgcacagtccgcataggcaatgccgtcatttttcaccttgtcggcaatatcgtccgcaatgtattccgcctcttcataggcattgtcaaactgcctgaaatgtacccggctgcctgctcctttttccgtccagagggctttttccttacggcctctgttgttacggatcaccgcgttggccgcatccaggatgttctgggtggatcggtagttctgttccagcttaatcacctttgcatcgggatataccttctcgtagtccagaatattacggatattggcaccgcggaatttgtagatggactggtcatcatcacctaccacacacagattgcgataaccgtccgccaacagacggatcagttcgaactgcgctgtattggtatcctggtactcatccaccatgatatatttgaaacgttcctgataattataaagtacttccgggcagcttttgaacagttccacagtctttacaataatatcatcaaaatccagtgcattactctttttcaaggtctcctgatactctctgtagaccttggcgatcacggatttcttgtaatctcccacggattttacttcaaattcccgcacatccaccagctcgtccttggtggaggaaatttccgataacagcgtccgctctttgtacatcttcgtgtcgatgttcaggcgcttgcagacctgctttatcacagatttctggtcatccgtatcataaatggtaaaattcgaatcatagcccaaccggtcaatatgtcttctgaggatcctcatgcaagtggcatggaatgtcgctacccatacctgatccgcaccgaaacctgcgatctgatccacacgctcccgcatctcctgggctgctttgttggtaaaagtgatggccagaatgttccatggatttactcccatctcatcgatcagataagccactctgtgggtcaggacacgggtcttgccgcttcctgcgcccgccaacagaaggagcggtccttccgtatgaagcaccgcttctttttgttctttatttaaggtatcataaatactcat

SEQ ID NO: 484 - DNA, 8519 bp, unidentified
  source 1..8519: mol_type = unassigned DNA
atggcagcaagaatttcaaaggcggatttcgatgaaaaagtattaaaaagcaagcttccggtaattgttgatttttactcggattcatgtgtggcctgcaagaagctggcaccggttctcggagatatcgaggatgattatgaggataagcttcacgtatacaaggtcaacacaaactttgacggagagctcgctgatgagtatgaggtgactgcgaatccgacactgcttttcgtaaaagacgcagaggtcttagacagaaaggtcggcgcacaaaagcctgccgatttgaaagcatgggttgaagaattattatagtctttagattattatataaagcagtctgatacaggataataacacatacagataccacaatctgtgacacaggaggaaataaaatgactatcacagtagcaggagagaagaaagaatataaggatggacttacattaccggagcttatcgagcttgagaatgtagatatgcctgagtatgtaacagtttcaataaatgaggaatttgttgccacagaggataagccaaagacagtgcttaaggatggcgacaatgtagagttcctttacttcatgggaggtggatgctaatggcaatgactgatgagcagatcgagcgctattcacgccacattatccttaatgaggtgggcgttaaaggtcagaagaaattattaaagggcaaggtgcttattatcggtgccggcggactcggagctccggcagccatgtatcttgcagcggcaggagttggcacaatcggtattgtggatgcggatgaggtagatttatccaacctgcagagacagattatccacggaacagccgatgtgggcaaagccaaggtaaagtcagcaaaagagacaatgaacgccatgaacccggatgttcaggtcaatacataccgtatgtttgtagatgcgtcaaacatcagagagcttatcagggaatatgatttcatcatcgatggaactgacaatttcccggcaaagttcttaatcaacgatgcatgtgtgcttgagaaaaagccgttttcacatgcaggaatcatccgtttcaagggtcagctcatgacatatgtgccgggagagggaccttgctacagatgtgtattcaagaatccgccaccaaaggatgcagtgcctacatgtaagcaggcaggcgttatcggagctatgggcggagtaatcggttcgcttcaggctatggaggctatcaagtatttaatcggtgttggagagctgctcacaggatatctgcttacatatgatgcactcaccatggagttccacaagattaagcttccaaaggatacacacaactgtgcagtctgtggcgaccatccgactattctcgagccaatcgactacgagcaggaggtctgcgaggagacagcgggcagatttgatgcacctcgtacacaggaataaaaagacagtaaggaaaggaacgatatgagtatcataagaatgaaatatccgtttctggatgaaatagcaaaatatgctaaagagcatctgccggaggaggcgtgcggtctgatagcaggcagtgaggacgaaaacggtcgtctcatcacaaaggtatattacctgacgaatacagaccatgccgaggaccatttcacaatggatccaagggagcagctggcagccataaaggacatgagagcaaacggccttaagccgcttggcaactggcattcacacccgtctagcccttcaaggccatcggatgaggatataaagcttgcatacgatccaaatgcgagctacatgataatgtcgcttatggcagaaaatcctgtaatcaactcgtttcatatcgagggtggacaggtcacgaaagaggatttacgaatatattctgatgaatattacttctaaatcatatgttaatgttttgagtcgcagcgaaagctgcaaagaaaagtcagcttcatcgaagatggcttttcttttttagagaaagatgttattatagcatgtatatttaataaaacgaaagagcgttcgaaaatgaaattaaaaacgaaggaacttacaacatgtgcactttttgcggcacttatagcagttggagcatttatcaagattgatattccgcttcctatgtacaccatgcattttacattacagtggttctttgtgctgatggcgggatttctgctcggggcaaagctggcatcgcttagcgtgatagtgtatttgtgcatcggactggtgggagtgcctgtatttgcggcaggcggtggtcctacatacattttaagaccgggctttgggttcctcttaggctttgtgcttgccgcatttttaatcggagcgattacagaaaagtttaaaaagaccaatgcgtttacactcattcttccggcaacggtcggactggtggcatattatacagttggagcaatatacttttactgcatgaagaatttctatgcggcaacacctgtcagctggggcatagtaatagtagattactgtctgataactgttgcaccggactttatattatgcgtatcggcagcagtgttttctgctaagcttcgtcctgtttttgaaggaatactcaatggatacagtgtgaagcataaggcaaaaaataaagcataaagcgtataataaagtataaaataaggcatgaaataatatatgaaataaagtatggatatggtattacagggagataaaaatggcgtattttccgatgtttgtggatatgacggaaagagagtgtctgatcgtcggcggtggaaatgtggcataccgcaaggtgatcgtaatgctggattttggcgcgaatgtcacggttgtggcagaggatatatgtgatgagctgagaaagcttacaattgatgatatagcaagcgaggataaaacgggctcatatacggcaaatatagaaaacaatcagacggacccggatgcagcagatagaattacgttcataaaaagaaggtttgaacgaaaagactgtgatggcatggaaatggttatcgctgccactgatgacaatgctttaaatcatgagattgcagagtattgcaaagctaaggacatcatggtaaatgcggtcgatcaaaaggctgattgcagctttatttttccgtcatacataaaggaaaagaatcttgttgcggcattttcgagcggaggaaacagccctgtgctgactcagtatctgaaaggcaaagagcaggagattcttactccgtttcttggtgagctgaacgaatacatgggacagatccgcgaaaaagtaatagcgcaatatgacactcaagccgagagaaagcgtgtatttaaggaaatattgtgtgcagctattgataatggaaggattcctgaaatatagtttaaagtatggtattacagattttaagttgttgttcatttataaatgataaatggaaaatggcatgatccgtaggagagtaaaatgaggtatttaataggaacgagaggctcaaagcttgctcttgttcagactgattacgtgatagataagttaaaaagagcatatccggatgatgattttaaggctgttatcataaagacaacaggcgatttagagcagaaaaaggcactcgataagattggctcaaagggtatcttcgtaaaggagatagaggacgagcttttatcgggaaagattcatatggcagtccattccatgaaggatatgcctgatgaaccggcagcagggcttacatttgcaaaggcatggaagcgtgaagatccaagggatgttttggtactaaaaaatgccgcttcactggatgagcttcctcatggtgccgtgataggaaccggaagcaagcgcagaaagtatcagcttttaaagctgcgtcctgaccttaaggtggttggcatacgcggaaatatcgatacaaggcttcgtaagctatatgatggtgaaattatatatgaagagattgccgataatactgtaaataacaatgagatagctaacgaaaaacagaataagtataacgaatacaggctggatggaatcgtacttgcagcggcgggaataaagcgtatcggaagagattctgagatcacacagtacttttcagaggatgatatgattccggccccggcacagggcacactggcgcttgagctacgtgctgacaatgctaagctgatggcaaagcttgatgctttgtcagatgagaaaaccaatctgtgcgcaggcattgagagagaatttttaaagcgaatcggtggaaactgtcatctgcctgtggctgcatactgtgatattgtaagtgaaaaagaccgcggtaatgacagcaacaaaaataacaggctaaagcttcttgcgatgtttggctcagaggatggaaaaaagcttgcaaggacagagcaggtatgggatatgacatcagacagaaacaatattgtagagcgtgcggtgcacgatattcggtataaattggaaatcgactaaaaaaaatatcaaggcataatttttaatcataataattcagtagaaaaataattaggaaaatcatgagagaaaacacaggaaaagtagtattagttggagcaggaccgggagatacgggcctgctcactttaaaaggagaaaaatatataaaacaggcggattgtctggtgtatgacaggctgtcatcaccagagtttctttcaatggcaaaggcaggctgtgagcttatttatgtgggcaaggaaaatcacaagcatgtcatgaagcaggatgccataaacgagcttttgtacgagaaatcaaaatatcatgagcttgtagtccgattaaagggcggagatccgtatgtctttggaagaggcggagaggaagctctctacctggtagatagaaatgtggaggtagaagtggtaccgggtgtcagttcatcggttgcagcgcttgcggctgcagggatacctatcacacacagaggcatagcaaaaggctttcaggtcatcactgcgcacagcagaaaggatgaggaggcagatatagactattcccttcttacagatgagacaatcacctgcgtatttttgatgggacttgcgcatgtaaaaagcattgcagcagggcttatgaaagcaggacgaagagcggatactccggcagcagtgatatcgaacggtacatttgccgcgcaacgcaaatgcataggaacgcttgcggatatcggagaaaagattgaggaagcaaagctgacatcaccggctataatcgttgttggagatgtggtttcactgaatgacaggcttgatttctttgaaaaaagaccactgtttggaagaaaaattacagtaccgtatatcaaaacaaacgaattgatagcaaaattacagcagcttggagcagatgtcacaccggttaagacaggcataataaacccgataataattcctgaatttgccgataaggtaagatcagctgactggattgtttttacaagcaaaaatggtgtaagatcatttttctataatctggagctggcaggggcagacatcaggcttatagcaaatgcaaggttcgcagtggtgggaaaagctacagaaaaagagcttgtaaagcatcacataaatgcagatattattccggcagaacagaccggaaaagaacttgcaggagaattgagttcgtatatgggcgataatgatgaaatcaaagtctgcattttctcggcaaaggaggcttcacctgaccttgaggcaggacttaaagaaatatgtgaattagaaaagattgatgcatatgtaaatgagcaggcatatgagagtattcctgaaagcattggaaacatggtaagtgaagctgtttttacaagcgcatcaaatgtggaaagattttttcatatgctgccggagaatgcatacgtggaaacagcatactcaataggtgaaaaaacaacagcagcattagagcagcacaatgtcagagagatagtacaagctgatgatagcagttatgaagcgctggtagataaaatatcttataaagatgcttttaaagattaagaatttatggtgacaaaagttatataaagttatataataaatgcaaagttatataaggttatataaacttatatacgaaacaaaaagttatataaagttatataaggggaaaacaaaatgcaaaatccatttacattatcattcgggaaaaaaccactgcaatatatatcaagaatctcacagaccaatcagatagtagagacatttaggtcagaaaatcctgcaaaccagctttttatgataaccggggtaaggggatcgggcaaaacggttatgatgaccaatatagtatcagagataaagaaggatgaggaatggctgacagttgagcttaaccctacgagagatatgcttcagagccttgcagctaagatttacagtatgcctcagatgaataaaatatttgtcaatgcaaaactggatttttcagcgtttggactgggcgtttccatagaaaatgcagcaccggttacggatatagaaaatgtgctggaattgatgcttgaaaatataaagaaacataataagcggttactcatttcagttgatgaggttatgaactgtgaatttgtaaaagtatttgtcagttcatttcagatatttctgagacaggattatcctatttttctgcttatgacggggctgtttgaaaatatatatgatctgcagaacgacaaggcacttacatttttgtacagggcgcctaagataatgcttgagccacttagctttacagcagtcaggaaacactatatggatatttttgaactggatcaaagagaggcagacaaaatggcagctcttacaaagggatatccttttgcattccaggtattgggatatctttactgggaaaacagggatgatcacacgatagaagatattttaccggaatatgatcagtgccttgatgagtatgtgtacagtaaaatctggtcggagctgtcagagcttgataaaaaaatattgttggaaatatcagtaagtggtgaagaaaaggtaaaagaaatcagagaaaaactggatatgaattcaggattattctcggtatatagagaccggctcaaaagaaagggggttatagatacctctgagtacggtaaaattactctcacacttccacgatttgaagaatttgtcaaaacgcgccaaatgtaatatactatatccaactgaaacattaacataataaaggagaagcacaatgaaagaatacagtataggtacaaagtgtgtacaggcaggctatgcagccggaaacggagagccgagacagattccgattattcagtcaactacattcaaatatgacacaagcgaggacatgggaaagctttttgaccttgaggcagagggctatttctacagcagactgcagaatccaacctgtgatacggtagcaagaaaaatcgcagctatggagggtggcactgctgccatgctcacatcatcaggacaggcagccaatttctatgccatgttcaacatatgtgagtgcggagaccatatcgtggcatcatcatccatctatggaggcaccttcaacctcatcgcggtaactatggcgaagatgggtattacagctacattcgtatctcctgatgctacagaggaggagctgaatgcagcattcagaccaaacacaaagcttatgtttggtgagactattgccaatcctgcgcttacggtgcttgatatagagctttttgcaaaggtggcacacgagcacggagtaccgcttatagtggacaataccttcccgacacctgtaaactgcagaccaattgagtggggcgcagatattgtcacacactctaccacaaagtacatggacggacacggagccacactcggcggagcaatcgtagacagcggcaaattcgactggatggcacatgcagataaatatccgggactgtgcacacctgacgacagctatcatggcatcacatatgcagagaaattcggcaaggaaggtgcgttcatcaccaaatgtacagcacagcttatgcgcgattttggttctatgcagtcaccacagaatgcatttatgctgaatcttggccttgagtcacttcatgtgcgtatgccaaagcatgtggaaaatggacaggcagtggctgaatttttggaaaatcatccaaaggttgcctatgtaaactactcagggcttccttcaaacaaatactatgagagagcacagaagtatcttccaaacggaggctgcggagtcgtatcatttggcttaaagggcggcagagaggcagcgtctgcatttatgaaggcattaaggcttggcgcaatcgagacacatgtggcagatgcgagaacctgctgcttaaatccggcaacaagcacgcatcgtcagatgaatgatgagcagcttaaggaagcaggagtgccggcagagcttatcagaataagcttaggtcttgaggacaaggtggatttgattgcagatatctcaaacgcactcgacgctataaaataa

SEQ ID NO: 485 - DNA, 13947 bp, unidentified
  source 1..13947: mol_type = unassigned DNA
  misc_difference 5829: note = a, c, g, or t
  misc_difference 5830: note = a, c, g, or t
  misc_difference 5831: note = a, c, g, or t
  misc_difference 5832: note = a, c, g, or t
  misc_difference 5833: note = a, c, g, or t
  misc_difference 5834: note = a, c, g, or t
  misc_difference 5835: note = a, c, g, or t
  misc_difference 5836: note = a, c, g, or t
  misc_difference 5837: note = a, c, g, or t
  misc_difference 5838: note = a, c, g, or t
  misc_difference 5839: note = a, c, g, or t
  misc_difference 5840: note = a, c, g, or t
  misc_difference 5841: note = a, c, g, or t
  misc_difference 5842: note = a, c, g, or t
  misc_difference 5843: note = a, c, g, or t
  misc_difference 5844: note = a, c, g, or t
  misc_difference 5845: note = a, c, g, or t
  misc_difference 5846: note = a, c, g, or t
  misc_difference 5847: note = a, c, g, or t
  misc_difference 5848: note = a, c, g, or t
  misc_difference 5849: note = a, c, g, or t
  misc_difference 5850: note = a, c, g, or t
  misc_difference 5851: note = a, c, g, or t
  misc_difference 5852: note = a, c, g, or t
tcatttttcatccacaacctggaagatgtagaatttcagataatagctctcctgcgcctcccacagtattgggtggtcaggtgactgtgtcctgaactcgacctgacggagtcttttatgtacagctttagcggcctccttaatagtcttggtaagaagctcctgtgtcatgaagtgtgagcatgaacagcttgcaaggtagccaccgtctttgacaagtttaagtcccttcatattgatttccctgtagcccttaattgcgttctttgtagcttccctcgatttggtaaatgccggcgggtcaagtattacaacgtcatatttctcacctgcttcattaagctttggcagctcgtccaatacatttgcacatttaaaatgtactgtatcctcaagtccgttaagctttgcattggctctcgcctgttcaacagcatattcagatatatcaagtcctgtaacttccctagcacctgcaattcctgcatttaatgcaaatgtacccatatgggtaaaacagtctaataccctcttgtccttgcaaagcttctgcattgcaagtctgttgtacttctgatcaagaaagaacccggttttctgtccattcacaacatctatcatgtagtggacaccattctcaactatctcaacattagtgtcaaattcatcaccaataaagccctttactctctccattccttcaagagtacggactttggcatcgcttctttcatatactccacggatatcaatgcctttttcatgaaggatttccttcactttttcgacaataagcgacttaaatctgtcaatgcctaaagcaagcgattccacaacaagcacatctgagtacttatctataacaagccccggcagaaaatctgcctccccaaatataagacggcaggcaaaggtatctactgtgtcaaatctgtattcaaccgcagcccttactctctcctcaataaatgcctcatcaacaacatcagtgtgtcttgcgagcattcttactgtaatcttggattttctgttaataaatccgattcccatgaaataatcatcaaaatcaagcacctcaacaagatgtccgtcaattattccgtcagacatccattcaatttcgttatcatatacccaggcaccgcctgcctttaaggttcttccttcaccttttcttaatcgtatctttccgcatacgctgaataaatcttccattctgttccttcctgccagataattctgacatttatcttaattcttcataatatattaatccgttgacggattcccaagaaaataaaacatacatactcctgcaaccgtaataagaagcgacacgagcttaatccacgaaaatgctgtcttctcacttccaaataatccgaaaattccaagcagatatgatactattatctgtgcaactacaatcgtaacctccgctttagcaattccaagaccacttatactttttataactgtaaatgttataaatgcacctatcacacctccaagaagtgtaatcttgttgtcaaccttaaacagcttcatgatttcaggtcttccatcaattacccacataatcgcacaagtcgccagtgctgtcaactgcacaaacattgccgtaacccacacactgcttgcttttgtaacatttgtattaaacgcaccctgtaaactcataagtgtgcctgatattattgcaataaaaaaccctgccattaactaacctcctcattaatctgcataggataattattagttaataacaggatatttattcataatgttatttcgtactctgcgtactgttttcattattatttttagttgttttttctattgttgttgcaaatgtactgtaagctgtatcaacatttccaccatcatatacctgatgaagcataatctcatatctcatatacacttctcctactccgatatatttagcttttacaacagagtcagaataaatctggtgtaacttctggtagctttctgctctcttaacctttaaatccgcccttgcacagcttttcttagccatgtttccaagataatctgcataatcataagaaattgctcttgcaacagccttggatgcatctacattcttagtgtacggattaactactgccatcgtagtaacagacattgccttagaatcaaggtcatctcccattgaaggatactcacatattccataatctacatctgtaacattaatctctgcaagactgtctgcatctagcaccgtatagagcatatttccagtagaaaacaaatccgcacattctttaagacttactgtatttctgtcaataccaaatgcatcttttaactgagcgtacttagtaagaaccttcttaatcttttcctcattaagagatacttcagccctgttctctgcattaactccgcctatattaatataggctcctgctgctgcataattaaggaacattgaatcaggatcccattcaaacaccattgaaacatcctgattctcatctgtaatctgataattatcacttatattacgaatctggtctatagtatcaactgcttctgcatatttcttattatatacaagaaatgaagtgttgaacgacaccgggtaaccatataacttaccaccatacgaacatgcagtcattgcagccttaccatacacattctcattatagacttcaggatacatatcattctcagaggtaagacctgaaagataagccttctccatctcttcagatgtcagaaaatatatatcacatgcattgttattccttaccgattcgtcatatatataattaatatatgaatccgcctcaatatatactggcttaacagtcaccagttcattagatttcttaaactgtctggcaacgaattcaagataagactcatatgcgctgtcattataccagacattaactgtaataggtccactaagattaagcttcttcgcagcctgtgtcctgtcatctttattaccacagcctgcaaagactgtcagcatggtaacaatcagcatcatactgataaatcttcttaatttcataaagtaaactcctgattctagaaggatttcttaagcttagctatgcattcatctacatctgccttagtgattacaagtggtggaacaaatcttataacattagttcctgctgagaacagaataagtccgttatcaagtgctttggcaattacgtccttaggattaactgataactcaagtccctgcataagacccattcctcgtctctcgacaacaacatctattgtctcaacaagctcatcaagcttttcttcaaagtaagcagatacttccttgacattatctaatacatgctgcttctcaaaaagttcgaacaccttggttgctgctgcacatgcaagtggattaccaccgtatgttgttccatggtctcctggaactaatgccttcgcaacttcctctgtcgctgcaaatgcacctacaggaactccacagccaagagccttggcaactgtaaggatatcaggcttaacgccatactgctggaatgcaaacatacttcctgttcttcccattccgcactgaatctcatcaagtataagaaggattcccttctcatcgcataactttcttacaccttcaataaattctttagtagcaggataaattcctccttcaccctgtactgtctcaaatattatagcacaagttttgtcattaacaagttcctttacactgtcaaggtcgttatactgtgcaaacttaattcccggtatcataggtccgaatgcttcctgataatgcttattaccagttacagcaagtgctcccatacttcttccatggaatgaatgctgcattgcaataatctctgcatcagcctttccgttcttgacataataatatttctttgcgagcttgactgcaccttcaatagcctctgttccactgttagtaaagaatactctgtccattcctgaagcctttgtaagtgctgttgcagcctctacagccggttcattgtagaaataattagatgtgtgtataagcttatcaatctgtgcctttaatgcatcattatattctttattgttataaccaagtgcaaatactgctatacctgctccaaaatcaagatattctttaccatctgtatcgtaaagtcttactccgtcacccttatcaagtactatctggtaacggttgtatgtatgaatcagcttctcttctgctgtttctataatctgctgtgtattcatgattactctcactttcctattcttatgagcacacattttcacatgagccaatataatattataacctcaaagcttacggttcgcaattatttatctgagtcaaagaatttttctgcatcatctgaaagaatagctgtaccaacacccttgttagtaaatatttcaagaagaaggcagtgtggaattcttccatcaagaatatgtactcttgatacaccatgctcaatagcatctatacagttattaagcttaggaagcataccgccgccgattgttccgctctctaaaagagttctcgcctctgaagtagaaagctcagatataagtgaatccttatcgtcaaaattcttatatacaccttcgatatctgttaagaatgcaagcttctcagcattgacagctcttgcaattgcacatgctgcgtcatctgcattaatattgtatgcatgaaagtcatcatcatatccgatagggcatattactgggaggaaatcgtccttaagcaaggattcaataagtgttgtgtcaacatctgtcacttcaccaacatatcctatatcctcacccttagaatacttcttctcaacctttaacatgccgccatccttaccactgataccgcatgccttgacgccaagctgctcaatcattgaaacaagactcttattaaccttattaagaaccatctcggcaatctccattgttggctcgtctgtaactcttaaaccattcttgaattcaggtgtcatgcctgacttttcaacccatttgctgatttccttgccaccgccgtgaacgatgattggcttaaaaccaacaagtttaagaagaactacgtcctgaataacttttctcttaagttcttcatctaccatggcacttccgccgtacttaactacaattatctttctgttaaatttctggatataaggaagtgcctcaacaagcacctgtgccttcataagttcctctgtcatatcttttgcgctcataataatctccatttcatatttattcagatatctatttgctttaaaatgctgtgtcagattagcttctgtaatcagcatttatcttgacataatcaaatgtaaggtcacagccccatgctgtagcgcttgcatccccctgcttaacatccgcaatagcaattacaggattctgtgaaagtatttccgttgctttctcctcgctgtaatctgtagcagttccatctttaacaatctgaagctcacctgcttcactcttaaagaatatgtcaaccttttcagggtcaaagtcagcaccagaatatcccattgcacagagaattcttccccaattggcgtcatgtccgaatattgctgccttggtaagacttgaagtaacaattgacttagcaagtgtcttggcttctgccttagttgttgcaccctttacctgaacctcgaaaagacatgtgcagccttcgccgtcacctgcaatcatcttggaaagctctgtaaatacatagcttaagccttcatagaaagcattataatcagcaccctcttctgtaatcttcttattgccagccattccattagcaagaannnnnnnnnnnnnnnnnnnnnnnntagcagagcattgttgccatgttaggatgaatcattcctgcgcccttgcacataccaccgattgttaccttagtacctgcaacttctacttctacagcaacctgcttgcttcttgtatctgtagtcataattgcctctgctgcctgtgttcctgcttctaatgaatcatcaagcattggagcaagcttttcaattcctgcacatattctgtcaacaggaagctgcattccgataacacctgttgaaccgataagtactgcattctccggtacattaagaacctttgcaactgcctttgcttcttctgcacatgcgttatctccttcaacgcctgtacatgcgttggcaacaccgctgtttacaactacagcctgtgcaaagtcttcattatatacaatgtttctgtcccatttaacaggagctgcaaatactttgttagttgtaaatgttcctgctgtaacacatggcttctcactgtatacaagtgccatatctttctttccgttcttatatttaatctgtgcttcacatccggcagccttgaatcctttagctgctgtaacaccgcctttaattatattcataacatcctcctattgtaccatcacatatactctgtcattgtgcatatttcgtcgtgtaaattctgaatttacgctacatttattatggaaacattggtgcaagctgtaatccctcattctctggaagtccgaagagaaggttcatattctgtactgcctgacctgctgcacccttaacaagattatctaacgcacccatcattataagtctgttagttcttggctcaatcttaaatcctatatcaacaaagttgcttccctcaacccagcgtgtttcagggcatacatctttaggaagtactcttacgaaatattccttatcatagtacttgtcatatgctgccttaacatcttcatatgtaacatctttggcaaggttggcgtatgctgttacaagaattcctctgttcattggaaccaaatgtggtgtgaagataagctttaaatcatctcttccacatgcataacctaactgttcctcaatctcaggtgtatgtctgtgagttcctacgccatatgccttcatgctttcattaacttcgcagaaaagattggcaaccttagcgccacgtcctgcacctgaagttccactcttagcatcaattataattgtatccggattgattattccttccttaaccattgggtaaagtgtaagaattgatgttgttgtataacagcccgggttagcaatgattcttgtgtctttgcttaccttatctctgttaatctcacataagccataaacagcttcatcaatatactgtggtgctttatgctcaagcttataccactgctcatatacattaacatttttaagtctgaaatctgcactcaaatcaataatcttagtctttgaaagtatctcatcattaacaagtgacgcacataagccctgtggtgttgctgtaaatataacatcaacctcgttagcaagctgctccatattgtcgtccatacattttgcatctacaagcttaaacatgtttctatatacatctgaataattctgatctatgtaacttctcgaaccgagccatacaatctctgcatccttatgtcctaataataatctgacaagctcgttacctgcgtaacctgtcgcaccgataatgcctactttaatcataactcctccttgttttgcgaagcaaaatgcatatattcaacatttatgcataaaataacgcaaaatgtaaattgataacctacattatagcaactttttttcttatgtaaaggatattttaaagaaaattcatatttatacatttttgttgcatattaatgtataatatgcataatttgttgttgcatttttaaataaagtagtttattataatctgcaggtgcatagcatatgtgttttactatgtaaacttaataatatacggaggaatatataatgaaagaaaaagttattcttgcttattctggcggacttgacacaactgccatcatcccttggttaaaggaaacatacaactatgatgttgtctgcgtatgtgcagactgtggtcaagaggaattggacggacttgagcagagagctctctcatgtggtgctgccaagttatatatagaagatatcactgatgaattctgcgacaactacatcgttccatgtgttcaggcacacgctgtttatgaaaataaatatttacttggtacttcaatggcaagacctcttattgctaagagacttgttgagattgcccgtaaggaaggtgctgttgctatctgccacggtgctactggtaagggtaatgaccagatcagattcgagcttacaatcaaggctttagctccagatatcaagattatcgctccttggagagattctaactggaagcttcagtctcgtgaggatgagattgaatactgcagacagcatggtattcatcttccattcagcacagactgcagctacagccgtgaccgtaacatctggcatatcagccatgaaggtcttgagcttgaagatccagctaatgagcctaactacaagcatttattagttcttggatgcactcctgaggaagctccggatgaaccagaatatgttactatgacatttgaaaaaggtgttccaaagtcagttaatggcaaggctatgaaggtttctgatattatcagagagcttaacagacttggtgccaagcatggtatcggtatcattgatatcgttgagaaccgtgttgttggtatgaagtcccgtggtgtatatgagactcctggtggaacaattctttacgaagctcatcagcagcttgaggaattagttctcgacagagatacaacaacattcaagatggatgttggaaacaagtttgcacaggttgtttacgaaggaaagtgggagacacctcttcgtgaagcacttcaggcattcgttgagaagactcaggaatatgtaacaggtgaagttaagttcagactttacaagggtaacatcatcaaggctggaacaacatctccatattcactttacaatgagtcaattgcatcattcaagacaggtgatatgtatgaccatcatgacgctgacggattcatcaacctctttggtctttcacttaaggtaagagctatgaagaagcttgagaatgagaagaagaacaataagtaattaaagaatataaaaaaacagcatccccggcatggttaataaccatgccggggatgttgcttatttattcttaattatattctcttcttttggacttcaacttgtctttccactgctctaacgtccaattccgcgtgatggcaagcgactggattattttccaattacgacacttacataagccaatacaatgctaatactatcaagtagaaaataacaaatacaaaaaacacaatactcagaaccagataaatagtcggttcatttcccatcactgcattcttgggatttattttactaacatatatcgtataaacctcccctcttgtatgaagcggtgaaaatatattcatacttacccagccaacataattataccctttatcgtcacggataaggaactcagaaaagtaatgattgctattaccatatgcgataccttcagttttatagaattgagtttttatgtataaatatctagccaaaaatatcatatccagcataatataaataattatatattctccatgcattattgcatcccccttaatgaatcacatctaatataaataattgttctcatttcctacaccacatatttcatgttattcgacagagttaaatgcgatgtgttcacatgctttgtcatgtttactcttttagtatatattaaatttcaccatttgtaaaatacctgttcgttgcatggagttcaatttcttgaaattcaaaacatgaattatatgaattaacattaatccattgtaacttcctatcaattcataaaaaatccaccacttatatgtaaatttcacagtttttcttattcaatcttatatagaaaaccattttttgactgaatattcctatagtgctactgatttttctgactttataggttaatttattaactatcattatagtctcatgtgttttcgacctataagactttcaaatattcgactacctataggtatcatgttttccagattaattatatatcatgataatctggctgattggactttttctctgctttctcatatgctaatgtccaataactcattgactacaaggcggattggacactacaagcagcttattcagcaaaaagtccaatctttccagatttcacaacaattctggaccttttacctcattctcttgcttgtaaggtccaatcctccacactttctcactcaatttggacttccacatgcctcttcaccactccagcgtccaatccgccaccacagctccaccgcatattacactccacctgccaatccaccgcacaaaagtcttccgtgagaatgaagtcaggcgactatacaactcgttttcaaaccgttgcgaagacgccggcacttaataagctgggacagttggcttaacgccaacgaatcccagcgaacttagtaccgctgcgtcgtagaacgagcgcaagcgtgtttgaaaacgagttgtatagccgcctgacttccatttccggaaggcatcaccccttaaactttcctttatcaatctccttctcttccactttcctattcacatatgtccgaagcagcgcataacacactgagctgattggaataaatgtaagcatccccattataccaaacagattgccaccgattgtaacagcaacaagcacccacattcccggcagtccaactgaacttccgacaacatgaggatatataagatttccttcaatctgctgtaatataaggaatactcccacgaatataagtgcctttaacgggcttgtcatcattataagaatcacaccgactatacatccgataaatgcaccaacaatcggaataagtgcagtaaccgcaataataattcctataagaagtgcataaggcattctcaatatagacaatgtaataacaaacatcgttccaagaatacatgcttcaagacactgtcctgacaggaaattagagaatgtagtgttggtaagtcttaacacttcaataattttatctgccctgttctcagacatgcacacatacataagcttcttgcattgcgctgtaagcctctctttctgaaacagcacatacacagaaaagacaaatccaataaagaaattagtgactcctgagaaaaatccgcttattgcaccaattcctccattgataattcctttagttcctattgaaaggaaattcataacatttgaaagaacagaatcccagttgattgatatgctgcttaacttttcctcatactcaggatatgcagacagcttgacctgcagccagttgataagattattaaccgctgtcggcacctgtcttataaggtcagctattgtgtttaccagttcaggcacaaccacaaaaagtacacctgcaataatagccagtatcaaaatcagtgtaagcatataagcaagcactcttataagtctgggatgcttcttcttacaacgcttgtcaaacagcctgttaagtcctttttcaattgctttcataggtacattgaatacaaatgcgatgactgcgccaattataaatggcattacaagtcctgcaagatatgatatagaatcaagaattccagtcacattgttaagggcaagatatattacaattagcactgcaccaatcgtaattcccttaacaacctgactgtctttaaaatgtcctttgttcatacaacccctccactctttaaagttacttctaatatactatacagaagtccgggattcaaacatattatataaatttaagaattgtaaaatgttagttatactgtgcatcaaccatactcatcatcattcgcatattgaatgctcccataaattttactgatggaagatatacaaaatgcttcttctggattacacagtcatcctcatattcatcatcatacacttcaagtctcataacttcattaacaaactgtcccttacccggttcaacattgaatgcaccctcaataaatggtgcataacagtctctgtcaccactctggtcaggatcatatgcaataaatgtatgaatcatactttcatatttagtaataaacagtccattatctgcaccgctttcctttagtgcatttctgtaattgtccatctcttcttcatacactgctgactgtttgttaataatctcttctaactcacccgcagtcataggaatattttctgcaaagaaaaatgcgagtggctggatgcttccatataataaaaagcagctcatatccgaattaagagtctgtgatacctcaagcttatcagtatcccccatatacataagaactgcaaaattgcccttcgcagtaaactccttaagcatattaatagctgcctttaattctgttctcgaaaaatgtctcataatttctaattccttttcatttaaactatcgttgattatatcacctatgactgatattttcacttccaaattttacttttcataatttcatacaatcttcattcagatatatggacttcaatatgccaccacttctcaaaaagaaaggggcacgaaagcttttcactttcgtgcccctttgcacttcgacactaactatagtcccaagtgcgtgaaattgcaacaataaaaatatgcgttttttccttaattcataaggtgattttctaaaaatttctttattcgtaaagtgggtacttatctgtaagtcccttaacaagctccattgccttagcctggttagcatctacatcatcaacaagcatagcaattgcttctgcaacaacatccatatcagcctcattgaagcctcttgttgtaacggctgctgtaccaagtctgataccacttgttacgaatggagaagctgggtcattaggaattgtattcttgttacatgtaatgttagctgcatccaaaagcttctcaacttccttaccagtctttcccttgcttaagaggttaacaagcataaggtggttatctgtaccaccagatacgatatcaaaacctctgttcataagtccgttagcaagtgctgatgcattcttaacaacattttcagcatataccttaaagcttgggtcaagcgcttcctttaagcacactgccttaccagcaataacatgcataagaggtccgccctggattccagggaatacagccttgttaagcttgaacttctctgctgcctctgctgaagcaagaatcatacctcctcttggtccacggagtgtcttatgtgttgttgttgttgtaacatctgcatatggaattgggcttgggtgtgcaccaccggctacaagacctgcaatatgtgccatatctaccataagtaaagcgccaacttcatcacagatttctctgaacttcttgaagtcgattgttcttgcataagcagaagctcctgcaataatcatcttaggcttgcattccttggcaattcttaatacttcatcataatcaataaatccgtctgctgtaacaccataaggaacgatgttaaagtattttccagaaatattaactggtgaaccgtgtgataaatgtccaccacagtcaaggctcatacccataactgtatctccaggattaacaagtgcgaagaatacagctaagttagcctgtgctcctgaatgtggctgtacatttgcatattcacagccaaaaagcttctttgctctttcaattgcaagtgtctcaacaacatcgacatactcacagccgccgtaatatctctttccaggatatccttctgcatacttattagtaagagggcttcccatagcagccataactgccttacttacaaggttctcagaagcgataagctcgatgtggcttctctgtcttccaagttcatcatccatagccttagcaaggtctggatcatagtttaatacttcatcaaatgaatacat

SEQ ID NO: 486 - DNA, 9718 bp, unidentified
  source 1..9718: mol_type = unassigned DNA
atggcaaagaaagttgtattagcaggtgcttgtcgtaccgcaatcggaacaatgggtggtggattaagcacagtaccagctgcagatttaggaagcatcgtaattaaagaagcgttaaagagaactaacgtacctgctgatcaggtagacgaagtattaatgggatgtgttatccaggctggtcttggacagaacgttgctcgtcaggcttctattaatgcaggcttaccaatcgaagtacctgctgtaacaattaacgtagtttgtggttccggtcttaactgtgttaaccttgctgctacaaagattttagcaggtgaggctgatatcgttatcgctggtggtatggaaaacatgtcattagctccattctgcttagacaaagctcgttttggatacagaatgaacaatggcgtattaaaagactgtatggttaacgatgcattaacagatgctttcaatcagtaccatatgggtattacagctgaaaacgttgcagaacagtggcatttaacaagagaagagttagatgagttctccgctaattcacagcagaaagctacagcagctatcgaagctggtaagttcaaagatgagattgttcctgtagaagttaaacttaaaaagaaaacagttgttgtagatacagatgagggaccacgtcctggaacaacagcagaaagtatttctaaattacgtcctgctttcaagaaagatggtatcgtaacagctgccaactcttcaggtattaacgatggtgctgcttgtgttgttgttatgagcgaagaaaaagctaaagaattaggtgtaactccaatggctacatggatagcaggagcattaggcggagttgatccttctatcatgggtgttggaccagttgcttctactaagaaagttcttgcaaaaacaggcatgagcattgatgactttgacttaatcgaagctaacgaagctttcgcagctcagtcattagcagtaggaagagaattaggaatcaacccagagaagttaaatgttaatggtggagctattgctcttggacatccagtaggagcatcaggatgccgtatcctcgttacattattacatgagatgcagaaacgtgatgctaagaaaggtcttgctacactgtgtatcggtggtggtatgggctgctcaacaatcgttgaaagagactaatcacgtatagaatgattacatatatccgggttcagttttcgaatccggttatatcaattacatagtttgtaactatttaattatctagattgaatagttagctaatgtaatctgaaaggagatacatacaatgggatttatcgattatgaagtagatggccaggttggtattatcaccatcaatcgtccaaaggctttaaatgctttaaacagtgaagtattaaaagatttagatgcaactattgatgcagtagatttagacgcaatcagatgtcttatcattactggtgctggagagaaatctttcgtagcaggtgctgatatcggagagatgagtacacttacaaaagcagaaggcgaagctttcggtaaagctggtaatgatgtattcagaaagattgaaacacttccaatccctgttatcgcagcaatcaacggattcgctttaggcggtggctgtgagatttctatgagctgtgacatcagactttgctctgagaatgcagtgtttggacagccagaagttggtcttggaatcacacctggttttggtggaacacagagacttgctcgtatcgtaggacctggaaaagcaaaacagttaatctatactgctcgcaatattaaagcagcagaagcttacagaatcggtctggttaacgaagtttatccactcgaagagttaatgcctcaggctaagaagatggcaaagggtattgcaaagaacgcacctatcgcagttcgtgcatgtaagaaagctatcaacgaaggtttagaagtaggaatggatgaagctatcgtaatcgaagagaagttatttggcagctgcttcgagacagaagaccagaaatacggaatggcattcttccttgacaaaaacaaagaaaaagtaaaagagccatttaaaaactgctaattaatcaattatacatattgtattattaattatcggaatacattacattttataggaggtttcaaacaatgaaagttggagttattggcgcaggtacaatgggatcaggtattgctcaggcattcgcacagacagaaggatacgaagtatatttatgtgatatcaacgatgaatttgctgcaaatggtaaaaagaaaatcgctaaaggatttgaaaagagagtagcaagaggaaaaatggatcaggctaaagctgatgcaatccttgctaagattactactggtacaaaagatatctgtacagatgctgatttagtagtagaagcagctcttgaagttatggaagttaaacagcagacatttaaagaattacaggatatcgttcctgcaacatgtatgtttgcaacaaatacatcttctttatctattacacagattggtgcaggacttgacagaccagttatcggaatgcatttcttcaacccagctccagttatgaaattaattgaagttatcgctggtcttaatacaccagatgaaatggttgaaaagattaaagctatctccgtagaaatcggcaaaacacctgtacaggtagaagaagctgcaggattcgtagttaacagaattttaatcccaatgattaacgaagcagttggcatttatgctgatggtgttgcttctgttgaaggtatcgacacagctatgaagttaggtgctaaccatccaatgggacctctcgctttaggagatttagttggtcttgatatctgccttgcaatcatggaagtattatataatgaaacaggagatcctaagtatcgtccacatccattattaagaaagatggttcgtggtggaaaattaggtcagaagactggtattggattctacgattacagcaaataattaaaaaagtgaatacggccgtggggactatgctctgcgtctccacggcttttaaggtggttctccaccccaataaccaatttattatggaggaatgaaaatggatttcacattaagcaaaaagcatgaaatggctagacagctctttaaagagttcgctgaaaacgaagttaaacctcttgctcaggaggttgacgagacagaacattttccagaagaaaccgttgcaaaaatgcaaaaattaggtttcatgggaattcctgtgccaaaagaatatggcggacagggttgtgatcctttaacatacattatgtgtgttgaagagttatctaaagtttgtggtacaacaggtgttattgtatccgcacatacatcattgtgtgcagatccaattcttacttacggtactgaagaacagaaacagaaatatcttgttccacttgcaaagggtgaaaagttaggtgctttcggtcttacagagccaggtgctggtactgacgctcagggtgttcagacaaaggctgttttagatggtgacgaatgggtattaaacggatctaaatgtttcatcactaacggttcttatgctgattactatattatcatcgctatcacaagtgttgatacagatgcaagaggaagaaagaaaaagaaattctccgcatttatcgtagaaaaaggaactccaggatttacatttggtacaaaagaaaagaaaatgggtatccgtggttcagctacatatgaattgattttccaggattgtcgtattcctaaagaaaatcttcttggacctatgggcaaaggtttcgcaatcgctatgcacacattagatggtggacgtatcggtattgcagctcaggctcttggtatcgcagaaggtgctttagatgctacaattgcttatgttaaagaaagaaaacagtttggcagagcaattgctgcacagcagaatacacagttccagcttgctaatatggctacacaggtagaagctgctaagttacttgtttataaagcagcaatggcaaaagcaacacagagagtatactccgtagaagcagcaaaagctaaattatttgcagcagaaacagctatggatgtaacaactaagtgtgttcagttacttggtggttatggttacatcagagagtacgacgtagaacgtatgatgcgtgacgctaagatcacagaaatctacgaaggaacatcagaagttcagcgtatggttatttctggtaacttattgaaataaggagggaaaatactgtgaaaatcgtagtatgtgttaaacaggtacctgatacaaaaggtggagttaagtttaaaccagacggaactcttgatagagcagctatgcttactatcatgaatccagatgataaggcaggtcttgaagctgcccttagaataaaagatgaaacaggcgcagaagtaacagtagttactatgggtcttccaaaagcagaagaagttctgcgtgaagctatggcaatgggtgctgacaagggtatccttgtaacagaccgtgttttaggtggagctgatacatgggcaacatctacaacaatcgctggagcacttagaaatattgattatgatttaatcatcacaggccgtcaggctatcgatggtgatactgctcaggtaggacctcagattgctgaacacttagatcttcctttaatttcctatgctcaggatatcaaagttgaaggtgacagtgtaatcgttcagagacagtatgacgacagatatcatgttttaaaagctaaaatgccatgtgttatcacagcactttccgaattaaatgagccacgttatatgactccaggcggaatctttgatgcatatgatgcagaaattactacatggggaagaaaagaccttaaagatgttgatgacagcaacttaggtcttgcaggttctccaactcagatcgcaaaagcttctgataaggtacgtaaaggtaaaggtgtcatgatgacagctgaaacagcagaagaaggcgttgagtacatcatggacaaactgttaacaaagcatgttatctaattgtaaaggaaatgtggtgaatagaatgaatttagaacaatataaaggtgtatttatctatgctcagcaggttgacaataagattgatgccattgctttagaattacttggaaaagcaaatgaccttgctgcagatttaggaacagacgtaacagcagttttaatcggttctggcgtaaaaggcttagttgatgaacttgctgaatacggcgcagataaagttatcgtagttgatgaccctgaattaaaagaatacagaacagagccatatacacatgcactggcatctgttatcaacgaatacaaaccggacattcttctggttggagcaacagcaattggtcgtgacttaggacctcgtgtttctgcaagagttgcaacaggtcttacagcagactgtactgttcttgaaattggtgaattcaaagctcgtggagataaagaacctcgtcagggtcagttattaatgactcgtcctgcattcggtggtaacacaatcgctacaatcgcttgtcctaaccatcgtccacagatggctacagttcgtcctggtgttatgcagaagaaagagcctgttgcaggtgcaaaggcagaagttattgagtacaatccaggatttactccaaatgacaaatatgttgagattcttgacattgtaaaatctgttacagaaacagttgatatccaggctgctaagattcttgtatctggcggacgtggagttggctctgctgaaaactttgcattattagacgatttagcagaggcacttggcggaacagtttcctgctcccgtgcagttgtagataacggatggaaaccaaaagatttacaggttggtcagactggtaagacagttcgtcctaatgtttattttgcaatcggtatttccggagctatccagcacgtagctggtatggaagaatctgatatcatcattgctatcaataaagacccagatgcacctatctttgatgtagctgattacggtattgttggcgatgcattaaagattgttcctaagttaacagaggcgatcaaagctcaggttaaataatttcaaatcatatcagactcattagattatgtgagttactgattgaggattgaaacttagattttttgtggaagtctagtatatgcattctcagatgttttgtgtattgacgattcattattaaaagaagcatataggagatttgtgctgaattctataaaatgtatttatgcagggaatctttttgaagattccctgttaaagtgagatagtaggactacagtttataactgtggtcctttttactttcattcagttggcatagcccgctacgccgtcttcattcaggaaaaattctccacaaattttaacgcacatcttgcaaaagcatttttcaaacacgctctagtatagtatccattcagtgtttatgaataattatttgatagttcacaataaaagatgcacgaagtaaattagaaaaactatatccaataatattttagaaattagatagatgctatactagagcgtgtttgaaaaatcattcctacaatctgcacgccccaatttgcggtatattttgccttcattcagttgacgtagcccgctacgccgccctcattcaggtaaaatctcccacaaattttaacgcacatcttgcagaaagcatttttcaaacacgctctagtaaaatacgtcatttttattttatatataataaaaagtaaacataataaagaagtacttatcacaaaataaacataatttgtcaaaaatagtggaaattaattccaaatatgttataatactcttgcagcagttaaccgagatatgagaggaggcatttatggcacaaattattgcttcaacaaaagaaatatctaataagagagagtcactgatagtattgagtaattccttaaagaataagatttcgcttttagaaactttggggaacagtcttaattctatgtgggaaggcgctgcaaaagagaagtatgtaaagcaacttaagacagacatttcaaagatgcggaacttacttaagacaattttggaatttatattgatactagagaagattattgcaatctataataaagcggagaagaagaatgaggcgacagcggtaagctaggagggggatttatggcagatttaattaatgtaactccagagaagttaaaggcgacagcaagttctttccaacaggcaggaaaggacgttaagaaaactacctctgatatgcttcagttagtgaggggaattagtagttccatctggagtggagaggcgagtagtatatatcttggtaagtttaatggattggatgccgatatcgccaagatgtgcaagatgatagaggaagaatcacagcatttgacaacaattgcacaggaataccagttagcagaagaacagaataaacaggttgcggcaacattaaagaataatgtaattgcttagattgtatagacagatgaatagattatgctgtcagttatgattttttgtcacgacaaaagagaaggagatttgattggaaagatatgtaatcagtgtgtagcgcttatagataaagaatttttacgtaattttatcataagcgatgaagaatatcatcaggtgaatatagagggaatacagccgccagatttacttgtagtagaaatcacaggtatagaggatttatgcagagcgaaacgaataagggggattttcccaagaggacgattgctagttgtaagtactaatcagatttcagcagagtactatttaattccggaagtttcaccggatatgcttttactgaaaccatatgtatatgcgaaagcttgtaggattatataccgaagtcttacatggtgttgtaaggataagtgtagaaagaaaaaacaagaagatatattaaagattcggacaggaggggagatttattgttttcattatgaagagattcagtatttagaagcaagagataagaagattatcttgcatgtaaataagtatgagatttctttttatagttccttgcaaaagttggagaagagcctgccagattattttattcgttgccatcgtagttatattgtgaattttatgtttattcaaaaagcagatttgataaatggtgaattttatttgaataaaaagacagttattccaatttctcagaaatataaggccaaattagcaaaaatgttgtaaaaatataaggattcaaggttcgatttaggttgaccgagttatacaacggtggtagaatatactcatgatatttttttaacaagagcagaagttgttaggaggagaagcatgagtttcattaaagaatatgcacagaaacttgttacagcagaagaagcggttaaggtagtaaaatctcatgattgggtagattatggttggacaaccggtactccagttgcattggatgcagcattagcagccagagcagatgaattagaagatgttaagattcgtggtggtatcttattaagagaaccagagattttcaaggtaaataatgtagcagatcattttacatggaattcctggcatatgggtggtttggagagaaaggcaatcagtaaaggatttgcatactattctccattaaaatattcagaacttccacgttattacagagagaatatcaagcatttgaatgttgcgatgttccaggttgctccaatggataaacatggattctttaactttggaccaaatgcatcccatatgatggcagtttgtgaagctgcagatgtaattatcgtagaggttaatgagaatatgcctcgctgtttgggtggatttgaagaaggcattcatgtttctcgcgtagattacatcgtagaaggcgagaatccagctattggtgagttaggagctggcgcaccaccaacagaagtagacaaagccgtagcacagcttatcgtagaagagattccagatggagcatgtttacagcttggtatcggtggaatgcctaatacagtaggttccatgattgctgaatctgatttaaaggacttaggtgtacatacagagatgtacgttgatgcgtttgttgacattgcaaaggcaggaaagattacaggcttaaagaagaatatcgacagaggacgtcaggtatatgcattcggtgcaggtactaagaagatgtatgattatctggatgataacccagaatgtatgagtgcaccagttgattatacgaatagcgctaagacaatagcacagattgataactttatttctatcaataatgcagttgatattgacttatatggtcaggttaatgcagagagtgcaggtataaaacagattagtggtgcaggtggacagcttgatttcgttcagggtgcatacttatctaagggtggtaagagttttatctgttgttcttctacatttacatccaaagatggtgtaaagcatacaagaatcagacctactttagcagaaggatctacagtaacagatactcgtcctaatacacattatgtggtaacagaatttggtaaggtatgccttaaaggtatgtctacatgggaaagagcagaagcattaattaatattgctcatccagatttcagagatgaattaattaaagaagcagaaaagatgcatatttggagaagaagtaacaaataa

SEQ ID NO: 487 - DNA, 10840 bp, unidentified
  source 1..10840: mol_type = unassigned DNA
tcacagcaccgccacggcgaggaaccgcacaacgagcgcggcaagccatgccacaacgcactggtttacgaccataacggtggcccagcggccgcccatctcccgcttgaccgatgccacagcggcgatgcagggagtatagagcaggcagaacaccagcaggggagccgctgccgccgggctgagcgccgcgcccagtgcggcagaggagccatacaggatggtaagggtggagacaacgctctcctttgccataaagccggtgatcagcgccgtggacacccgccagtcgccaaagcccagcggtgcaaacaacggcgcgatgccgctggcgatccaggccaggatgctctcctgcgggtctgcggtcaggctgagctggaagtcaaagttctgcaggaaccagatgatgatggttgccaggaaaatgaccgtaaaggcacgctcgaggaaatcccgggccttttcccagagcagctgggccacatttttcaggccgggcaggcggtagttgggcagctccatgacaaagggcacggcctcgcccttgaacagcgttcccttgagcagaaaggccattccgatgcccacaaggatgcccaggaaatacaggcccaccatgaccagtgcggcgtactccgggaagaaggtcaccgcaaacaggctgtagatcgggagcttggccgagcagctcataaagggcgtgagcaggatggtcattttccggtcccgctccgagggcagcgtgcggcttgccatcacgccggggaccgtgcagccaaagccgatgagcatgggcacgatgctgcggcccgaaagaccgatacgccgcagcagcttgtccatcacaaaggccacgcgggccatatagccggtatcctccagcagggaaaggaagaagaacagggtcacgatgatgggcaggaagctcagcacactgcccacaccggtaaagatgccgtcgatcaccagcgaatgcactgcatcgttgacgttccatgccgtcagggcattgtccacaaggatcgtcaggttctcaatgcccagttccagcaggccttgcagccccgcgccgatcacgccaaaggtcagatagaacaccagcgccataatgcccacgaatgccggaatcgccgtgtactttccggtgaggaagcggtcgatccttgcgctgcgcagctgctccttgctctggtggggctttaccacggtctgattcaccagctgatggataaagtggaaccgcatatctgcaatggcggcggcgcggtccagaccgcgttcctgctccatctgcaggatgatatgttcgatcatctctttttcgttctgatccagcttcagggcctcctcaatgcgggggtcgccttccaccagctttgtggcggcaaagcgcaccgggatccccgccgcccgggcgtggtcctcgatgaggtggatgatgccgtggatgcagcggtgaaccgcaccgccgtggtcatcctcgccgcagaagtccatccggcccgggcgctcctgatactttgccacatggatggcgtgatccaccagctcatccacgccctcgttcttggcggcggaaatggggaccaccgggatgcccagcatcgcttccatctcgttgatgttgatggtgccgccgttgccgcgcacctcatccatcatattcagtgccagcaccatgggggtgtccagctccatcagctgcatcgttaagtacagattgcgctcgatgttggtggcatccacgatgttgatgatgcccgtgggcttttcgccaatgatgaactggcgggtcacgatctcctcgctggaatagggcgacatggagtagatgccgggcaggtcggtgacttcggtatcagggtgctcccggatggcaccgctcttgcggtccaccgtcacgcccggaaagttgcccacatgctggttggagccggtgagctggttgaacagggtcgttttgccgcagttctgatttccggccagcgcaaatgtcagcaccgttccatccggcagcgggtgttcgccctttttggtgtggtagcggccgccctcacccaggcccgggtgctccaccatccggccggccttccgtgccggggccgctgcgggtgcttccgccggggtgatctcgatccgtgccgcatcgtccagccgcagggtcagctcatagccgtggatctgcagctccatggggtcccccatgggcgcgaatttcaccagcgtgaccttctcgccggggatcagccccatatccagaaaatgctggcggagttctcccgttccgcccactgtatcgatcacggcactttcgccgatcttcagttcctttaatgtcatggcagatgcctttccttcgacaaaatgttagtgtatgtgaacagtcttaatataagctaactcaaaggcattgtcaaggcaggaagcggcaaaaattctcgcctgtccccgctgttttttgtggaaatccttctcctgttccggcaggtttccgggcaaaaagaaaacgcacccctgaattttcacgttcaaaggtgcgttttgagaacaattctgtttacttcacggtgtggtagccatcggggttgttcttctgccagttccagctgtcggcacacatctcctcgatgccgtactcagccacccagcccagctcattcttggccttggtgggatcggcatagcactcggcgatatcgccggggcggcggggatcgatcacataggggagcttcttgccgcaggccttctcaaaggcatggatgacatccagcacgctgtagccgtggccggtgcccaggttgcagatgaacaggccgcagttggtctgcagcttcttgatggcgcagacatggccccgggccaagtcaaccacatggatgtaatcgcgcacgccggtgccatcgggggtggggtagtcgttgccaaagacgtgcaccttttccagcttgcccacggccaccttggcgatgtagggcatcaggttgttggggatgccgttggggtcctcgccgatcaggccggacttgtgggcaccgatggggttgaagtaacggagcagggccacattcagggtggggtcagccttgcagacatcggtcaggatgcgctcggtaaaggccttggtggtgccgtaggggttggtggtggcacccacggggaagtcctcggtgatgggcacgctggcggggtcaccgtagacagtggcggaggagctgaacacgaagttgcggcagttgtggcggcgcatcacgtccagaatgaccagcgtacagttgaggttgttatagtagtactcgatgggcttggagacgctctcgcccacagccttataggcggcaaactggatgacagcatcgatatcagggcactcggtgaagatcttctccacgtcctcgtgctttgtcatatcggcctgatagaaccggaagtccttgccggtgatctgcttgacccgatccagcaccacgggggaagcgttgtaatagttatctgccaccacgatgtcaaagccagcgttcagcagttcgatacaggtgtggctgccgatataaccggcaccgccggaaaccaaaattgccataaaagtacctctcttctcgtcaccaaaattgcttgcgcggggcaggcccgccttctgccacaaggatacaacgttttggccgcagaatcaagtaacgagaattttataaggatggatttttgtttccaattatttttccgcgcattgatttacaagcgttttttgtgttttgcacatggagtgatggaaccctttgtgcaaatcagagaaaaaggccctctcattcaaagccatcaggctttgaatgagagggctgcattttacagtttcccgcactgtttgccggtgaagaaccgcagggtggtgttggcacggaacactttcccggcccgcagggcggtagaggggaactccgggtgggaggggctgcaggggaagtgctgggtctccagcgcaaagccgccgtatttctgcatcggcacgccgcccttgccgggggcagggcagtcctgcaggaaattgccggtgtagagctgcacgccgggctgggtggtatagaccttcatgctgatgccggtcttatcgctggaagcccaggcgcacaggctctggctggccccgcggcccctgtcgatgacaaagcagtggtcatagccgccgcccaccatggtggtctgggaaaagccggtgtcgatatcccggccaatgggcttgcccgcccggaaatccatcggcgtgcctgccacgggcaggatattgccggtggggcaggtctcgttgttgccctccagatagcgggacgcatagatgcgcagcttctggcccagcacatcgccgccgccatccagattgaagtaggtgtggttggtcaggttgatgatggtgtcggcatcagaggagacacggtaatccatccgcagggcgttgtcctcggtgaggatataccgcaccgagatcttcagatttcccgggaaaccatcctctccatcggggctttcggcctccagaagcagggtatcgccaaaggtctttacctcatacagcttgcgcgggaaggtgccgtgcaggtggtttttgccgttgttggcttccagctggtaggtcttgccgcccacattgaacacggcattctcgatgcggttggcgtaccggcccacgaacgcgccgcagcaggtactgccggacgattcaaagtccttgacgtagtcggcgtaggtgtcgtggcccagcaccacatccaccggcccgctcttggtgggcacccagatattcttgatgatacagccgtagttcagcacactgaccgccagcccgccggggttcgagatgatgtattcattgatcttttcgccgtttggagtcatgccaaagggcttggagagaaactgtgccatagggctcgcctccttttgtgttttttcaggatagcacactctctgttttatcctttattgttttgattatatcacaattttccccttctgtgttggcattttttaagggaatctatccaatatttcgagagattttttgtaaattctgccccataggcagaaaaaagccccggagggccaggggtaggcgctccggggcttgtatggtcagattagatattactgctgggtatactctttataacccttcaggtcaatcttattctgaatttcttcaggaatctcattgatccatttattaactttcagggttgtagtcttaccagaaacagtttccacaatgtatgccagtttatcgccgttgaagcaataaacaacctgctgtccatcaactacaacagactcagcatacatggtttcaccagttgcttcaatcttatattcaggaataaccttgatgctctttacaatgtctgcagaaggaactgtgactttacctgcactcacaacatctgccggtgcctccatcttccgatattgtccctggcttaaaatatagcatgcgttatctttaataacgatatcatatgctgtgccagtgttaacgaacatcttctcaccatcaacagcaaacttcacagttgcaggagttgctcccgtgtcatatacgacaacttcggaataaacctttccggtcttctgatttgcttccacaatcttctgcagacggtaagaaggtgcgctgtcctcgccgcaagcggtcagcatcagagttgccattgccacagccatgatagctgctgcgattttcttgagcattttcatttgtagaacctccaatgtaaaatgatattttaccacacagaaagcatacccctacaccttctgcattgtgacctcattttacatctacccccccccctgtcaatattttttattgaatcccctcaatttttagagactgtgccaaagctgcggcaaattttttagcagattgacaaaaagcacccctcacatggctgtgaagggtgctttggggaaggtttcttatgcagaacacggttcggtaattgcttcccgcacctgttctaacgaaagttcggtggtcttggcgatcttatccagatcatgctctccgttcttccagagattgagcgcaatgcgctttccctttgccacctcggcatcttctcgttcccgatcaacgatcacctgcattgtcttgcacatagctgccactccttccgtttcttctttaaagtattttactcttgcccttattttggggttttggatatcccgatagtcatcacagcggaaatcctgcatcagcgcgccgacctcatccgttcctcgatatgcgccgttcacatatacaatatgtgcacggtcgtggaacagcttcccggtttcctgaatcgtccgttcaatattgtaaaccggcagaccatctcccaaaacatcatttgccgtaataaatatgatatatgtctcaggcaggtcagaatatttttcgccagaagtcgtcaggcgagaatcaaacatcgcactgttcagccgcgcccgttccggagcggctcccttatcttcctgctgtacttcgatatcatactgcctgcctgcatcatccgttgcataaatgtccagccgtacagaacggccaaacagattgccgatcgtaagctgtgttgcagaccttgcgacggtcaggtcctttcgtttcaggatgatgcgaagcagctcctgtgtgctctctttatctcctgaaaacacctgtgtcataaaggtgtcatccatcagggtgaatttacggatagcattcatgcgttcttcattcttctcatccaactgtacgaaccgcatttccgccatcctttcgtttcagaaaaagagtacttttctacgtttatattttatcatcattttatctatactgcaagtatcaaaaaagcacccctcacatggctgtgaagggtgctttggggaagttttcttactccggctgagcggtgttctgggcgatatactcggcggcatcatcggggatgtcgtcaaggttctcatcgccgatatccacgttcagcggcggcttcttgaagaggatgtcatacatcaggggcacaacgtacagggtcatcagggtggcgtaagtcaggccgaagatgatgacgatggccataccgctcatcagctggctggccatatcaccgctgaacaccagctggagcatggccagaacggtggtcagggtggtcatcaggatggggcgcattcgtgttttgccggtggcgatcagggccgcgcggcgctccatgccgccgatgcgcagctggttggcgtaatccacgaacacgatgccgttgttgacgaccgtgcccatcaggacgatgaagcccatcagggagatcatggtcagctgctggccggtgagcagcaggcccagcaggccgccggtaaaggccagcggaatggtgaacagaacaatgaagggggagagcaggctctggaactgggccaccataacaaggtagacgaagggcagcgccaggaacatccactggcccatctgatccaccaccatgccgttgatctcagagccgccgcccatatagaagctgcagccctcgggcatttcatcggatgcggcaaactcgttcagcttcttttccagcgcacgggtctcggtggtggtattggttccctccaccgcgtccgccgtcacgctgatatagcgggtctggttcttgctggtgatggagtccggggcggagccggtgacccaggtggccatatcgcccagcgtgcaggtgccggtctcggtggtgccgtcggcggccatgacggaggtcgtaaaggtcatatccatcatgttttccttggtcatggggtccagattgttgctgatctggacgttcatggtggagccatcgatggcaacaggggtctgggccgtggtggtggtggtcagcttggcggcgatctgctggtagacctgcgccacggtcaggccgtaggaacggaccttatcccggtcgatctgcaggttgatggtggcatcgccgctgcccagaccgttggtggcattggtaaagccgtccatctcgttgaccatatccaccaccttctcggagagggcagtcatggtatcaatgtcgttgccggagacctggacggtcaggcccatatccagctggctggtcagctcctgcattccgctgatctcaacggtggcggtgcagttctccacgccgttcacagcttcctccagcgcctcgcgggcctgttcgatctgccgggaggagaggctcttgtccagcatcacgttgatctggtaagtgccgtagctgttggcggctttcagcaggtcggtgatggtctggggcagacccagctggccgacatccattccggccacgcggctgtcggtggtaacgcccacctcttccacgttgtccacagccagcagggcatcaatgacattctcagccacagcataggattcttccttggtcagatccttctcggtggagagggtgacgatggcctcgttgctggtgatggtgggcagcatctcaacgcccatggacatcacgcgccagccgcagaacaccagcagcaccactgccgcgcccaacggtgcccagcggtgctggaagcaccattccaggctcttgacgtacttttcctgcaccttatcgaaccacttgagctctttgggcttggagtttttcagcagggtagaggaggccgccggggcaaccgtcagggccacgatgagggaagcagccagacagtagccgatgcacatggacatgggctgcagcaggctcttgatgacaccggaggtgaagataacgggcaggaacacgcagacagaggtgagggtggaagccatgatggccatgcccacctgcttggtgccctgaaccgccgcgcgggcagcgggcacgccgcggctgcgcagacggtagatgttctcgatgacgacgatggagttatccaccagcataccaatgccgagggacaggcccgccagcgtcataatgttcatatccaggccggtgaagtacatgagcaccacggcaaacagcaccgacagcgggatactgatgccgaccaccagcgtgggcttgatatccttgaggaagatggccagcacgatgatggcaagggccgcaccgatgagcatactgctcaggatactgctaacgatgatgctgatgtaattgccctggttggacagcacgaccacatgcaggccatcgtatttctgttccagctccttgaaggcggccttgcagttgccggaaacttcaccggcgctggaggagttgctcttgaagatcttcagcaccacggagcgctcgccattcaggcgggtaaagctgtcctcggcgttgtcaatgatctgcacatcggccacgtcagacaggcggacatcgccaaagccgtccacatggagcagcagggcaccggagatatcctcgatgctgtcgtactcctcgccgaccttcagcagccaggacttgttgctggaatccttgacataaccggcgggcatggagaagttctgggcatagatcagctgtgccagcgtgtcgatatccagcatcttggccacgtcggagttctccatggccttctgcttggcatcctcatactgctgcttggcatctgccagctgctgctcgtaatcgttcagcatctcgcgggcctcggtgaacttgatataggcctgcagctgctgctgggaatagctgcccacgatctgggtgaactgatccatcaggccgggcacgtcgtccatggccttgatggtgctctccagcgtgttataaatgttgctcaggctctgctgcacctgcagatcatcgaccagctccccggccgttgtgccggcggtgtcgccctgcgcgttcaggcgctgctgcagatcctgcaaagcggtggtcagcttatcggtgatatcgcgcagctccgccacgatctcgatcagagaatcgatatcctgcattccggtctcgttgaacttgtccacgacccgctgcaggccgtcccgcacatcgatcagggcctgctggatctcaggctcgttgaccacggcaatgagctggttgacgctctccagaagggcctgtgcctgcttcttgaccagcatgaaggaatcctgcagctcgccggagtactggctgttgatggtatcgctgaccagcttgtcgtaattggccagctgggtctcgtactcctttctgcctgcctcgatctgggcctcggcatcatccagctgggcctttgcatcggccagctgcacgtcaatgacctccagcagcttttcgttgatggcatcgatcttttcctgatcgagctgcacctgcaccatccgggtgaccaggccgttggcggaaatattggaaacgccgccctgacgctcaatataggggaccatggtgtcgttgacgaaatcggccagctcataggaatcgctgccctcgcggctgacggccacggtcataaaggcgttcatgttcagggtatattcaatgatggagggggtcatacaggtgcttggcaggctggcggtggtctgatccaccttgttggacaccttgaccacggcactgttcatgtccgtatcgtcctcaaactccatcagcagcagactgtagttttctgccgaggtggcggtgacgtttttcacgcccgagatggtgcccagcgcgctctccatcacgtcggagacctcgttctccacacgctccgggctggcaccgggatagaccgtgaccaccatcaggtacggtgtgttcacgtttggcagcaggttggtctgcatgttctgcacggacacaaggcccagcatgatgaccatgatgactgcaaccagaacggtgaacggttttttgacgctgaatttttccat

SEQ ID NO: 488 - DNA, 10054 bp, unidentified
  source 1..10054: mol_type = unassigned DNA
atgaaaaacttatttgacatcaaagacaaagtagtggttataaccggtggaacgggagtattggggaaagccatcgcctttcatctggcagaagaaggtgcaaaggttgttgttttaggacgcaaggcagaaacaggggacgccattgccagagaaatcaaggcaaacggtggagaagccatgttcctgacaaccgacgtgacgaaccgtgaactgctggaacagaacctggctgatattctgaaaacctatggacgcatagatgccctgctgaatgcagccggtggaaatatgccgggtgccaccatcgcgcctacgggtacattcttcgatttgaagatagaagaattccaacgggtgctggaattaaacctgaccggtaccgtactgcctacacaagtcttcctcaaaccaatggtggagcagaaggcaggcgctattgtcaacttctccagcatggctgctttccgccccatgacgcgcgtagccggatatgctgccgcaaaagccggtatctccaatttcacagctttcatggctacagaagttgccaaaaagtttggcgaaggtattcgtgtaaatgccatcgcacccggatttttcctcacagagcagaaccgtgccctgctgacgaacccggatggaagctacacggaacgtgggcaagatgtgatccgccaaactcccttcggacgtatgggccgtgcagaagagctttgcggaaccatccaatacctcatcagcgatgcttccagctttgtcaccggtacggtggctgtagtggacggagggttcaacgcattcgcgatgtaaatagtaaattgcaaatcatcaaacaataaataacatgattctttgtgaacaaacctggcgctggtacggtcccaacgacccggtaagcctttgggacatcaaacaagccggggctaccggcattgtaaacgccttgcatcatattccaaacggggaaatatggacagtagaggaaatcaagaaacggaaagaaatgattgaagccgtcggtctgcgctggtctgtagtagaaagtgtacccgtacacgaacatatcaagacccaaaccggagacttccagaagtatatcgacaactataaagagagcttgcgtaacctgggcaaatgcggcattcacattgtcacctacaactttatgcccgtactggactggacacgtaccgacctcgcctacgaactacctgacggcagtcgtgccctccgctttgaacgtgccgccttcatcgccttcgacctcttcctgctacatcgccccggtgcagaagccgaatacactgacgaggaaaagaccaaggcccgtacccgcttcgaacagatgacggaggcagacaaacaactgcttgtacgcaacatgattgccggacttcccggttcagaagaaagcttcaccctggaacagttccagcaggaactggaccgctacaaaggcatcactccggaacgcctgcgtgccaacctgatctatttcctgcaagaaatcactccggtagccgacgaagcaggtgtcatgctcgttatccatccagacgacccaccgtgctccatcctcggcctgccacgcatcatgagctgtgctgccgatttccaggcactgattgacgctgttcccaacaagagcaacggcctttgcctctgcaccggctcactcggtgtaagcagtgccaacgactgtgcagccatcatgcagcagtttgccgaccgcatcaacttcgtccacctgcgcagtacgcaacgcgacgccgaaggcaacttctacgaagccaaccacctggaaggagacgtggacatgtatcacgtgatgaaagccttccttgaactgcagcaacatcgtggcgtctccatcccaatgcgccctgaccatgggcaccagatggtggacgacttgaagaagaaaaccaatcccggctattcctgtatcggccgcctgcgtggactggcagaacttcgtggactggaaatgggtatagccaaatcgctgtacgaataaggcacaagaaatagcaagcataaggaaagaacaggaagccctccgtccgaaacttcaaagtttcggacggagggcttccctttataagttttctgccatcagccgcctcttcttaaggcactgtctgccggcatttatttaccttcttttgcagcaagcactttccatacaacggcactcagcgcagcacccacaaacggagctacaatgaacagccacaactgagagagagcctcgccaccctggaacagtgccggaccgatgctacgggcaggattgacagaagttcccgtaacaggaatacaaacaatgtgcactaataccaacgtaagaccaatggccaatcctgcaagattacccgcccccttctcggaatccgtagaacctaagacaaccagcacaaagataaacgtgaacacagcctctgcaatgaatgcctgcaacatcattccgtcagcaaacccattggaaccggtagccgtaggaccgccatgagcgcccgtagacaccaatgcataaagaatggcagaaccgataaccgccccgataacctgaaacaccatatacatggctgcatctttcccgctcatcctgccggacaacagaacgcccagggtaacggcaggattaatatgacatcccgagattcctccgatagcgtatgccatcgccacaacggacaagccgaaagcaaaagccactcccagcgttccgacacctgcactaaccgcccccgcctcacttccggcaaagacagcactaccacatcccatcaggacaagaaccattgtcccgatcatttctgctaaatacttcttcatgatagtttttattaaacattgatttctgcaaaaataaatataaaagatgaaaatctgcctaaacacggcggtaaaaactcacccattactacaaaacatcactgctttgattctaacatccagcatatctgcatcttctttagccaacccgaagaaactcagaaatataagaaaacatattggcttgtaaagagtacaaagaaagggtgcaacctcacggccacaccctccatctacactatctttgataataacctaaaaggaaactttatttccctacatcatttcaattcaaaaggaaccgttcccttcacatcggctgccgaagctgctatgacagcctcgaacttacccggctcggccacccaagcgtgctgggtgtcatcgaagaagctaagagcctccttatcaatggtaaatgtgacttcctttgtttcgcccggagccagtttcaccttttggaaacctttcagttccttgacgggacgaggcagagaggacttcttgtcactgatgtacagttggacaacttcctgcccttcgcgcgctccggtattctttacagaaaccttcacggtcagcgtaccgtcggcctgcatggtcttgctgtcggctgtgggcttgccatactcgaaagtggtatagctcaaaccgtggccgaaggggaacaacggtttcaccttcttctgcttatcggcccaacggtaacctacaaaaatactttcattgtatttgatgtcgatgatgtccttgctccgcttgccggtatattcacccaggctgtgggccgggcaatcctccaacttcacggggaaggtaaacggaagcttgccactgggattcacatcccccataaggatagcggcgagagcactgccggcttcggaacccagataccagtcctgaacgatagcaggcacttcgttcacccacggcatggcaatggcattgccagaaatgttgacaacaatcagattcttgtttgcctttgccagtgcagagataacagcatcttgtccgtaagacaaacccagaccttcacggtctgaatcctcacagtcctggccgttgcttttgttcaaaccgccgatgaagattacataatcggcatcctgggcttctttcacggcttcggctatcagttcttcgggagtgcggtcatccttcaggttctgtccagtcaccacaccattatactcaccgcttgcatcgcccacgtagccacgagcatacaccacttcagccttgccagccacacgctgcttgataccgtccaacggagaaagctcacgctgcaccttcagcgaagaactgccaccacctacagtcatcatcttgatagcattttcgcccactaccagaatctttttagtctggtccaaatctatcgggagcacattgcctttgttctgcaacagtacgatgccctcctcgccgatgcggcgggcagcctcgtaatgctccggagaaagcatacttccccacggacggtcgggattcatcactgtacggaagataaggcgcagaatgcggcgtaccttgtcgtccagctccttagtaccgaccttgccttcgcgtatgaggttcaggtagggattcgccagataataattgtcgtatgcattgctggcaccatttgaaagtccgttagtccaactgccgaattccatatccagcccattggtaatggcttgccgagtatcgtgcgtgccgccccagtcggaaatgactacgccgtcgaatccccattcgcccttcaatatatcgtttaatgtgtattggttgtggcaaagatgttggcctttgtaaaggttgtaggcacccatgatgctccacgctccaccttcctgcacagccatcttgaaggcaggcagatagatttcataaagggcgcggtcgtccacgatgacattggtggtgtgacggttcacttcgtggttgttcaaggcaaagtgtttcacgcaggcagccacaccattctgctgcacgccccggatatagggcactaccatctttccggccagataagggtcctcacccatatactcaaagttacgtccgttgagcggtgtacggtagatattgacaccggggcccagcaagaccgatttgttgcggtagcgcgcctcttcaccgatactctgtccgtaaaggagagacatttcggggttccaggttgctgccagacaagtcaaggcagggaaagccacacaggagtcattggtgcatccggcttgttcccactcgtcccacaacacatcgggacgtataccgtgagggccgtcatccgtccatacatcgggaatgcccagacggggtacacccgcactgctgaacttgctttgcgcatgagtcaacttcactttctcttccagggtcagacggctcaaagcgtcttccactctttcttcaataggtttgcttgcgtccagatagacgggcttctgctgggctgaaagaggcagcgcgacagcagccagaaccaaaccgaataatacttttttcattgttgtacaatttaagttgttatataatttaagtaagtactcataatcagtccgtactattgacaatccccagcagacaagggaatatgacttatccctacacacataggaactgaaatccttacagccgtatagtgaatatctataacatccggatgttgttgtccaaaacatccccatgttttaccccaaaacacccggatgttttatcccaatacatccccatgttttgccctaaaacatccggatgttttgggttctcagtcctatagtgtgtacagctcagtccctacctctttcatgctaagtcccggcatctcatcctctgggacttgatacgtactgtttgcagcgaggcaatacccgctacttcattcccaatgaccggatataaccctcctgaaccacacaattcttcagtttgcatgcctcgataaagtccatcatcgccttgcgggacatggcctgcgcgggacgtgcctcacggatttccttgtacgtggcacgcggtgcttcggagaaatacacgatgtttgcccagttctccggcggagtgatgccgacgaaagaagaaccgtccatcttcttgtagggccagaaggtatagccgatgttgttctcgcgcatcgtctggcagaaagcggcctgccattcgtccgtattgtggcctatctcacccatgtacatgggcaggttcacactgtcgcggaagttgataatcgtctggatggcagcttgggtaggttcgcctccgtaacggtggcaggtgtacattatcttgtcgtcgaacttggagtccttgaaaggcttgaaattaccgttccattgcgaaccgcccagcaggatgatgtggttgctgtccacctcgcggatggcggctacacctttcttatatacatcttccagcttgccgttgagctcctccatgttctcgaagtaaggggcaatgggctcgttgaagagttcgtaaccgaggatgaccggttcgttcttgtagtggtcggctatccggcgccagatgtcacagtaaagttgctggctgacttcgctgtcgaacagccagggatagccgtagctgtcgtcgatgttgtcgcccgtctgtccgccgggggcgtcgtgcatgtcgaggatgaggtacaagtccgattcgcggcaccactctaccaggctgtccacgcgggcaaagccgtcttggtcggcagtcagccccatatagtcctcgtccgtaaacattttgtaatggaaaggcaggcggatggtgttggcaccctgctccttgatgaagcggatgtcctcgcgcgttacataattgtccttgaatgctttccagaagtcggccgtaaagtccggtcccaccagctggcagaacatctcattgatgaaacgagcggaattggtcttgttgaacttgaacatgtatccttccggattcagccagttacccaggttggtacccatgatgaagagtttggtaccgtcgggctttatcaagtcctgaccctgaatggttacgaatgcatccgaagttacttcttttgtcgcttgtttctcaccgcatcccgcaaggcccaaagacagcaaggcgatggaaatgcttgtcgctaataaatgtttcatggcaataattttggttatggtattagttgcgatattcgcttttacttccccaaagttaggaaagataagaacacctcgtaccggcgaatcgggaataggtggaagaagtaaagaagcacaaacaaacaaacaactaataatcagaaatataagtagaagaagagaaaggcagaaagtggattcaaaaagccggtttgacgtattgtcagcgtatctgcatcagccgtatttcaaagtcctcgcgcgaaatgcgggccttgttcttcactttggcacggtaattatagatggtgtttacggaataacggaggaattctgcaatctgcgaactgtcgtcgatgcccagacgaatcaaggcgaaaatgcggagttccgtatttagcaactcgcctttacggagcacgatgcgttcttcgggctgcagcaagtcattgaatttatcgacaaaatcggggaaaaggtgcaagaaggcagtatcaaagttatcatagagttccttcagtccggtgtccagcacctcacgggaacgcaccatcttcagcagctcttccatctgcccggcagagattttcttgttgaccatccgccggtaggtatccagccggttgatataaacggagcagagattcatgaaacggcccacatactcctccttgatgttgtttgagagttgcagttgctcgttggcatgctccagtttgttccgtgcggcagagagtcgctgcatctgccggtagataaagcccactgccaccaccaacagcacaatcaaagtgctgatgagccagaggtacagccggagccggtcattctgcttctcgcgcatggcctgataagtgaggtctatcagtgaaaggatgccggcagtctggaggctgcggctacgggcgttgtatcggttggtttcgtcccacgagaaacggatgtaacggtaggcatgctccatatccccttcctcataaagaagttccgccaggttccagagtgaggcatggtctgtgatgctcaggcgaatatcggtcagtgccgacaaagccagatagcgcttctcctcctcccggttcccgagccggcggtagagcaatgagcgctgataggtcaccagcgcatattcgggagtattgggcttggcatgtgccagacgcgtatcattgatgctcaaggcttcgtccggatggcctgcagcggcctcccgcgcctctcttcgttccaggtagagggaggatgaaggcagaagtacctgcatcaaagaatcgtcataatgggtagccaaagcctgataatgcttcttgaaagaatcgtccagcgtatagaaactcagttctgtgtaaagtttatgacaggcattgtaatagtccggcagcagatgggagggaagggaagctttgtccgtctgcctcaagagttcggcagcctcctcgtacatacctgccgaagccatcagatgggcaagctccagccttgtttcgagtaccgcatcctgccggccataacgctctgcccaatccagattgacacgaagataatggatggccgaatcgcagatatatgtcttatactccttatagatttccccattccatcgaaaaaaagagatattggcggtatcggtatccagcacttggcgcttcagccgggcaatgcgtccttcacgcacggcgacatagtgccggtgcgcctcgatagcctcatccaaagaggacgtcagcgcagtaaaagagggcgtgccggcagcaaaaaccacactttgccataccacgacggcaagaaaacaaaaagtgaacaatctcctttccatgaccataaagttcatgcaaatatagcaagaaatcctgcaaagcagtagcatcggaaaaaatagtttcctatatttgcgttctaaacccccaaacaaattatctatcatgaaaagcttaacaccccaacggattgccgcggtagacgtattccgcgcactcaccatgttcctcatgctctttgtcaacgacattcccggactgaaaaacgtcccccactggctgatgcatgccaggatggacgaagacatgatgggattctccgacaccatcttccccgctttccttttctgtatgggcatgtccgtatcctttgccatacaaaaccggtacaaaaagggagacaacaccctgcaagtcgtggcccatatcttctggcggacagtggcgctgattgccatgggactgttttcactgaacagcggaggcatcgaaggcggtctatcgcaccaatggttttccatcctgatggtcatcggtttcttcctcacctgggaggtatatcccaaagcggaaggaacgaaaaagacccttttcaccgcaatgaaaacagcaggcgtgctgctgctcgccttcctcgtcatctacaaggacatgaacgggaaaccgttccagataagctggtggggcatcctcggacttatcggctggacgtatgcggtatgtgcaggcatctatctgttcacccgggaaagcctgcggaagaatgccattgcctggttcgtggtcgtattgcttgccgtagtcagccattcagacttgatacctggagagtacggcagccggattatcctgcttccctttatcccgagtgactggacgctgcatgccttcggtatgtccggcgtattgacctccctgctcatgcagcgttatgccgaccgggaacggccgggacgattcatcggcatgctttgtgccctcggcgtaggaatgcttgtccttgccctcgtctcacacccgttctggattatatccaaaatacaagccacgccgacatggttgttctactgcctagccatgttcttcccgctgttcggtttcttctactggctgacggacgtgaaaggcaagaccaactggttcgatatcatcaaacctgcaggtacggcaacgctgacctgctatattatcccttacatctggtatgctgtccagcaactgctgcatctgcactatcccgaggcattgggaagcggtgtaccgggactgctcaagtccctcgtgttctcgcttgtcattgtggggctgaccggcctgctggtgaaaggcaagattaaactgaaagtataa

SEQ ID NO: 489 - DNA, 24701 bp, unidentified
  source 1..24701: mol_type = unassigned DNA
ttatacaaccgttacaacacctatttcaacttgattattgattctggggatgaatacggggttgctcagacctgcgcagacaatcatttttgtgccgtcaaggtcaaattcgcctttgtcatatttcggaaaaagaccctgattcggagcgattactccgccgatgaacggcaattgaatctgtcctccgtgggtgtgaccgcagacgattaagtctatgtcggttttctttgcgtcctcggcaatgtattcgggctggtggtgcagaagaattgtgaaattgttctttgctttttcggcaaattcttcccacagcgttcttgacggaacatcgtcatcgggagtgtagaactcataataagggtaatcgctcattccgccgataagcacactcttgccgtttttggtgaattttatgtattcattatcgagcaatacagcgcctgttgaatctgtttcgcttttaaaatccgttccgaatttggcggcattgtcacgctcatggttgccgagacagcagtatgtgggtgcaatttttgaaagcttttcaagcacatctttcatctttgttgtgtcgggatcgccacggttgaccatatctccgcaaactgcaataaaatcgggattttgttcctttacaagctctgcaaggtctgcgttcttttctccgtattccttgttgtgcaaatccgtgatgacaacaaatttcagctttgcatcgttcttagtattgtttacacagtaatttgtgattgcaattgtgttgtcacagtaaacgccccatattacgagagtcacaaacagcacaagtattattgctccgaggattatcgaaaattttttcattcaattcaccgctcatattaagtatggtattattttaggctcgttttgtgcggttgtcaacaaatgtgtgtcgaacaagtctgattattactgttccttgtgctttgattgtcggattttaagttgatttagaaattgctttgtttgacattccttttgcactgttgtataataaatcataattgtatttatatgttactcgggaaatttacacaaagttaaacagaagaggtatgggttatgaagaagattaatttgcgtaagatgttgctggctctcgcagatgtgtttattatcgttgtcagcggtattcttgcaaattatattctcttgcttgtcggctacataggtgctgcttcaagcaaaggcttgttgagctatattgttattgatcttgtcatgtgtctgtttacgctttatataagcggaacatattcaaaattgtggcgatactttaacgcaaaggactatatggtgtgcggaattgccgtcttttcggggtttacgctcggctttgtaatctcgttgtttttgcagattccacagagaaagattttttgtatagtacatttcgcaatagcccttgtcggaattcttgtattccgttttgttttcagaagggcttttcttgaccttaccgaggcaggaagggcagagggcggagagcgcacccttattgtgggcgcaggcaatgccggcagaatgattgttcgtgaaattcacaatgtgaaagagcagggtgatgttaataatccttcaaaaagcatcattccggtatgctttgtcgatgatgatttgaaaaagctgaatcagaaaatcgaaggaatccccgttgtcggaacctgtcccgaaattgttaaaatatgtgatgaataccgcatagacaatattattgttgcacttccgtcatgtgaggaagatgagaagaggaagattcttgactactgttccgcaacagagtgcaaaatcaagattatcccttatctcggcgagcttttgtttgatgacgggcatacacagcttatttcacaggcaaaggaaatcaagattgaggaccttctcggcagaaaacccattgagtttgaccgaaaggagattcatgaccttatcaacggaaaggtttgtcttgttacaggcggcggcggttcaatcggaagtgagcttgtaagacagattgcaaagaatgatccaaaacaaatcatcattgttgatatctacgaaaacaacgcatatgacattcagcaggagcttgtgcttgaatacggcacaaagcttaaccttgtaacgcttatttcatcggttcgtgattacgacaaaatggagcttatcttcaagacatatcgccccgaactcgtattccacgctgccgctcacaagcatgttccgcttatggaaaccgttcccgaggaggctgtaaagaacaacatcttcggcacattcaatgttgcaacccttgcagaaaagtacaaggcaaagaagtttgttatgatttcaaccgacaaggctgttaatccgacaaatgttatgggcgcaacaaagcgtgcgtgcgagatgattattcagtacaaggcgcagcacagcaccgataccgaatttgtaacaacaagattcggtaatgttcttggctcaaacggctcggttattccgctgtttcgccgtcagattgaaaacggtgcgcccgttaccgtaacacatcccgatattatcagatattttatgactattcccgaggctgtttcgcttgttcttgaggcaggtgcaatggcaaagggcggtgagatttttgttcttgatatgggtgctcccgtcaagattacaacccttgccgagaatcttatcagaatgtacggtaaggttccgtacaaagatgttccgattattttcacgggacttcgtccgggtgaaaagctttttgaggagcttcttatggacgaagaaggtcttaagtcaacacagaacaagaaaattttcataggaaatcaaattaaaatagacgaaacagatatgctgtcaaagcttgaggttctcaaaaagaccgcagaaaacaatgacagtgaaaagacagttgaacttttggcagaacttgtacctactttttgccacaaggtcaatgattaaccgaaaaggagaaattttatgtgcggtattgtaggttatgtaggacctaaggattgcagtgaagtgcttgttaatgctctcacaaagcttgaatacagaggctatgactcggcaggtattgcggtttttgataacggggaaatcaagaccgtaaagaccaagggtaagcttcaggacttaaaggataagcttgcagaggtcggcactccgaaaggtcatgtcggcataggtcacacccgttgggcaacccacggcgagccttcggatgtaaactcacatccacacagcggtgcaagggttacaatcgttcacaacggtattattgaaaactatatggagcttaaagacttccttatctcaaagggaagaacttttttaagcgacacagatacagaggttgttgctcagctcctcgactataaatacaacggaaatcctcttgaaacaattgacagtgtaatggctgagcttaagggttcgtttgcactcggaattatgttcaaggatttccccgacagagtttttgcggttcgccgtgaaagtcctcttatcgtaggcgttgcagaaggcgagtgctttattgcgtccgatgttcctgcaattcttcagtacacaagggattattatcttcttgaccatgatgaaatcgtaacactttcacctgacggtgtttcgttcgttgacgaacaccttgatccgattgaaaaggaacttcagacagccgactgggatatggaggctgccgaaaagggcggttatccgcactttatgattaaggaaatcaacgaacagcccgaggctatcagaacaacgattatgccgagaatcaaagagggacttccgttccttgaggaatgcggcatcacaacggaaacaatcaagaatttcaaaaatatcacaatcgttgcctgcggtactgctatgcacgcaggtatggttggcaagtatgttattgaggatctcgcaagagttcccgtaaatgttgacattgcgtccgagttccgttacagaaatccgattgtaggcgagggcgaccttgtaattatcatttcacagtcgggcgaaacagccgacagccttgccgcaatgcgtcttgcaaagcagaagggtgcaaaaactcttgcaatcgtaaacgcaaagggcagttcaattgctcgtgaggcggatatgctcatctacacactcgcaggtcccgaaatttccgttccgtcaacaaaggcatacatcacacagctttccgttatgtatctctttgcctttgagcttgctcttgcaaaggaaacaatcagcacagccgagtgcaagcgacttgtttcggctcttacaaaaatgcccgaggcagttcagtatgtaatcgacaactgcgaggatatctgcaagttcgttgccacaaagcttgttgcaaccgacagtttgctttacataggcagaggtcttgactatgccctttcaatggagggttcactcaagctcaaagaggtttcgtacattcactcagaaagctacgccgcaggcgagttaaagcacggcacaatttcgcttattgacgaggatgttcccgttatcgccgttgcaactcagacaggtattatccccaagacaatcagcaatgttgttgaggttaagtcaagaggtgcaaatgttattcttgtttgtacagacgcctgtgcaagagaactcaaggacggtgttgcggattatgttatcgaaattccgcatacagacgagcttcttatgccgattacagcggttgttccgcttcagattcttgcttattatacatcaatcaacagaggtattgatcccgataagccaaagaaccttgctaagtcggttactgtagaataaacggcagtcttgtttttaattgaaaattgaaaattgaaaattgaaaatttcggttggcggtgtgccaccgcagtcaattcgagaagatagttagataaagaaattgcattgatgcccgatacggcattgatgcaatttttgttttatatgaaagcgaatgtttatttatataattttaatttgtacaaatctttgcgtggctatctgcaggcggataatattcgcacatacagttttgcaacaacttccgtatataacaaaaatatacaaaaacagtcgggcaacaatgttttgcattcttgcgaattgtcttctcgaccataattttccattttccattttcaattttcaattttatgcacgctcgggcgtaatatgttctttaatatcataccgcattcacgaatagggtactcttgttttcaaatttcaacggtaaaaaccttgtatttttttgacagattatgtataattaattagatatacattctaaaaagcagtattgatgaatctaatttagtttcgggggaatatacggacatgatgaaaactgtttttaaaagagctgtaacgcttgcaatttgtgccgtaacggtattttgcggtatttttgcctgttcaggcgcaacaaaagattacgagattccgcagattgacgatatgacgctttcaatgcctgacggtatgagcgctgttacaagggacagtaaaagcacagataaatatttttccgttttcggtcttgattatgacacaacaatgaaaacctttcagaacggaaatatctatcttcagggtatggataatatgtcatcggttattctgaccgtgacaatgacaaaaaatgagagcagtgagaatgtcggcaactatgctcagctttcttcaagcgagcttgcaaatatacgcaacaattttcttaattcagacgagtatcggagctgtactcccgaccaaaaagaaaaagttgtgtggcttgtgtttgacgcaactgctcagagcagtaagggcgatgtgaaaacctttgttgccaacacggtttatgacggtatgaacattaatatcacaatgcagagaacagagggtgatgttacaaccgttgactacgatactttttccaaagttgtatcttcggtaaaattcagcgacctgccgttttcaaagggatttattccgtacataatcatcggcggcggtgttgttatccttattttgattgttctcatcataatttttgccgtgagaatcagaaagcataaaaaggctaagaagaataacgctattcttgaggagcttgcagtcaagtataaactcggtgaaaagggtacggactacgacattgacaattttgacgattctcccgaaaagcccgataaacgctcaaagaaaaagcagaaatatgcggaagaggttgaagaagaaccggcttcgccgggcagaagatatgctcccgagccgataatcgaaaatatggaagaaccggaagaaattacaagtgagtattcaaactttggttatgatacggatgatgccaaggaaaaagaaattgacgagataatcaactccgcaaaggcttacaagagtgagcttgagcgtgaggcatataaaaacaactacggttacgaggaaaacagcacggaggacgaaaaaaaaaaggagcctaccgcagcagatacctcagagactgaacccgaaaaaattgacgaaaacgaaaaagataacgcagaaacacctgaaaaacacgaggacataagctcttcgtcgggtcctacactcgttatccccgagcccgaacacgatctttttgaaacaagcgagcctgacgatatcgaccgtgaggacgatgccgatgttgaagaaaccgaggaggtttccgaacaaaagcatccgcttgaaaaaaaggttgacaagtacgcaaacatcattttcggcagtgacgatcccgaggagaaaaccggggaagaggttgatgacgaggagcttgtaagggcaaaggctaagaaaaacaagtttgacagcggttatgacttttttgacgaagctcccaaaaagtcaatgggggttatcaaaagctcagacctcagagatgccgaggacgttgatgttatcggcgaggttgaaagaaaagcagaaaccgtaaagcagaacgctcttgaaaaagagaataataaagaaaccgagggtgaaccgaatgataaacggtcaacggaagaggttcttgccaatgtaggcaaaaacatcggtaacgctctcaggggctttgcaggcggagttaagaattttggcattcactgcggatatttctgcaagaatgtttcaataatgataaagcgtaagcgtgcgattgccaaacgcaagaaggcagaggaagagagaagagagagagaaagacaaaaggcagagcgtgcaagaaagcgtgccgaaagaggcgaaagtgacggacttgttcaggttcacagcagaaccgaccgccgcccacagcagaatcgccgccctgcaaacagaaacaagagaagataatttcttttcttaacggaggaaaaacatggaaatgctaattaaaaacgcagtggttgtttcccctgccgacaagcttaacgaaaaaacagatattctcataaaggacggtgtgattgccgaaatcggcagcggcattacatcagacggagagattattgatgcagacggtctttgtgccgttccgggatttgttgatatgcatgtgcatcttcgtgatcccggtcagactcacaaagaggatattatcacgggatgcaaggcggctgccgcaggcggtgttacaagcctgcttgcaatgcctaacaccaacccgacaaccgacagccccgaaattgtaaagtatattcttgacaaagctaaagacgccgacagccgtgtttatgttgcggcaagcgttaccaaggggcttaaaagcgaagaacccacagacattgacgctgtgaaaagtgcaggtgcaattgcacttaccgatgacggcagacctgttgaaaacacaaagtatttgagtgacgcaatgaaaaaagctccaaagctcggcatgacaattgtcgcacattgcgaggacttgttccttgccgacggcggtaaaattaacgagggcgaggtttcggaaaagctcggtgtcaagggaatccctgccggtgccgaggactgcggaactgcaagagaaattgcacttgccgccgctcttaacgagcctattcatatctgccatgtcagcaccaaaacaagcgttgcacttatccgtgatgccaaaaggagaggtgttaaggtgaccgccgaaaccgctccgcattatgtttcgctcacggacagggagcttttaagaggtgacgctgattacagaatgaatccgcctctcaggactcagactgatgttgacgagattatcaatgggctttgtgacggtacgcttgatgccatagcaaccgaccacgcaccgcacacacccgaggaaaaggctgattttgtaaaagcccccaacggttcaatcggcatggaaacctcgtttgcggtctgcaacacatacctggttaagacaggcaaaatgacgctttcacagcttgttgagaagatgagtgttaatcctgcaaggattttgaaaatcaacgcaggcacactttcagtcggtgcaaatgccgatgttgttcttataaatcccgatgaagaatggacagttgatgctggtaaacttcacggcaaaagcaaaaacaccccgtttaaaggcagaactctcacaggtaaagtcaaaaagacaatcctcggcggtaaggtagtttttgaagattgagtttgttttaattgtagatgttgatacgattaaaattgtgcaaacggtagctgtactacgctcgggcataaatgttttttatttatcaaactgtctgcacgaattggggacggcggctcgccgtgttcgcccaccaaataaatttaatttaatataaactttaacataaaggagtaaaattatggcacagaaaggcgacctcctgtcggtaagacaggacatcagagtagtagatgcaacaatccgtgacggcggtctttgtaacgatttcagatttgacgacaaatttatcaaggctctttacaatgcaaatgttaaagccggtgttgattatatggaattcggctacaaggcatcaaaggaaatctttaacgaagaagatttcggtaagtggaaattctgtaacgatgcagatatcagaaaaattgtaggcgacaacaagactcctcttaaaatcgctgttatggctgatgtcggcagaacagattttaagaaggatattatcgcaaagaaggacagcccgattgacctcatcagaattgcaacatacatcaacgcaattcctgcggctgttgaaatgattgaggacgctgcaaagaagggctacgaaacaacaatcaatattatggctgtttcaaaggcaagaaccgaggatattacagcggctcttgaaactctcggcaaaactcccgtaaacgctttctacattgttgacagctacggcgcactctatcccgaggagtcaagacgacttgcagacctttactgctcaattgccgacaagtacggcaagtcggtcggtattcacgctcacaacaaccagcagcttgcttttgccaacacaattgaggctatgactcagggtgtcagctaccttgacgcaaccgttgacggcatgggcagaggcgcaggcaactgtgcgcttgaacttcttctcggtttcctcaagaacccgaagtatcaggttgctcctattctcaaaatcattgaggagtacacccacaagtttaaggctgagggcgttaagtggggttacgatattccgtaccttctcacaggtcagtacaacacacatccccgtcctgcaattcagttcgtaaaagaggacagacaggattattacaagttctcaaatgaactttatgatattatcaatagctaattaaatttgtagcggcgttcattgaacgccaatcgaaccgattgcaaaatcggttcgaccatacaaacgatttgaattaaagtaattaaccacgatataacaatacatttgttgtttattcgttttggtttcacaaccaaaacgattggcggtcattgaccgccgctacggttaagcaatgacattgtttaaatcaaaatatgaacgaacaaattgtttttacattacaaaaaatgaggagaatcactatggcatttgacagacttatcgaaaatattgtaaaaatgcagaatcctacggttgcaggtcttgaccctaagcttgactatgttcccgaatcaatcaaaacaaaatgctttgaaaagtatggcaagacgcttgagggtgcggctgctgcactttttgaattcaacaaggcgcttattgacgcgctttatgatattgttcctgccgtaaagccacaggctgcatattatgaaatgtacggctggcagggtgttaaggctctttgtgacacaatcgcttatgcaaagtcaaagggtatgttcgttatcacagacggcaagcgtaacgatatcggcacaactatggaggcatatgctacggcacacctcggtcatacagatgttgcaggcgaaagtattgacgcattcggtgcagacgcactcacggtaaacggctacctcggaacagacggtatcaagccgcttgcaaaaatttgcgattcggacgacaagggcatttttgttcttgtaaaaacttcaaacccaagctcgggcgaacttcaggatatgaagcttgaaacaaatgagagcgtttatgagcatatgggcaagatgtgcgaaggctggggcgaagaccttatgggtaagcacggctattcggcagtaggtgcagttgtgggtgcaacatatcccgaacagctcggtgaaatgagagcaaaacttccgcacacattcttccttgttcccggttacggtgctcagggcggcggtgccgatgatgttaaaaacgcatttgacgaaaacggtcttggtgcaatcatcaattcaagccgcggcattatgtgtgcatggaaaaagcaggggcttacagaagatgactttgccgttgccgctcgtaaagaggctgagcgtatgagggatgaaatcgttggctgtatcggcaaaattaagcttggctgattcatttgcacaacagaatcacgaaatttttcgttttttatgctttagtgctatgaatttattgactttagcgtgctaaaagcgtataatttaagtgtatttatttttacaactatatttttaaattttctttaaaaagggagatatcagaaatggcaagagtatataatttttcggcaggtccttcaatgctgcctgagtctgtgcttaaaaaagcagcggcagaaatgcttgactacgaaggcagtggtcagagcgttatggaaatgtcacaccgctcaaaaatttacggtacaatcatcgagggtgccgaggctcttttgagagaggttatgaacattcctgacaactacaaggttcttttccttcagggcggtgcgtcaacacagtttgcggctatccctatgaaccttatgacaaagagcggtaaggctgattatgttattacaggtcagtgggctaaaaaggctcatgcagaggctgcccgttacggtcaggctaatgttgttgcttcatcggctgacaagaccttcacatacattccaaagcttgatccttcaacattcacaaaggacgctgactatttctacatttgcatgaacaacacaatttacggcactgtttatcacgagcttcccgacacaggtgatgttccgctcgttgcagatatttcttcctgtattctttcaagaccgattgatgtttcaaaattcggcgttctctatgcaggcgcacagaagaacatggctccggcaggtcttacggttgttatcgttcgtgaggatcttatcggcaatgctatggatatcactcctacaatgcttaactggaaaactcacgctgacaacggttcaatgttcaacacaccgccttgctacacaatttacattgcaaagcttgttcttgagtggattaagaacgaggttggcggtcttgataagatgtatgaaatcaacaagaagaaggctgaccttctctacggtttcctcgattcttcagagcttttcaagggtactgttgttcccgaggatcgttcgcttatgaatgttccgttcgttacaggtgacgctgaccttgacgctaaattcgttaaagaggctactgaaaacggtcttgttaatatcaagggccatcgcacagtcggcggtatgagagcttcaatttacaacgctatgccttatgagggcgttgaaaaactcgttgagtttatgaagaagttcgaggctgaaaacaagtaattattgaatattatgatataacgggcgaacgctgttcgcctgttattgtaaattcttaaaataaaaaattaaaaaggattgattttgatgtataacattcttacattaaacaaaatcgccgctatcggcacaagccgtctcggtgataactataaatacggtgacgatgttcagaaccctgacgcagttcttgtaagaagtgccgcaatgcacgatatggaatttgccgataaccttcttgcaattgcaagagcaggcgcaggcacaaacaatattccgaaggataagtgcagcgagcagggcattgttgttttcaatactccgggtgctaacgcaaacgctgttaaggagcttgttatcgcaggacttcttctttcaaatcgtaaggttattgagggttatgaatgggcaaagactctcaagggcaacggtgcagctgtcggtaagatggttgaaaagggcaagagtcagttcgtcggtcccgaaatcaagggcaagaccctcggtgttatcggtcttggagcaatcggtattcttgttgcaaatgccgctgttgctctcggtatgaatgtaatcggctttgacccgtttatgtctgtgggcaacgctctcaagcttgctcctacagttaagctcatgaagagcgcagaagatgttatggtgaattgcgactacctcacaatccatgttccgcttactgacgacacaagagatatggttgatgccgatatgattgccaagatgaaagacggtgttcgtattctcaatttcagccgtgacggtcttgttaattcaacagcagttcttgaggctgttaagagcggcaaggttgctaagtatgttacagacttcggaacagacgatatcctcggtgaagagaatattatctgcctcccacacctcggtgcatcaactcccgaaagtgaagaaaattgtgctgttatggcttgtgatcaggttaaggagtacctcgagaacggtaacatcatcaactccgtaaactatcctgcaatttcacttgcaagaacaaatgctgacgatacccgtttctgcgttgctcacaagaatgttccagagcttctcaagaaggttctcacacagatcagcggcaatgttgaaaatatgctttcaaagagccgtggtgactatgcttacacaattattgatgttgcaggcgccggtgcagatgaccttgcaaaaatcgcagcagttgacggcgtaatcagagttcgtgcaatctgatttcgattaaaatttaatcgttgaaaatttaatctatgaaaaaagtccgaacacgcaaaatgttcggactttttgtttgtgtgaatccaaatatgtagcggcgttcagtgaacgccaatcgaaacgattgcaaaatcggttcgactgtatttcaaaatattggtgtatggttgatttggctttgcagccaaatcaaatggcgatcactgatcgccgctacatatcgctatatattaaacttttaccagatggtatttttttgcattggcaattataaatgttacggaaattgcaacggcacacaattctgcaacgggcaatgccgaccatacaccgtttatgcctataaacatcggcaaaatcagcattgcggcacactcgaaaacaagcgttcttgcaactgaaattacggctgaaatcttgccgttgttgagtgcggtgaaaagtcccgatgcgaaaatattcattccgcacaacagataatttattgcaaaaattctgaatccgctgagtgcaatctgctgaattttttcgttgcctgccgagaaaattccgacaagcggttctgcaaaaaattcagatgccgtaatcattgcaaccgaaattatcagcgtgatttttatgcataatttgaacagcttttgcagtttttcgtgattttgtgcgccgtagttaaagctgatgacgggtgaaactcccgaagtgaatccaaacgaaaccgcagtgaaaataaagtgaatgtacaaaatagcacttatagccgcaacgccttttgcgcctgcaaagtgcatcatctgaatgttgaacagcgctgttgtcacggctgttgaaagatttgtcacagcctctgacgagccgtttgccatagcaaagaggatttcacttaccttgaattcaggcttgccaaagtgcagagtctgctttttgttgaaaaagagcaaaagcggaattgcacccacagccattccgatgattgtgccgagtcctgcaccgattattccaaaatcccacacagccataaaaagaatgtcaagcacaatgtttgtgcaacccgacagtatcgagaaaacaagcatgatatgtggcttgtctgctgttacaaggtacgattggttgagcatctgccagcacattacaaagccatacggaatcataacgctgccgtagtcaatgcagtaggggagaattttttcgtttgagccgaacatcatgtacataggttcggcaaaaattgtgaacagcacagcaatgataacagaaatgaccgttgccgtgattgcaacaccggacataagtcggtttgcttcctcctgtttgccttctcccattttctttgcgattatagcatttgagcctgttgaaaacattaagcccacagccataaatacgagcgtgaacggatatacaatattgattgcggacaatgcgtcacttccgacacagttcgcaacaacgattccgtcaacaaccgtgtaaagtgacataaaaaccatcataagaacggttggcaaagtgaacttcagaatcgtttttgctttgataggttttgcataaattgatgttgccataaaatttccttaccctcaaatttatatttttcacagaccatttaaacgattgtatcataactttgtcgcaattacaaccgatttgtctttttttgtaaaatatgctattatatacagacttaaaagcgaaaaaaggggcggttttatgtttaagggcgcagtttttgatatggacgggcttatgattgacagcgaaaggcttgtttattcaatctggcaggaaatgcttgatgaggacggcaaagagtttaatcttgacattttcaaaaagacaatcggacttcgcagtgaggattcctacgaatattacaagtcggtttacggcgatgattttgactatcctgcttacaaggcggagtcgagaatccgctattttaagcgtatcgaaaagaacggtgtgcctgtaaaaaaaggcttgtacgaaatttttgattatttaaaatcagtcggttgtaaaatttcgcttgcaacttcaacctcgtcacaaacggctttgaagattatgaagaaaatcaatctctatgataaatttgacgcattcgtgtgcggtgatgatgttaaaaacggcaagcccgatcccgaggtttttttgattgccgcaaagaagctcgggcttgagccggtggactgcgttgcgtttgaggacagcattaacggcataaaatctgcacatgccgcaggtatgaccacggttatggttcccgatttgtcagagccgacagacgaaattaaaccgatgatagattttttgtgtacggatttaagcgaagcgatagaacgaatttcaaattgaaaatggaaaattgaaaattaatgtcgggcagacagtttgtaatgtaaaaaacatattatgcccgagcgtagcattgtaattgttcgcacaaatctgtatgggcggatattatccgccacaggcggcggtcgcaaggctactcctacgattttatggttcttgcatattgttggttcaattatccgggaaaattacaaataattacaaatggttacaatttacaaaaatacaattaagcagggttaattattatacacattttccacatagttttcaacaattgttaaaaaagaacggcaatgcctgttaagcgttgatacggttactgcggaaaagggtaaaatgaaaaataatcattgaataacagcacgataatatgttatactttggtaaacaacaatctttacggaggacaaaatgaagaaaattataaataaaaagtcactcaagggtacgcttgctgttatgttgtgtgccgttatggcattttctgtctgtgcctgtgactttgactctgacacagaaccaaccaaaacggatgcacaaattcagtttgataaatattgtgacgatttgttttcggaagaacttgaggatgacgctcttaccgcacattttgacatttcaaatccgtcggactacggtttgaaatatgacgaggaggactataccctcggtcatgtgtccgatgaagatacaaaagaatcctttgatgaactgaaagaggcaaaaacggatttggaggagtttgaccgttcgggacttacttcttctcaaaagcagacatatgacacccttgaaagctactttgaaattcagctttcatatgatggtacaacagaattgcagagtatatttgcaccgcagtcgggaattgttgcaaacctctttaccaccctgtccgagtttactttctatgaaaaggatgataccgacctttaccttgctgttttgaaggacacaaaacgctatatggacgagtgcattgagttcacaaggaaacaggctgaggacggttactttatggctgaagatatcgtacagcagtcaattgacgagtgcgaaaagcatattaagaatgacaagtccgtgcttgttgacgagtttgaatcgagaataaagtcactcggtcttagcgattccgagaaaaagactgttgtcgaaaccaataaaaagtattttgaagaatactacattcctgctttgaaatcagcaaattcagcacttgaaagtctcaaaaaatcaggcaaaaacgaagaaggtctttgcggttacggcaaaatcggcaaaaagtattattcggcaatcgtcaaagacaaaacaagcagcagtatgactcccgaggagcttaagtcataccttacaaacagctttacaaaggttggaatgagtatgagcaatgtttcacaggatgacttgagcaaatttcaggactacaaacccgactttaaggacgccgatgaggtgcttgaatttttgattgagaatatcgaggaggactttccgactcccgttacaacctcttacacggcagattatatgagcgattccgcaaagagcgacaatgtgggagcgtactatgttcagggacgaattgacgatacaagcattaatatcatcaagataaatcccgattttgcaaaaaagggtatgactcagatgtacacaacccttgcccatgaaggctatcccggtcatctttatcagtttaccgcatcaaatgcaaacaaggatatcccgaatatccgcaaggttttaagctttatcggcgcaaccgagggctgggcgcagtatgcttcaaaatgtacgcttgattaccttgatacaagcgagggcattaagaagcttatctacgcaaacgatattctcggctatattctctactcaatggtcgatgtcggtgtgaactacaacggctgggattatgaaaaagtcaaagagtatatgtcaacggcactcggttcggctgacagcgagagcgttacagccgcaacaaaagaggcgtatgaccttgcccgttcaaatccgggttactttctcccctataccgtaggctacctcaagatgattgatatgcgtgaaacagccgaaagcgagcttggctcaagctttgacgcaaaggagtatcacacattcattatgaatctcggaatcacaagcattgatgtctacgaaaaagcccttgatatgtggcttgaaagcaaaaagtaaatttttggtgataatcttgaatattttttacaggtatggtataattaacttattgatatgataaatataaattggtatggatttttctaagatgtgattcttattttcgccatacactcattatgggtgtatggcgatttttattttacgcaaggggtgttaatatgggcgttaaaacggaaaacaaaatggcttatgaacctgtcaacaaacttataattcaaatgtcggcaccgccgctgatttcaatgttctttcagtattcatacaaccttgttgacagtatgtttgttgcggggataaatgaacaggcacttgcggcagtatcgcttgcattcccgattacaacgcttatgaatgcgttgtccgtgtggataggtgtgggtgttaatgttttgattgcaggttatttgggacagaaaaatcagcaaaaggcaaattctgcagcggctctcggagtggtaatttcggtagttgtcggagtgctgataaatttcctttcgcttttcataataaatccctattattcggcttttacgcaaaacaaagagatttttgaatacggaattgcgtatatgagcatctgcgtttttatgcagataccaaatatggtgcatattgtaattcaaaaaatacttcaggcaacaggcaatatgattgctccgatgtggtttcaaattgcaggtgttgtattcaattttgtgtttgaccctttgctcattttcggcataggtccgtttccgaaaatgggtgtggtcggagctgcagttgccacggttttaggctatgttgtttcaacaatcattgcgttgatacagctgtttcttacaaaacaaaaggttaagccggtgtttaaaaactgtcttgaaccgcagatgataaagctgatattttcctacggattgccctcgtttgttatgaatgcgttgggagcattcaccgtgaattttgcaaatatgtttttggtgcgatattcggacacggcggttgcatttttcggagcatatttcaaggttcagcagttgatttttatgacggtgaacggactgattcaaggctgtttgcctataatgcggtttaattacagagcaaaagagtacggtcgccttaaacaagcaaataagagcggaacaattattgcgactgttatgatgattgtcggtatgctcttggtgctgattttcccgaaagagatattgtttttgttttcggcatcggaagaaatgtgtgcttttggagtgccggcaatgagaattatgtcactcggatttgtgttcagcggtttttctgcaatgattgcaacctatgaacaggcaacagacagtattatgcccggcgttgtaattcaactgttgcgacagggcgtgctgttagtccccgtaatttggcttttaaacagcgctgttcaaatgacaggcatatggcttgcgttcccaattacagaatttgtcacatttcttgttgctgttgtatttgcaaaatttgcaaaaattaaaaatcattgaataaataaaaataacaaccgccaaaacccgatagaatggattttggcggttgtttgttatttaaaatatgtttaattttaaattgtttttgcaaaaacattatcagatgattttgccctgaaaattgtttttacgagcaggaatgttatataaacataaagtgcggtgtagatgattgccgtaaatttaaggcttataagctcgtaggagaacagatagtagcaatagcctctcaggcttataagcgttgacacaatcggaatccacaaatgttttgcacttaccgccgcatagacaattaaaataatgtcaagcagataaccgtagcgttcgtgcattgacgaaaggaacatgatacaggtgaacacagtccacgctgttgtcagaagaaaagtttcaaggttcttcaaatcaccctttttatagatgataatgcacatcataattccgagtacggcaattgtcagaaagaccgaaaactgcttgaacagataataatatgtcatatcgtttccgtcacatatgagtgcataaaagttcggacagttcatctgaataagctttccgtagtcggtctgttccgcatatattgtgataatatcgataaacggtctacccataataattgcaggcaggcacattatcacatcaaccgcaggaattataaagaaatgcagaatcgaaattttctttgtcgaaatccagtaataaagcagaacaggaatgatgaatacggtttgtagcttgaatgcaaacgcaatgccgatgaacacaaacgatgcaatcggcttgtctttgtgcaaaaacaggattgcaaggattataaacgaggtgtaaattgaatcgcactgcgcccaaaacgatgagttaaaaatcaccgttgccgaaagaagtacggctgagtaggtgagtatcgctttgagccgtcggttattctttgcaaacgaataaacaagtattgcggttgaaattgcaagtacaaaatcgaatattattgatacgattttgtacgcatacagagcatttagcggcaaaagagtcataagatagattatgacttgatacggaatgttgtagttgcccacctgagttgcaagccccgtgaaatcattcagcttgattatgctccaccacgaatttaaaaagctgttgaaatcatcgctttgaaaatccattccgcaggctctgaggaaaattgcaataatcgttaccgcaacgagtaaaaataaaagaatgtgtttttttataaagtcaatgactttgctttctgcttttgtcatagagaaaattcctgttcgggtttaaataaaaccgattttcttcataaccttgcccattgtgcgactgctgattttaagggcaatttcatcggcttttctgtaacagctttcaagatatgccttgtctgcaacaagcttttcgtagcgttcacgaatcggacgaagttcttcaacaactgcctcgcctacagctgtcttgaagtcgccgtagcccttgccgtcaaaatccttttcaatctgctcgtatgaaagacctgtaactgcgctgtaaattgccataaggttatttacaccgtctttgccctccgcatagcgaacctttgcctcgctgtccgtaacggctctcttgaacttcttcattataacctcgggtgcatcaagaagatgtacacagccgttgacattttcatcggacttgctcatctttcttgtcgggtcctgaagactcataacccttgcaccgttctttggaatgaaaccgtccggaatcttgaacacattgccgtaaatgccgttaaaacgctctgcaatgtttcttgtaatttcaatgtgctgtttctggtctgcaccgacaggcactttgtcagcctgatagagaagaatgtcggcagccatgagtacgggatatgtgaaaagacctgcgttgatgttgtcggcatgctttgcagacttgtccttgaactgcgtcattcttgaaagctcgccgaactgtgtgtaacagctgagcgcccatgcaagctctgcgtgagtgtgaacatgactctgaatgaagaaaaggcttttttcaacatcaataccgcaagccataattgaagcataagcatcaattatattcttacgcataacggcaggagtctgtcttaccgtgattgtgtgcaaatctgcaagagcgtaaatgcagtcatattcgttctgcattgtaacccagttgcgaaccgcaccgagatagtttccgagtgtaattgttccgctgggctgtattgcgctgaatacaacctctttttttgtctgattttccattattcccctccgtgattaaagactgtttgcatactcgccgaggatttttattcctctttcaagctgttcgtcagtcggtgttgaaaagtttattctgaaactgtgacaggtttcgttttcgtcagttaaaaatgcgttgcccggaactacgcaaacctttttgagaacgagttctttgcagaaattcggcatatcaatatcctcgggcaagtcgcaccaaatgaaaagacctccgtcaattttatgatatgtgattttcggtgcgcagtatttgtcaagaagctccatgcagaagttcgctttctttgtgtagatttcacgaagctttgcaaggtgagcgttaaagtcatactttgtgatgaattcatcgcatacatattgtgcccagatatttgtatgtacatcgttgccctgtttgcacacaacaagcttttgaaaaatcggctttggtgcaattgtgtaagcaacacgcatacccggtgaaattacctttgagaatgaaccggcatagattacaattccgtccgtatcaaagctttttatgttcggaacatattcaccgctgtaacgcaggtcgccgtacgggttgtcctcaatgatgagaacaccgtattttttggcaagctcataaactttcttacgcttttcaaggctcattgtaacacccgaaggattttgaaaattcggaattgtgtaaatgagctttgcgttcggattggcttttaaagcctcttcaagcttttctgtgctcataccgtcaggctcaacgggaacacctgcaagctttgcgttgtagcttctgaatgtgttgagcgagccgatgaatgacggtgcctcgcagattacaacatcgccctcgtttacaagagcctttgagcataaatccataatctgctgtgcgcctgttgtgatgagaatgtcgtcattgtcagagcctgtgttatgctcctttttcatatattccgtaaggtgctttctcagcggagtgtaaccctccgaaacgctgtactgtaaaaccgaaatcggatcttctgcaaaaacctttgccgagatttccgcaatctcctctgagggaaatgcatcgggcgacgggtttcctgccgaaagcgacacaacgctcggatcggcggcatatttgaaaatttctctgatagcactcggcttcaggcttgaaaccctgtcggaaaacctgtattccataaaaatatctccttttaagatgataaggattttttaaaattccataccctgtaattctatcacgaattgcatatattctatcacgaattgcatatatgttcaagaaatttgactgtttttactgcgattttattcaaaaaatgtgtaatttattattttgcatttgtaaatgttaattcacggaaattgtattttttgtgctttttgtattgtttttgatgagtttctgttgtataatctaaatgataatgtccttacggtcagagcaaggcttgctttgattcaaacaggagtacactgcgagtaattaatacacttatataattcattgaattcaaattgaatttaaaaatcttcagtttgggagagtaacactatgagcagaagaaacgattacgattattttgatcttgataatttcgatgacagcattgattcccgtgaatatcgtcgcagacagcaacagcgccgttctgcaagctatgccgcaagaccgtcatcacagcgtcccgtcagaagacctgtaaaaagaagaaacaaaagaagaaccagaaacagaattattatcgttgtgagcgcattggtaattctgtttgttattatttttattataacttcaatttttaagggttgttcaaaggaagatgcccttgcaagcgttcccacgggaacagtgggcacaacggcatctcccgacgaaaccgcaaaatcttcgacagctaacaaagcagacgagctttctcctacatactttatgacaccgagcataaaggacgacaatacaaacggaactctttcgtacggcatttatgtgtggaacaaaataggctacgaattgttcagcagtgatgatgcaagagcgcagaactatgctcagacaatcaacggctttgcagacaagttcggcagttccgtaaaggtttatgatatgattgttcctaaccataccgaaatgggacttccgcaaaggctcaaaggcagcgatgctccgtcaacctcacaggctgacaacatcaaggcggcttatgcggctctttccgataaggtaactccgattaactgctacaaccgtcttgcggaacataatacagattacatctactttaagagcgaccaccattggacgggcctcggcgcttactatgcttacacagcatttgccgatacaaacgatttgcccgttctttcgcttgatgattgcaaggaacagaagattgacggctttacaggctcgtttaccaactcggcagacggtcttgacagcgatacggtaagttattggaagttcccttataatgtaacaatggatatcacacaggcagacggttcttccgcaagctatgacagtccctactatgaagccgcagagggcggttcaaacacctacggtgtgtttattatgggtgataatgccctcacggttctgaaatcagcttcgaaaaatgcggcggcaggcaagaagattgccgttgtaaaggaaagctacggcaacgcttttgttccgtatctcaccaataactacgaagaagttcatgttatcgatttcagatatttcaaacataatcttgttgattactgcaaaaccaacggaattgacgaggtgctttttatgaacggtgtaatgagtgccaacactcaggttcagcttgacagtatgagcggactttttaactga

SEQ ID NO: 490 - DNA, 11826 bp, unidentified
  source 1..11826: mol_type = unassigned DNA
tcagatacgggaagtatccagctttacttcgttgttgtcggcgtacttgttggggcgcaccatcaggtagatgaacgctgccagcaccacaacagctaccacggtgaacaggccgaagtgcacctcgccggtgataaggccgcccagctgatacaccaccagcgcagagcagtaagccagagcacacatgtaaccaatggcgatggccgtccacttgccgttgttcatctcgcgcttgatggcgcccatagcagcgaagcagggagcgcacagcaggttgaagatcatgaaggcgtaagcggacagagcggtgtagtcctgtgcgaccgctgcccagatctcgtcgccgttctcggaaagctcgccgccgaagtggtacagcacaccgaaggtgcccaccacgttctcctttgcaatcaggccggagacggaagcgacggttgcacgccagttgccgaagcccagaggtgcaaagatccatgcgaccttggtagcgatagcagccagcacggagttgtcctgatcctcgaccataccgaaggcaccgttctcgaagccgaagccctgcataaaccacagcacaacggtagcgagcaaaatcacagagcctgcgcgcttgatgaaggaccagccgcgctcccaagttgcccgcagcacgttgccccatgcgggcacatggtaggcgggcagctccatgacgaagggagcgggatcacctgcgaagagcttggtctttttcagcatgatgccggagcagatgatggctgccatgccgatgaagtaggcagacactgccaccagcgaggagccgccgaacattgcaccggcgatcaggccgatgatgggcatttttgcgccgcaggggataaagcaggtggtcatgatggtcatgcggcggtcacgctcgttctcgatggtacggcttgccataacgcccggcacgccgcagccggtgcccaccagcaccgggataaagctcttgccggaaaggccgaacttgcggaagatacggtccatgataaaggccacgcgggacatatagcccacgtcctccagaatggacagcaggaagaacagcaccagcatctggggcacaaagcccagcactgcgcccacaccggccacgatgccgtccatgatcaggccgtacagccagcccgccacgccgatgctctccaaaaagccgcccagcgcattgggaacgatctcgccgaacagcacatcgttggtccagtcggtggcaaaggtaccgatggcccagccgccgtccgcaatggaggtacccatggacagggagtacatcaggtacatcaccactgcaaagatgggcagtgccagcacgcggttggtaacgatccggtcgatcttatcggagatggtcaggtgctcggtgcgtgccttcttcttgactgccttgtgcaccacggtgttgatgtaggcgtagcgctggttggtgatgatgctctcggcgtcatcgtccatttctttttcgcagtcctgaatgtgctcgtcgatgtggtccaccagtgccttgtccagccccagctctgccagcaccttctcgtcccgctcgaacagcttgacggcgtaccagcgcaggaaacggtcatccaccttgccctgaatgctctcctcgatgtgggcaatggcgtgctccacactgccggtgaacacatggggcagctcgccggtcttgccggccttggcagctgccaccgcagcctttgcggcgacctcggtgccctcgcccttcagcgcactgatctccaccgcctgacagcccagctctgcgctcagcttcttcaggtcgatggtgtcgccgttcttgcgcaccagatcgatcatgttcacagccatgaccaccgggatgcccagctcgatcagctgggtggtcaggtagaggttgcgctcgatgttggtgccgtcaatgatgttcaggatagcgtctggcttctcctttacaaggtaagtacgggagaccacctcttccagcgtgtagggggacagcgagtagatgccgggcagatcctgaatgatcacgtccttgtcgcccttcagcttgccttcctttttttccacggtcacgccgggccagttgcccacgtactggttggagccggtcaggttgttgaacagggtcgttttgccgcagttcgggttgccggccagtgcaattttaatgctcattgcggatacctttcctcccttttggtcttatcagaccacttcgatcatctcagcgtcggctttgcgcacgctcagctcgtagttgcgcacggtcagctccatggggtcgcccagcggcgccaccttgcgcacatagatctgcacccccttggtgatgcccatatccatgatgcggcgcttcaccgggccttcgccgtgcagccgtgccacggtggcggtctcgcccacctttacgtctttcagtgttttcatcgtactcgttcctcccttgcagtatttcatgcagcaccgggaaggcgctgctcaggacaccatgatgcggcttgccatggtcttatccagtgccagacggctctgcttgacctgcacgatcaggttgcccgcgatctcgttgaccacggtcacttcgctgcccaccacgaaccccagctcggccagatgcagccgcacctcgtccttgccgctgattctgcggatggtgacggtctcgcctgcttttgtcatcgtcaaaggcatcatcgctgtgctccccttccataaaaatgatgtgatgctgcggtggttagtcagccgtaactatcagcgtagatagtttactgctgctaaccaagcttgtcaatagttttttcatatctcatagttagtttatatgaacaaacaaattttatgccggaaccggcctgcatttttatcaaaatcatcaatgactaactctatttcttgagctaaagttagccaatgtttacatttttaaggggcgttttgcccttttatagggcagggtgacggagaatgacttctcccgtgaaaaggcaattctggaaaatccgcagattttccagaattgcgaaataaaaataatctttccgctatttatgcgcagagcaacgcggagcgcattcaaaatcgtcccaccccgcgcgggagtgcattcccccaaacacacgaccgcccggcgcaggggtcaaagctgcaccgggcggtcatgtgtaaaaaggaggatcgctctctcctgtgtcggaagcataggagagttgccaggataaaagagagtatttgaaaagagaatatcaatttttcaggcggccactgccagctttaaaatgggcgtgccgctgtggaacagccgcaggtacaccgccgtgcacttggccagctggtcaaagtgctgccgggcggcggcggggtcgccgtaggacttccagcatccgcagcaggtaaagcacttgccccggtggcggataaagcccaccacatcctccagcggatagcccagaaataccccgatctcgtgggggaaatccgccgcctccgccgcgcagcacagccgcaggctgagctggtccagcagcgcaccgcagtccgcagcatcttccggcagacggtagccctcccgggctaaaaagccgcgcacagcggcatctgccagcaccgtctgcagcttggcggcgcggtagacgtacaccaaatactgccgggtggcaatgcacccccgcagcacccgcacctgcaggcccttggggttcagctgggcgttccagcccgccacccgccgggcaaggtcggcacggtttcgcgtttcgtagcggaacagccccgcaggcttcagccccgccagtaccggggcacattgttcgatcattacggtctcaaaatcacgctccatggcggttctcctttggcggcggtgtcagggtcagtgtgccccggatgccgggctgttatgagtaagacgtagctaaccagcacttcaaaaaagaagcagcacgcccgggctgcgggcactgccggtggggtcttatgtggttagttatttctaacgtcagtagtgtaccacagcaccaccggctgtgtcaagcctttatgacaaaaaagttatttataacaaaccacacccgcgctacccttccggcggcagtcgtggtataatggggatattctcgggtctgccccttggggcgcaccctgccaaggaggttccccccccatgcccacacccatcaccgcgtccaccctgtctgcgctgctgagcgccgcgctggcgcaaaagcccacccgcccgctggtgctggcgctggacggccgctgcggcagcggcaagaccacccttgccaacgggctggcggcgcagctgcccggctgcaccctgctgcgcacggatgatttctatctgccgcccgcgcagcgcatcccggactgggcgcacaccccctgcgccaacatggatcttacccgtctgcgggacgaagcgctgcgcctggcctacgcggggcagacggtggcctaccgggcgtacagctgccgggagggggcttatctgcccccggcacagctgcccgcgcagccgctggtgattttagagggcagttacagccaccacccactgctgcgcccctacgagacgctgcgggtattcgtgacctgcgcaaagcccgagcagacccggcgcttacaagcgcgggagggcgcacgctacgcggatttttccgcccggtgggtaccgctggaggaggggtattttgcgcagtacggcattgagacatcagcggattttgtggtagataccacccaaggcgggacgatttagaatgcgcgccgctccgcggggaaagcaagcgttgcacttgaaccaaaaactccccctgcaccgtgagatgcagggggagtttaaatttacagtctgttacttattcttgtacatatcctgatagtagttctggtagtcgccgctggtgacgtggttcatccactcttcgtggttcaggtaccagtcaatggtcagcacgatgcccttctcgaagggagtttcggggtaccagcccagatcgttcttgatcttggtggggtcgatgccatagcggcggtcgtgacccagacggtcggcaacgtgcttgatcagctcctcgctgatgccctcgtcctgcaggcggtcgtgcagctggttgatgatggtcttgacgatgaagatgttggggcgctcgttgtggccgcccacgttgtacacctcgccgatcttgccgccgtttgccaccatatcaatggccttgcagtgatcctccacatacagccagtcgcggatctgcataccgtcgccgtagacgggcagctgcttgtggtgcttgacgttgttgatcatcagggggatcagcttctccgggaactggtaggggccgtagttgttggagcagcgggtaatgttcaccggcatgccgtaggtgtcgtggaaggccatgacgaacatatcggcgctggccttggaggaggagtaggggctgtgggggcacaggggcgtggtctccataaagaagccgtctgcacccagagcgccgtacacctcatcggtggagacttgcaggtacttcttgccctctttccaagtcttggcatcggcgtcgtaccatgcctccttggcgcgctgcagcaggttgacagtgcccatcacgttgctctgcacaaagatctcggggttcttgatggagcggtccacatggctctcggcggcaaagttgatgacgtagtcgaaatcgtactttgcaaacaggctctccaccagttccttgtcgcagatgtcgccctgcacgaacacatggcgggggtcgccctccacgtccttcaggttttccagattgcccgcgtaggtcagcttatccagattgaccagcaggatctccgggtatttcttgagcatatagtgcacaaagttggaaccgataaaaccggcacagccggtgatcagataggttttcataggtcagtatccctctttatttatttgttgttgttcccggactgcgggcgggctgcggcgcgggcgcgttcctcctcggcgcagcagtgctttgccacaaggtagaggttcttgttcatgctgttcatggtcttgcccatggccttggtgtatgcttccagccctttgttcatgctgtgaagctcctcataggtggcttgggtgtaccgtgccagacccgcactcatgttgctgagctccttgtgggtctctttggtgtactccaccagctccgcgaaggcgtacagcgcccatgcaaggaacatctgcaagacccagaacaccacggcgaccaccagccccagcacgatggctgaaaactggctgatgggcttcagcatttcatggaccgcgccgcacagcatggatgcaagcacaaaggccagcacacactgcacctttgcaaggatctttaatatcttgacagatctgccaaaaatcgcatcaaacatgatacatcctcagttcttccgcaggggggattttcagttttttctcagcccttcatgccgttttcgccgtcccagtgggcgaagaagcaggccagcgcgtccttccagtcgcggacatcgttgcccacggtgcagcgcagcatccggttgtccagtgcgctccacttggggcggtcggcgctgtccgggtgctttgccttgtactcctcgctggtgcagggggcaacggtagcgtccacaccggaaaggcggatgatctcggcagcaaaatcgtaccaggagcagatgccctcgccggtgcagtggtacaggccgtactcgtgggtcacgcacagctgcaagatctcgtgggcaaggtcggcagcgttggtggggttgccgcactggtcgttgaccacttccagcttgccgaactttttgcccgcattcacgatggtcttgacaaagtttttgccgtagtagctgtacagccacgcggtgcgcacgatgaagtggcggtggcagaaccgctccacatacttttcgcccatgagcttggtagagccgtaggcgctgatgggcccgggcagggtggcttcatcctgcgggatgccgccgttctcccggccggagaacacatagtcggtagaaacgtgcaccagccgtgcgccggtcttttcggcagcctgcgccagattgcgggggccaagggcgtttgccttaaaggcatcgtcgtggtgcacctcgcacccgtccacgttggtgtaggcggcgcagttgatgatgatatccgggcggttgcgccgcacgaactcatccaccatcctgtaattggagatatccagctccggcagatccaccgggatcaccgtagcgttgagcagcttttcggggatggggcccagctcgctgcggccctcctgcagctgcttgagcagctctgtgcccagctgccccttgcagcctgtgacaatgattttcataccaatgtgcctttccttatgcttagtagcgcagcttgccgtcggccacgttcttcagatgctggccgtaggggctcttgccgtagcgctcggcgctttccagcaaggtgtcgcggtcgatccagccgtacttgaaagcgatctcctccggtgcgctgatcttgatgccctgacgcttctcgatcatgtgcacaaagtcggcagcctccacaaggctctccatcgtgccggtgtccagccatgcaaagccgcggcccagcagctgcacatccagctcgtcctgcttcaggtacatatcgttcagggtggtgatctccagctcgccgcgggcagagggctttacctgctttgccatctgcaccacttccttgttgtagaagtacaggccggtgatggcgtagttggacttgggatgctggggcttttcctccacgctgagcaccttgccgtccttgtcgaactccacgatgccaaagcgctcggggtcctgcacatagtagccgaacacggtgcagcggcccttgttctctgcgttggccacggcgctcttgagcagcttggagaagccgttgccgtagaaaatgttatcgcccaggatcatggcgcagcagtcgtcgccaatgaactcttcgcccagaataaaggcctgtgccagaccgtccggagagggctgcaccttatactgcagatggatgccgtactggctgccatcgcccagcagtgcctcaaagcggggcgtatcggtaggggtagagatgatcaggatatcctgaatgcccgccagcataagggtggacagcggatagtagatcatgggcttgtcgtagaccggcagcagctgcttgctggtgaccatggtcaggggatagagccgtgtgccggcaccgccggcgagaataatgcctttcatacttgtgcactccttttttcttataaaaagatgtgcagcttaattcaaagcggagctgcgtccgctgtaaacaattttgggtctgccaaggccgcatttttgcaaaagacgatggcagtacactttattttactatgaaagcacgcaaaatgcaagaggcggaaacggcagaaagcggtgtgccgacggcacaccgctttctgcgaatcaaaaacactatttttcttccccgctcaccacgcaaagccccacttggaaaagtagcgcagcaggctgcgcagctgccacagaaagggcttcaggctgcggtgcgccgcgcggtgccatgcgtggatggcggtgtactggggcaccagatacgccttgccccgggtgcgcatcttctgggtcaggtcggcgtcctccacatacatgaagtacccctcgtcaaagccgcccacagccttgaaggcagcggtgtccaccgccgaaaagctgccggtgcagaactcgatctcggtgggctttgtcaggtctttgtctgccatcaggtagcggtcgttgcactttgcccagaagcgcagacagggcagctgacggtagaccatggcgcgcacgttgcaccggcgcagcggcagctgctggggtctgccgtccgggaaggtcagccccgggcgggtcatcaccacgccggggtgcgccgccatccagtccgcaaggtcgctcagggtgtccgccgtcagctggatgtccgggttcaggataaagtgcacccggctgtgcagcagcgagagcactgtgttgtgcccggtgccgaagccgccgttctccagccggcagagcacctgcacggtctgcccgggggcggtgcgcagggtgccgtccttggcggcggcggtcagctgctggccgctgccgtccgggctggcgttatccaccagatataaggtgagcgggtaacggcgggtgcagtccagcaccgtctgggcggccctgatggcctccccggcgccgttatacaccacgatacaggccgaaagctccatctgcgttccccctttcggttcggtttgggtcaaaggctcactccagcggcttgatgtcaaagctgaagtcctccttcatcaggtcaaagttggggttcatgcaggggtcgcccgcagccagctgctttgcccaccgcttctggaagcgctccacctcagaggcaaagcgcttgcgcttggcagggctctcgtccagcccgcggctcttgctctcgtagtggtacagctgggcaaagggggtgaacacgttggtgtagcccgcctcccgcacacgcacgcagaagtccacgtcgttgaaggccacggcaaagctctcgtccagcccgttcacctgctcgtacacgtccttgcgcaccatcaggcaggcggcggtcacggcgtacacatcctgcgcgtaggagagccgtcccatatagccggggtgccccacagggaagttcttgtgcatatgcgccgccagcgtcaggaaaccgaagccgatgcccgcgtgctggatggtattgtccgggtagagcagctttgcgcccacgcagcccacacggtcctgctgggcatacatgaccatctcctccatccagcggggagagatgacctcggtatcgttgttgagcagcagcagatactcgccggtggcggcgcgtgcgccaaagttgttcagggcgctgtaattgaagccggtgccctgccatgtgagcacatgcagggtgtccgggtgctccttttgcagctgctcgtagcagcggaaggtggcaggctccttgctgttgttctcaatgatgataatctcaaaatccgggtaggtggtcttgcggtagatggactccacgcacacccgcaaatcgcccgaatggtcgcagctggggatcagcacgctgacccgcccgggctttgtgatggtataatcagtcttgtagaagcccggggtgttgggcaccatggtcaccgcgtccaccggcacgcccatgcggtcgtagtgggcacgcagcgccttcatggctgcttccagacaataggtcttggcagagatgttgctggccacgctggcggggctggaacgccagtagtacagcaggtgcgggatgtgcacgatcttttccgcctgctcggtcaggcgcaggtagaggtcgtaatcctgactgccgttgaactctgcccgctcattgccgcccacctttgccagcagcgccgcgctgaacacgctcaggtggcagatatagttgttggagcgcaggttgtccagcatataatccggcttgaagtggtagaccgtcagatggtcgatatccccttcaaaggtcacttcgtcggtgtacacaaagtccgcgccttgctttgcaatggcttccgccacataccacagtgcgcaggggtgcaaaatgtcatcatggtccagcagggcgatatagtcaccggtggcaagggcaaacccctgattggtgttgcccgcaatgccctcgttgctgtccagtttccggtagcggatgcggctgtcggtgcgggcacgctcctgcacgagggcacccacgtccgcgtcctgtccggcatccaccatgcacagctcccagttgcggtaggtctgattctgcaccgagtccagcagctccaccagaaaatcgtggggggtgttgtacagcggcaccacgatgctgatcaggggtgccgcgggctggtctgcggcctgttttaccagcagctccacgtccgcaaagcggtcggcgggcatcgccttgcccgggaacagctttttgtactcctttttggccttggcctgtgccattacgcccgcaaagcccacccggcgcaaggtggcaaaaaagacgaacagcgggaaggtgcgccacagctggcggcacttgcttaccagataccgcagcggccagctggccttccagaaggtggagttgaccacgctgttcagggtcttttccaattcctgctcgtggctgcggctcagggaaaggtcgctgcgcagccgctccagctgggcagtctgctgggcggcggtgcgctcggccagcagggtgcgctcccgcagaacgtccagctgctgctcgtagccatcctcaagttccggcagctccggggcagccatgcggcagaacagcgccgtcagctgctccttgccgcagtccttccacgcaagctcccggcagaagccctgcgcggcaagctgctttgcgcagtctgccatgccggcgtactctgcgcacaccagcagcactttttccgcctgtacggcgggcagggtgacccactgggggtctgccaccaccagcagctccggggcgctttgcaccaccgcagtattcattttacaaaaagctttttccagcagcccgctgtcctccagcacctgtacgctgcggggagccagctcccgcacgatgcgctgtgccagtgcacggcagcgctcggcggcctcctgattctgcttttcctgatccaactccatgctgatactccaatccgtgcgcttttctacgcagttatgtttcccgttcat

SEQ ID NO: 491 - DNA, 7710 bp, unidentified
  source 1..7710: mol_type = unassigned DNA
atgaacaaattgaaccataccaacacaatcaaaaatgaccgttttccatcttccctgtttttggtgtattttctcgtattgctgttaatgtctggtattcatacaggaattatcgtaggtatgaatgcactggggtggaacaaaatcatacaggtaattttaccgcttggttattggactgttgtggcagttggattgacattttttacgaaaaatgtgatccggaaaagctatgaaaagccaatgcatgacctggcagatgcaactaaaaaagtggcagagggcgatttttcagtgtatgttccaacacttcacaccgctgaccggctggattatctggatgtcatgatcattgattttaataaaatggtggaggaactcggcagcattgagacgttgaaaacagactttttctccaatgtttcccatgagatcaagacgccgcttgcaattatccagaacaatgcggagctgctctgtatggaaaagacgccggagaaacaaaaagaatatgccgaagtgatctttcagactacaaagcgtctgtcggaacttatcagtaatattttaaaactgaacaagcttgaaaaacaggcgatcacgccggtagcagaagagtacgacctgtgtggacagcttgcggaatgtgccgtgaattatgagccggtgtgggagaaaaaagatattggatttgatgcagatatggaagattctataaagatcacggcagacgctgcgttgatggagatagtctggaataaccttttttccaatgcagtgaagttcacagaaccgggaggaacgataaagctgaccgagcagtcggatgattctgagatccgtgtgtcggtggaggataacggctgcggaatgacggaagagacaaggaaacatatttttgaaaaattttatcagggggatacgtcccacgcaatggctggaaatggacttggactggcactttccctgcgtgttttgcagttaaatgattataaaatcgaagtggaaagcgaaccgggacgcggcagtaagtttacggtgatcattccgaaaaggtagaatattggataacagacagaaagcgaatttctgggaaagcgtagaaaaatgagtgagtttgagagttttgattatacgaaagtgacggttgccgagaatcagatgtcacagtatatggatggctacgagcattttggatggaaggtggattccaatgtacccatagaaaaaggaatgggaaaagtaacaatccatttaaagcggagcagggcagttttaaataaaatggaactgacacggttacagagacatttcgaggcgtgcatgagtgagattgcggcgctcgaaaattccacagaatcttttgcaatgatcgcggcactgaccagtgggatttcaggctgcgcatttatagctggttcagtgttcgctgtgacggctgcaaaaccgatcatctggctgatgattttgctcgcaatcccgggattttttctgtggggaatcgcatatccgctttataaaaatgtgaaaaagtggagagaagagaaagtgaagcctctcattgaggcaaagcttgatgaggcggaaaaagtgtgcgagaaagggcatgcgctgttatagctgtaaagcatctgacggaaaaatacggtggcacgcttgtggcaagccaggagaaatacattttaataattccgaaacaaaacagaagcaattcgcaaacaaaacctctctatgatacagacaacaaatgaaacacagatcattacaaaaaaagagaggaaacataaaatgagcgaaacattatatttagtaacaggagcagcaggatttttaggaagtcatgtatgtcatcagttgttggagcgtggagaaaaagtaagagcatttgttcttgatggtgatccggcaatcaaatatattccaaaagaggcagagattgtaaagggagatctctgtgatatcgattcactcgaaaactttttcaaagcaccggagggcacagagacgatcgtgctccatgtggcaagcatggtcagtgtcaatcctgattttaaccagaaacttgtggaagtgaatgtgggtggaaccaaaaatatcatccagaaatgtttagagcacaaagagtgcaaaaaccttgtctacgtaagttctaccggagcgattccggaaattccaaagggacagaagatcaaagaggtaaatgagtttgatgcagagaaagtcgtgggctggtacagcaagaccaaggcgatggcaacacaggctgttttggatgcagtgaaaaaggaaggattaaacgcatgcgtcgtacacccgagtggtattttaggaccacaggactatgcagtgggggagactacaggaaccattattaaaatcatcaatggcgaaatgccgatcggcatgggcggaagttttaacctctgtgacgtgcgtgaccttgcagcgggctgtatcgcagcagccgataaaggacgaaaaggcgaatgttacattcttggaaatgaggaagtaacgttaaagaaaatgtgtgaactgttagacaaagatcttcactgtggtacctgtaaattttatctgccgctcggattggcaaaactgctcgcaaagcagatggagagaaaggcagcgaaaaccggtgcgaaagcattgatgacgacattttctgtctacaatctggaacgcaataatgcatttgactattccaaggcagaaaaggaactgggctatcatacaagaagctatgcggagacattgcatgatgaggcagtgtggcttagagcagaaggaaaaattgcataaaaggcagtggaaaggaaaaaagtttataacggagatttttgtgatatgaaaaaagtatgtgttgtaaccggaggcggctccggaatcggttttgcagctgcaaaagaggcagcaaaaaaagggtactatgtaatgatagttggacgaaatgaaaaaaaacttgcaggtgcagtagaagaattgagaaaagacggatgcgaagcagaagcgtatagctgtgacgtttcagacagggaacactgctttgcattggcaaggcatgcggcagaatgtggggcagtaaaggccgtgttgcatattgccggaatgagtccgcatatgggagatgcggagaaaatcatgcaggcaaacgcacttggaaccgtcaatatcaacgatgcattttttgaagtgatcgcagagggcggctgtgtgatcgacacaagttccacttctgcttacatggcaccgtcgtttattatgccaaaaagggtttatccgcttgcatgtacagaccggaagctttttatggataaaatgatgaaaaaagtaaaaatgtttccacggaaaacaagagagggtgtcgcctacagtatgagtaagcattttactatctggtttgcaaagcaggatgcagcacgttttgccagaaagaatgcccgggtgttaagtattacgccaggaaactttgagacaccgctcggaaatctcgaaaaagaggaagcgtccacctatctgaaatttgcggcaatcaagagaaatggacgtccggaggagattgcaccgctttatgttgcactgatcgatgagaggttgagttatctgaccggcacagacattctctgcgatggaggctgtatcgcaggcggagccagtgcctttgcgagataaaagtcatagtaattagccaatcaaattgaatcaattgtatttttataaagaatccgctatactgaaacagatttagtatagtggattttttgtattggggagaacattttgattacagtagcaatcgtagaggatgaagcggcagtcacaaggaagctgacgaatatggcgcagtatgcagtatttgcaaatgcaaatggtgcaagcagttttcttgtgataaaataatatagataaattggggggataaatgtgcagatacattattttcaaagatatcattcgaaggagaatgtagatacatctaatactatgctgatgttatctcgcttatataattataatgcggataaattctttgtaatgttgaatgctctaatactgggacaagatgagacacctgaaataacatttgagcttcaggtagcaggagacgaaagtgttccagatgcgattataagccagaaaagttttaaaatagtagttgagacaaaattacataatcaatttcagcaggatcagcttgaaaaacatctgactcagtttggaacagaggagataaaggtgcttttaacgttagatccaaaacctatgaaagaatcattgatggatagttttggcattgtgctgaaaaagtataatgcagataggattaatgaaataaaaacaccaataaggcatgtaaatattacatttgaacaattagttgctgcaatggaagatattgtagatgagcgggattcagagatcatggctgtgcttgatgattataagaagtattgttttgatgaaaaactgatacctgatgatggaaattggatgagagcaattgttgcgggaacaacacttgaagataatttgaaatatgatttttattatgatcaggcttcaagaggctattcgggtcatggatacattggcttatataaaggaaagagcattagagcgatcggaaaattaaaaaagacaattgttgcagagttagtaaatggagaagtgtcatatattaatgaaagcggagaagctgctacaaaagaggagatagaaaagattaaagaggctattgttcatgcagagacagaatatggatacaatttaaaaaccatcaaacatagatattttatagttgagcatttttatccaacagactttaaaaaagcaagtaaaaatccgattcaaaaaagtaaatattttaatctggcagaaatgttcaaaagtaaaacgttgcctaaaactgatgaaatagcatcaatactggatggaaaaacatgggaagagtttcattaaacagtggattttcataaatatgaagaaaataatgttactgtaatagtgttcatatagaggtgtgtattatgggaaacgaatcaggtgaatggattatgcatggcatgaagtgggacaacccggattgcattcattctgtagatgaagcaatcaagtatataaatgaacttggctttttaccattatttaagaatgaaatagatgggttttcacttgaagaaagaactgttccagagtactggtggagtgatgatccagagattgatccatggatgtggcgggctattatagcaaggcggcatgatatcgtctatggaaagttctttgataagaaggcaggatttatatcaaaaaaatggcttcctgtatttgctaattaccgccgggatggatatgattttgatgcattatatgatgatgggaaagcacctaataagcataaaaagataatggtcaattttatggaaaacaatgctgattcagagatttattccaatgaattgaaaaaacaagctggatttggtaaggatggagaaaagggatttgatggtgctataacgaatcttatgatgcagacctatctgtgcaactgcgattttaagaagagagtgaataagagaggtattgaatatggatgggatgttgcagtgtattcatctattgagcatatcaatggatacgattatgtgacttcctgttataaggataatccgcaggattcatggaaacagctggtagactatatgcatgagatgtatccgaaggcgacggataagcagataagaaaagtgttaaaataaaacaatgcatttttgaggtgaatatacataaaatgaattcaaaaaaatccgcagattattgcaagctgatagaaaatgtaaaaaacaaatatcgaaaaaatcctatatatgctaagaacctgacacttggttggtgcgatttgcgtcgtggagaagatttgtgtcaggaaattaacttatggacatattggcaagggagagattacgctaagaacacaccacatattaaatatatgctgataggtcaggatttcggaccgcctgaaaaggaagagataaagggtacgattgcaaatgtccgtaagatgaatgatggtatagatgtgatgtttcatgaaaatgtagatttggaagcaagggattcacagacggataaaaatattgtcggatactttgaactgcttggtaaaaatgaaattgacaagaaaaaatatccagatttgtttttctgcaattgtaatttgggctatcgcagagataagtattctggaaatatgaccagaaagatattggcaaatgatgcagctgaaataaaatcattgattgacattatagagccggaaaacataatctgtctggggcttgatacatctgtggttgtaatacgaactctgattgataaaaagttttcctgtaatagagtatctgaacttataggaactggcgaaccttatatttatggagaaacatatatataccctgtagcacatccggggtattggggtacaggtacaagaggggaggataatgttattgaagattggaggagaattagaaaatagggaggtgccacaatgccatttaagatagttcgcaacgatataacaaaagttaaagctgatgcgattgtaaatactgccaatccaaatccaatatgtgcaagtggcacggatttagcaatatatgaggcagcaggaaaagaaaaacttctcgccgaaagagcaggtatcggtaagattgcaagaggtgatattgattcttacatagatgctaattatgtcagggaaagtcatagaaaagaatatccggtgcgaagcagaagcaacgcccgcatgagaggattgacagaggaacgagaataaagatccatacaatatattagttgagaacaatcgagtatataaacttggaggatgggaatttcttgatatagccaataagctttttgacaatgaaaagcaggtggactggggaagctatgcatatcagtgcacaaaggagcaactggaaaaactgatggaacagactggatgtgaaatagataagatgaatgaactggcatctgagaaaatctatggtattgtgtttgttgaagaggtgtaaatcttttagagaccggagaaattctggtctctttatttcgattaccactgtcaaataaagccaaaatggtttatactttttatcaagtgaaagaagaaagcattaaaagtagatttgatggcaaaattataaaaggaatgatggatatactatcagggtaacaaaagaagaattttatgctggtggcaatagtgatccacgaaatccgaatatcttaaaaatgtttggttttgtaaatgttggtgagcgtgccggaagtggtgtcgataagattatgactgcatgggcagaacaaaactggaaaaaaccggaatttgatttctcagagcgcagtgacagggtaacattaaagctcgaagttggacaagtgatatatattccgggagttgctgatataagaaacacaactgagagtgatgaagcagagacaataacaactatgtcgaaagttgacaaagtacttgcttatatccggcaaaatggaagtgtttcaatgcaaaaagtaatggaaacctgtaactacagatctagaactggagcaagaaagttaatagataaaatgataaatgcggattttatagaaaaaactggagaaggaaacaaaacgatatataaaattaaagaatag

SEQ ID NO: 492 - DNA, 6271 bp, unidentified
  source 1..6271: mol_type = unassigned DNA
atggagatttacgagatgattgatttacaggattgtccgagatgcttcggaccatctatacttgaagaagaggaccatggttattatgtaacatgtctggattgcggatgtcagtcagcaacttttgagtttaagaacgatgatgaaagactggaggctgcaagaagaacagcagagttatggaacaccggtaaggtaatctatacaggacgcaccgagtaataagttagaaaaagaattgattagaagagttaattaaggagacatcaggttatgaagagtaaagaagaattatttaatatgacaatagttgagatgagagagtatattaattctctttctaactcagaaatcgatgaggttgttaagatatttgaagaggatgatacagagaaagatccacttacacttcttacagcacctaagctttttgattatatgaagcacgctaacggtacagttgatattgaattttagtcagtatggataataccagtaatataaggaagatgaatttatgaaatattcaattgatacacatactcatacactggtaagcggacatgcgtataatactatagatgagatggcggcgtatgcagcaggcatcggagttactcatcttgcaataacagaccatgcacctaagatgccgggaagtgcaggcatattatatttttctaacatgggaattattccaagacagaaatgtggagtgaagatatatatgggctgtgaggtcaatatcatggattatgatggtaatattgatcttaaggaatacgggctcaaaggctgtgatgttgttatagcaagtcttcatattccatgtatcaagccgggaagtattgaacagaataccaatgctttaattaaggtgatggacaatccatatgtcaatattatagggcatcctgatgattcaagataccctgtagattatgagcgtcttgtgagagcagctaaggagaagcatgtgcttcttgaacttaataatacttctcttaatccgtcaggaccaagacagggagcttacgagaatgatgtgcatatgcttaatctgtgcaaggagttaggcgtcagtatttctataggaagtgatgcacatattaaagagagcatatgtgattttgacagggcatataaagttattgaagatacagcatttccagatgaactgattgtgaatagtgactacagattatatgagtcgtttatcggcagaaaagattgataatggttgatatatgactaatactgtggtagtatttggaatgaaattcgattatgtattcagaccaaggaggatgtaatggttgttttattagcaggtggagcaggatatattggctcacatacagcagttgaattacttaatgcaggacatgaagttgttattgttgatgattatagtaacagttgtccggaatcaataaagagagttgaagagattactggcaagaaggtagtttcttatgaagcagatgttaaagataaagaagctatgcagaagatttttgcagaaaatcatatagactgcgttatacattttgcaggacttaaggctgtaggtgagtcaacaagattgccagctaagtattaccgcaataatattgatacaacacttactcttattgagtgtatgaaggaagcaggagttactaagattgtattctcatcttcagcaactgtatatggagaccagaagccaccatataatgagacaatgcataagggtgactgtactaatccatacggatggactaagtcaatgatggagcagattcttacagactgtgcacaggctgatcctgagcttacagttatattactcagatatttcaatcctatcggagcacatgaatctggaaagattggtgaagatccacagggaattcctaacaatcttatgccatatgtatcacaggttgctgcaggtgtaagagagcagcttactatattcgggggagattatccaactcctgatggaacatgcagaagagactacatccatgttgttgaccttgcatgtggtcatcttaaggctgttgaatatgcagatactcacaagggtgttgagatatttaatcttggaacaggaactccatacagtgttcttgaaatcgttaatgcattccagaatgctacaggggttaaggttaattataagattggagacagacgtcctggagatattccagactcatgggcagatgcatctaaggcacatgatatattaggatggactgctaagaaatcattagaggatatgtgcagggatgcatggaactggcagagtcataatcctcatggatacagagattaatcatatatggctagattaggagattataatatccgtagaattatatttgcaatacttgcggttacatggatggttgttatattttctttttcggcaagaccgggagaagaatcagaaaaccagagtattaaggctggaatggctgtgtgtcatatttttgttccgggatttgataatatgagtgaggaacagcagattcatatggcacagacaattgactatccggtaagaaagaccgcacatgcaatggagtatgcactgcttgcaggacttgtattaggtgtggttacagcagtagtaattaatataagatatgttgctatatcagcatttatagcaatattatatgcggcgacagatgaatttcatcagctctttgtgccgggaagaagtggaagagtaacagatgtgcttattgatggctgcggtgctgttataggaactcttattattatgggaatttcaagagttattgccagaataagacacaataagaagtctggaatatagcttaattatttacaggagacgaagaagcttatgagcagtacagagacacttgacaatgcaaagatgactaatggaccaataacaaggattttattatcatttgcaggaccggtgcttttgggtcagcttctgcaacagctttataatattgcagatgcagcaattgttggacagttcttaagctctaaggcactggcagcagttggtgcaacttcttctcttacatatattgtatgttatttctgtataggttcatgtataggaataagtgttcctgtttcacaggcatttggcgcaggaaagaatactgatttaagaaaatattttattaacggagtctactttgcacttgcgattgctgtcattatgacagcagtcacagcgtctatgagtggactctttttaacgtggttaaagacacctgaaaatatatttaaggatgcacatgtgtatcttgttattatattcttaggacttccgttgacggttctgtataacttctgtttcggacttcttatggcctttggcgacagtaaaaaatcaactatatttatggcagtatcaactgttattaatatttttcttgatttgtttctggttgttgttgtgaagtggggagttgccggagctgcaattgctactatattttcacagggaattgcaggtgttcttagtgctgtatatatctttaagaagtacaaactgttatttccagttaatgcagatgaaagaaagttcaatccgtattacatgaagaacattattaaaatgtgcatgccaatgggactgcaatattctattactgcaattggcgcaattattctgcaattttatgtaaatgcacttggagaagacgcaattgccggatttacatccggatataagattaagaatctgattctgtgtccgttaaatgcgttgggaacagctctttcatcattcgttggacagaatttcggagctaagagatttgaccgtatcagtgaaggatttaagagaactttagagattggtcttatctattctgcaattacgatgatagtatgtttctttaccggcagatatatggcacttatattcgttaatgcagctgatacagttgttgtcggttacactgtgaagtttataagatacataagtgtgtttaatgcagaactggcacttttatttactgcaaggtattcagttcagggtatgggctatggcaaatattctatcctctcaggacttgctgagatggctggaagggcagctgttgctgtacttctgataccacattttggctttgatgcagtgtgctggaatgaggggcttacgttccttgcaggaattgcagtaattctgccaatttatattaaacttttttgccatttgcgtaaaagtatgatataatttttacaattttgggatgaaagaaggatggtctatgtctaagattatattaacaggtgacagaccaacaggtagacttcacttaggtcattatgttggatctttaaagcgcagagttgaattacagaattcaggtgaattcgagaagatttttattatgattgcggatgcacaggcattaacagataatgctgataatccagagaaagtaagacagaacattatcgaggttgcactcgattatctttcagttggtattgatccagttaagtctaatatatttattcagtcacagattccacagcttacagagcttacattttattatatgaacctcgttacagtttcaagacttcagagaaaccctacagttaaatctgaaatccagatgcgtaatttcgaggcaagtattccggtaggatttttctgttacccaataagccaggctgcggatattactgcatttaaggctactacagttcctgtaggagaagatcaggagcctatgattgagcagtgccgtgagattgtaagaaagtttaactctgtatacggagaggctcttgttgaacctgagattcttcttccagataataaggcatgtttaagacttcctggtactgatggtaaggctaagatgagcaagtcattaggaaactgtatctacttatctgacactccagaggaagttaagaagaaggttatgagtatgtacacagaccctaaccatattcaggtatctgatcctggacaggttgagggtaacacagtatttacttaccttgatgcttttagcagtgatgaggattttgctgaattccttcctgattataagaatcttgatgaattaaaggatcattacagaagaggtggtcttggagatgttaaggttaagaagttcctccttaatgttatcaacaaggaacttgaaccaatcagagcaagaagacatgaatatgaaaaggatattccagaagtatataatatccttaagagaggtacagaagcggcttacgctgttgcacaggacactcttaatgatgtcaaggctgctatgaagattgattattttaatgatgcagaacttattaaggttcagtcagagaaatacagcagaacagagtaattattttaatcaaatatacacacggaggcttttctattatgagacatttacttagtccgcttgatttaagcgttgatgaactggcaagattattagaccttgcaagagatatttcaaaggatccatcaaagtatggtcatgtatgtgatggtaagaagatagccacattgttctatgagccaagtactagaacaagattaagcttcgaggctgccatgattaatcttggaggtcaggtattaggcttttctgaggcttcttcaagctcagcgtcaaagggagaaagtgttgcagatactataagagttatctcttgttatgcagatatatgtgcaatgcgtcatccaaaggaaggtgctccgatggtagcttccgagtattcacacatccctattattaatgcaggtgatggtggacatcagcatcctacacagacacttactgatcttatgacaataagggagcttcgtggttcacttgataactttactatcggtttatgtggtgaccttaagttcggaagaacagttcactcacttataagttcattagttagatataagaatgtaaagtttgtccttatatcgcctaaggagttaagaattcctgattatatcagggatgatgtgcttaaggctaataactgcgatttcgtagaagttgagaatcttgaacaggctatgccagaacttgatattctctatatgacaagagtacagagagaaagattcttcagtgaagatgaatatttaagaatgaaagacttctatatacttgatgaagataagatggcacttggaaagcctgatatgtatgttcttcatccgcttccaagagttaatgaaatatctgttgatgttgacaatgatgacagagctgcttatttcaagcaggttcagtttggtgtatatgtaaga

SEQ ID NO: 493 - DNA, 7992 bp, unidentified
  source 1..7992: mol_type = unassigned DNA
ttagcgctggatacggccggaaccgtcgccgccagccagcttctcgacctcagcaacagtaaccatgttgtagtcgccttcgatggaatgcttcagagcggaagcagcaacagcaaactcaacagcttcctgggtggtcttgccgttcagcagggcgtagatcaggccgccgccgaaggagtcaccgccgccaacgcggtcgatgatgcgcagctcgtacttcttgctgaagcagtactcgttggaagcaacgtcgtacagcatggcgctccagccgttgtcagaagcagaatggctctcacgcagggtgatagcaaccttctcaaagccgaacttgtcagccagctgcttggcaacgctcttgtagccttcgcggttgatctcgccagcgtagatatcggtggcctcagcctcgatgccgaacacgtccttagcatcttcctcgttggagatgcagacgtcaacgtactggcacaggtcggtcatagcagcgcgggcttcctcgcgggtccacagcttgccgcggtagttcaggtcgcagctgatcttaacgccatgagccttggcagccttgcaggcttcgcggcagatgtcaacaacattggggcccagggccggggtgatgccggtgaagtggaaccaatccacgccctcaaagatggaatcccaatcgaagtcagcggtggaagcttcctggatggcagagtgtgcacggtcatagatgcagacagaaccacgctgagaagcgcccttctcgttgaagtagatgccaacacggtcgccgccgcggacgatcttgctggtgtcaacgccgtaacggcgcaggctattgatagcggcctgaccaatggcgtgtgcgggcagcttggtcacatagacagcgtccatgccgtagtttgccagggaaacagcaacgttagcttcgccgccgccgaaagtgaactccaggttgttggcctgaacaaagcgctcgtagttgaacggctgcagacggatcatcagttcgccaaaagtaacgactttcatattgaaactccttgtatttattgtaaatataccgcgccgtcaggcgcaaacctgctgcacagtggcaacagattatttctgaaccaggtggatggcgaagccggcaacttcgtcagcaaagtagatggcgatggtcttgccgtccttaacattcttgctgtccatatcgaacttgacgccgcgctggctcaggtgatagatagcgcggtcaacattgttggtcaggatggcgatgtgaccatgggtgccgcggcccggcttcttcatgatctcaaattccttcttgccaacaaagatgctggagttgcccggcttaacagccatgctcagcaggctgccgatggtctcggcggtcttggcagcttcggcttcgtcagcgcagttgatgccgatgtggcccagttccaggcccagcattacgttgacagcctctttgctcatggcggtgatctcatcccatgcgccggccttgatcttgtcggacttgcacatccaggtgccgccgacagcaataatctggctgtagcccaggtagttgttcacgttcttggcgttgacgccgccggtgcacatccacttgcaggtcttcagggcagcgccgatgttcttcagcttgtccacgccgccgtttgcttcagcggggaagaacttaacaacttcgcagcccatgttcatggcctgctgcatctcgccggaggtggcggtgccgggcatcatgataccgcccttgtcgataacatgcttgcagacttcggggtcgaagccgggagcaacgatgaaggaagcaccggcagccatagcacggtcagcctggtcaacggtcagcacagtgccggcacccagcagcatattgggcagttcttcgtgaatcttcttgatgcactcttcagcacatgcggtgcggaaggtgacctcagcagccggcaggccgccatccatcaaagccttgcacagaggaatagcctcgtccacgctgttgaaagcgataacggggatgataccaatttcgtaaacgcgctcaaggacagaattcataacgcattctccttacattaacaaagtttacatcagttgtgaagcggttccttatggtggaacaccgttccgcaatttgctgagtttattatacaaattttgcgtcgcgccgtcaatcggtcaattttaccagtcagagcgaggccgtttttggcaatattgagggggttccgccttgtgggatgctacttgcgaaaaacgccgtttgctggtatacttaattccacaatgcggaacaattccggcccgatgggagcagaaccgggcaaagttataaattatgaattttttgttaatttttgcggaggatgcgttatggaggaccaaaccgtaaaaaatcctgataagggcggtgtgcagagcgttgcgcgcatttttgagctgatcgaagtgctggccgcccacccggccggagccagtttgcagcgcctggcggaagacgctcacctggccaaaagcacaacccaccgcctgttgggcagcctggtcagcctgggatatgccgcgcaggacggcgaaaccggcaagtaccgcctgactttaaagatgtttgaaatttcttccggcatcgtcaacagcatggatgtgatgagcgttgccaaggtacacctggaacgcctggcccagcgcaccggcgaagcggtgcacctggtcatccgcgatgcacaggatatcgtgtacatatataaaacggaaagcggccccatgcggatgtccagccgggtggggctgcgtagcccgctgtactgtaccggtgtgggcaaagccatcctggctaccctgaccgaagaagaggtggaggatgtgtggcggcacagcaacccgcaaaagctgacgggccgcactgtgaccgatttgcctgctttgtgcgcccagctgaacgaggtgcgcgcctgcggctatgccattgacgatgaggaaaacgagcttggcatccgctgtgtggcgctggccatacccggccccggcggcaaggcggacagcgcgttctctatcagcggccttgccccctacatgacgccggagcgcatccggcgcattgctgcccttgcgctggaaacccgcgccgacatcttgcgcgaccttggggtgcagggtgtgtgaagacatggccgacatgagcttgtgagggcaactcggaatttttggaggaagtaagtatgttaaacaacaaagggttcgacttttgggctggtgattatgacaaaactgttggcatttctgatgaggaaaacacatacccttttgccggttataaaaaggtactttggttcatttttcagactataatgcgagccggaaatgccgttgtgctggatattggattcggaacaggcacattaacgacaaaactatacgagcgaggctgttccatttatggacaggatttttcatcaagaatgattgcattggcatctgagaaaatgccaaatgcacagttatatcagggggacttttcaaaagggcttgtcgaaccattgaggaactttcgttatgattatattgttgcgacatactctctgcatcatttgacggatgcgcaaaaaagcaactttctgttagacttgcgtaactacttaaaggaaaacggtaaaattataatcggcgatgttgcctttgaaacacgaaaggacttagaagagtgtaaattgaaggcaggagacacatgggataatgatgaaatctactttgtcattgaggaactgagaaaagattttccggctctttcatttacgaaaatgtccgattgcgctggagtcctgattttggactgataagttcgcgtttgcgaaacgaagtgaaacaataaaagcccctgcggggcttttaagcgacagaacggttttgcgttagcaaaatggagggatttcatcccgacaagttccagtttgtagaccaatgcttaacaaatgtacaacaataatagacaagccttgcgtacaggactataataaaataataggaaaagatgacaacaagggaatgcggtaaggcggccggaatttcccggaaaagtggggaatggaatgaacctgatctttacagcctttgccacactggagggctaccgcgagggcagcaatgccaacctgggcagcgaggtattctaccgctgcattgtggtcagccttgtcagcgcaaaacagaaaaaccagaactgcgatgcagcccttgtgaccaacaccgctgtgccggaaccctatgccgcgcagctgtcccaggcgggcatccgtgtaatcgcctgtccgtttgacaactaccgctttgaagcggatttagactggtccctggcgtattacaagctgtgcgccatgcagtatctgctcgaaaccgagcattacgaaaactacctgatgctggattccgatacctttacccagcgcggctatcaggatatctggcgcgaagccgcggaagcggtgctgctgtatcaggtgccccatgcggccagccagcccatgacggcccgcatctcccacacctatgatgaactttggccggagggcgctccccatgtgctgacccactttggcggcgagttcgtggcgggcagcacggcccggctgcaggattttatggccgaatgccgcaatgtgtttgaccggatgcagcagaccggcgtgcgcagccaggacggcgacgaagccattttggatgctgcggcctaccgcagccagctggcgggcaagcccgtgcgggccgccaacgcgtatgtgttccggtactggctgggcgggcatttttattatgtttccacgaactactgctgcgaccccgtctgcgtgctgcacctgcccggcaaggcgaaaatgcgccagctgacggtgctctaccacaaatacacccgcagcggccgcatgccggaaaaccaaaccgtgtggcggctctgctgcctgcctgccgcccgcccgccgctgctgcgcagcctgtgggtgcgcctgcgggccaaaatcggcatttgaatccacccactgacccccaaggaaaggaacgctctatgcaggagaaaaaacgtattcccctgaaacgtctgcaccgcctgcgcaacgcccgcaaacaggccgcggagaccgatgacctgacccccatgatgaaagccatcaaggcggtgcacagcgtgaccagcaccggctctacccagccggaggacctggaacgccagcgtgccgcccaggagctgtttgcccgtttggttacccccaacctgttgatcaacaccacgcccatcaccgtcaacaatgtttcggcggagtgggtgcggatgaaccaggggcatgaccgccgccatgtggtgctatactgccatggcggcggctacacctgcggccagctgggctatgcccgcgtgctggccagcaaactggcgctttccaccgggtgcgatgtactcagctttgaataccgccttgcccccgaagcgccgtatccttccgccattgacgatgccctgcgcgtctgggactacctgatgtatatgggcatcggcgcgcgggatgtgatcgtggccggggattcggcgggcggcaacctggcgctggaactggcccttgccgtaaaggcccagggccgcagccagccgcgtgccctggtgctgatgagcccctggaccgatatgacgatgcagggggcatcctatcagaaatgtgccgcactggaccccatgctgacccacgactatattgattcctgccgcaccgcttaccgcggagcaaacagcaccctggagtgggaggaccccagcctttcgccgctgtttgcggatttaagggggctgccgcccactttgatccaggtgggaacgaacgaaatattgaaatccgattctatcaaccttgccaaagccatgacggaacaggaagtatacgccgtgctggaggtataccccgaatgctggcatgtgttccagcagatgccgatcccccatgccgcacaggccatggaaagcgttggccgctttgtgcagaaaattttgtaacggcggaaccccgccggataggagggctgccatttgcccgaaacctggtataaagtcgataatgtcgccaaagtatttctggcgtccatcaaccggcgggatccgcgggtgttccgcgtcagctgcaccctgaacgaggatgtggaccccgaccgcctgaatcaggccctggaacagaccgcacgggaaaacccgcagttccaggtcacgctgcaccgtgggctgttctggcattattttgaatccaccaacctgaaaccgcaggcggtgccggaaacgctggccccctgtgccatgctgtacggcccgcagatcaaaaacgaactgctgtaccgcgtcagctattacggcgcgcgcatcaatgtggaaatgttccacgccatcagcgatggcaacggcgggatggtgttcctgaaaacgctggtgcacaattatttgcagctgaaaaatcccgaactggccaatgttcccggagaagagcgcgccagcaagggcgaatcggcccaggatgcgttccgcaagtactatacggcgtccaaagcggcggaggaagacccgctgaaccgcaaaaagtctttccacctgcatggccgcaaactgccgtatgaccagtcccagttttttgaagcccacctttctgccgcccaggtgctggccaagacccgcgccatgggggtaacgatgaccagctacctggccgctgcccagatgctggcggcttatcaggaaatgccggcgctggaacgcggtaaggttatctcggtcagcctgccggtcaacctgcgcagctattacggaaccgagaccgcccgcaactttttcaactccatccgcatcagctgggtattccggggggacgaaacgctggaaaccctggccaaaggctttgatgccaaactgcgggaagccctgaaggacgagcgggtcaaggcccgcatggacggttttgaaaagctggaacagatgcccggtatcaaactggtgccgctctttatcaaaaacgcggtggtcaacctgttcaatacgctggaagccaaaaaagttaccctgaccatctccaacatggggcgcatcccactgcaaaaagagctgcagccctatatcaaaggatttacggcgttctgcagttcgactaccgcgttcaccacggtctgttcctgtggggatgatctggttttgggcaccacctgggcgttccgcagcaccgagatgctgaaaaacttttaccgccgcctttctgccgaagggttggatattacactgtatgcaacggaggtggatggagaatgaaaacctgcccccattgccatatccaggttggcggcagcgcacagtactgtccgctgtgccagaacccccttgtcggcacgccggaaccggaccgctaccccaaggtggtgccgcccgcgcggcagacatcgctgttttaccgcatcgctgcctttgtgctgctgggggcggcggttatctgcggcgtggtggattacatcatgatcgaaggcaggcatatgcactggagcctgctggtgctgatcggcgcggtgggggtgctgatgctgctgcgcgcactgctgcgccagggccgcaacgcccctaagctgctgttccagattttgatcggcacttcgctgatcgtgacctttgcggattattacgccgggtggaacggcattgccattgacgccattgtgccgatcttgtgcagcgttaccctggtgctgaacttcatttttgcctttgtcaaccgccgctttaccgagaacggcctggtttacctgctgctgaacattgtggtgggcgtggtgccgtatatcggcttaacgctgcgccacagcgtgcgcccgccaatggcctgggtcatctgcctggttatcagcatgatcacctttttggggctggtcatcttcaagggccgcagtctgctggcagagtttgaaaaacgcctgcacctgtaa

SEQ ID NO: 494 - DNA, 14115 bp, unidentified
  source 1..14115: mol_type = unassigned DNA
atgaaagaagactggaaacccggaaccatgatttacccgctgcctgccgtactggtgagctgcggaagcactccggaggaatataacattctgactatcgcatggacggggacgatttgcacgaacccgcccatgtgttatatctccgtacgccccgaacgccactcctacgacatcatcaagcggaatatggagttcgtcatcaacctcaccacgaaagacatggcacgggccacggactggtgtggcgtacgctccggaaaggactacaacaaattcgaggaaatgcatctgacacccggaaaaagcaccgtagtcagcgcgcctcttatcgaggaatcaccgctttgcatagaatgccgggtaaaggagattatggctctcggttcgcacgacatgtttatagcggatgtggtaaatgtccgtgccgatacccgtaatctgaaccctgaaaccggcaaactggaactggcggaaacgaatccgctggtctatgtgcacggcggatattatgagctgggagaaaagataggcaaattcggatggtcagtggagaaaaagaagtaataatgcgataaaggttttaagagatggagctgcgacgaatcctgatgggtttatatctgttggccttccccgccatgatgtggggacagactccggttgtgcccggtactgccgacgaagagcattccagacaccgcaaggaaactccggtcaatttcggtttcaaaggcggtttcacctcttccttgttccttgtatcccagttcagcgtcaacggagtgcccattgacgaagtgcagaacaattacaaaataggatatttcggttcccttttcatgcggataaacttcgaccgccacttcctgcaaccggaaatatcctacaacatcaaccggtgcaacatcaccttcgagaaacctctgcccgaagacgccgcatcaggagcccggccggaggaagcctccattacatcgtccatccacagtatagacatccccgtcatctacggatacaacttcatcaaggaggggccgtacagccttgccgtctttggaggacccaaagtgcgctatatatgggacaggaaaagtgacatcgacttcgagaatttcgaccaggtgaatatccgtgaaaggctgcgtccgctcaatctcagtttcaccgtcggcgtatccgtcaccatctcacgcgtctttttcgacttccgttacgacatggggctgcacaacatctccaagagcgtgacatacgatattccggccgacaacaacgctgctgacgaaaacacgaaaaacgaaatccgttttcaccgcagggacaatgtgctgagtttttctttcggagtgttcttttgacagtaaatttcttccttttctttcaatttattcatttatttcccgtaaatttgtgcgcttaataagagaacacagatttatcaaacttatctaataagcagaatgaaaagagatgatttaattttcgaacttatcgaaaaagaacaccaacgtcagctcaaaggcattgaactgattgcatcagagaactttgtaagtgaccaggttatgcaggcaatgggctcctgcctcaccaacaagtatgctgaaggataccccggcaagcgttactatggtggttgtgaggtagtagaccagagtgagcagattgccatcgaccgcttgaaacagattttcggcgcagaatgggccaacgtacagccgcactccggtgcacaagccaatgcagccgtattcctcgccgtgctcaatccgggcgacaaattcatgggactgaaccttgcacacggcggtcacctctcccatggctcactggtcaacacttccggtattatctatactccctgcgaatacaatctgaaccaggaaaccggacgtgtggactatgaccagatggaagaagttgccctgcgcgagaaacccaaaatgattatcggcggcggttctgcttattcccgcgaatgggactacaagcgcatgcgcgaaatcgcggacaagataggtgccatcctaatgattgacatggctcatcctgccggactgattgcagccggtgaactggataaccccgtgaaatatgcccacatcgtgacctccactacccacaagactctgcgtggtcctcgcggtggcgttatcatgatgggtaaggacttccccaacccctggggcaagaaaactccgaagggagaaatcaagatgatgtcccagttgctggattcagccgtattccccggtatccaaggtggtccgctggaacatgtcatcgcagccaaagccgttgccttcggcgaaatcctgcaaccggaatggaaagaatatgccaagcaggtgaagaaaaacgccgctgtcctggcacaagccttgatagaccgtggcttcaccatcgtttccggcggtacggacaaccactccatgctggtagacctgcgcagcaaatatcccgatttgaccggtaaggttgccgagaaggcgttggtatctgccgacatcaccgtaaacaagaacatggttccgtttgacagccgctcggctttccagacttccggtatccgtctgggtactcctgccatcacaacccgtggtgccaaggaagacctgatgctcgaaattgccgagatgattgaaaccgttctgtccaacgtagacaacgaacaagtcatcgcagaggtacgtgcacgcgtcaatgcgaagatgaaagaatacccgctgtttgcttattaataagcaaacagaattaaaaattaagaattaaaaattaaaggctgcgcaatgttcgctttgaactgcgcagcctttaatttttaattctaaacgcgcggagcgcgtttagctcagcccttctatatttccatccacaatatcaatgtgttcggcttgtggtttctttggtaatcccggcatacggagaatttcaccggcgatggctacaatcatttccgcaccgttattgaccacaatatccttgatgtggaactcaaagttgttgactgcaccgtatatcttcgggtcggcagagaaggagtactgcgtcttggcgatacagacggggtaatggctgatacccatctgctctatcagtttgataaccttgcgggagtggagactgtaagtcactacgcttgccccgtagaggttgcaggctaccttttctattttacgttccacgcaatcgctctcttcgtaggtgaaggtcagcggttcggatggtttgttctcgatagtatctactaccagattggcaaggtcaacggctccctctcctcctttggcaaaggcgttgttcacggcaaaacctacctcaagcttttcttcgcaatggcagcggatagcttccacctcctcgtccgtatcactggcaaaacggttgaatgccacgatgacctgctggccgaatgaacgcaaattgcgtacatgcttgtccagattgccgaagccctctttcagtccttccatattgggttccttgatgcggtccagactgacgccgccatgcatcttcaatccttgtgcggtagcaacgattatcgtcaacttgggctgtaggccgctcttgcggcacttgatgttgtaaaacttctccgcacccaggtcagccccgaaaccggcttccgtcactacataatcgccgaatgtcatggccatttttgtggcaagaatggagttgcaaccatgggcaatatttgcgaacggccctccatgaacaaaagcagcagagccttcggtagtctgtaccaggttggggttgatagcatctttcaacagtacggtaatggcacctgctactcctaactccttcactgtgaaaggagtaccatcgaaacggaatcccagaataatattttcaatacggcgacggaggtcatcgaggtccgttgccagacagagaatagccataatttcggaagccggggtaatatcgaagcccgactcctcggtaatgccgttggtgctcggtcccaatccggtgacaatgctccgcaaggaacggtcattcacatcaagtacgcgccgccagatgatttctttcagtccgaagccgtccgcctgatgctggtacaagtaattgtcgagcaaagcggaaatcatgttgtgtgcggaggtaatggcgtgaaagtcgcccgtaaagtgcagatttatcttctccatgggcagcacctgggcatatcctccaccggcagcaccgcctttcatgccgaagcaaggacctaacgagggttcgcgtaaagccacaatcgctttcttgccaatcttgttcagccccaatgccagcccgatggacacggttgttttaccgatacccgctttcgtagccgtgatagccgtcaccagtatcagattgctcttcttcactttctcttcatcaatcagatgcgtaggaatcttggctatgtaacggccatagttctctacttcgtcacgcgggatatccacactttcagccacctgctttatcttcttcagctctatgctgcgggctatttcaatgtccgatttcatacagagtcttttctttaaataacaactttaatgttttgaaagttgcaaaagtacgaaagatgtggcaaagtacaaaagaataccgtattttcacctgaccacctgcatcttctatctatttgaaccgcgacgtatccactgcctcccgttgcttctccttatatccaccgaatttataagtaaacgatacgccgaattcgcggaagcatgagtaatgattcgtcacattctgcgtcttgaaacggatgcggggagaaatctgtcccgtctcaaaaatatcgttgcagtagaggttgaggatggctttgttcttagcgaagccgtagcgcagggcaatattcacattgcccgacgtgggcaggtcgtaaatgccttgaatggctttgctatgcacaaatccggccaccgtcagcttcaaatcgggcttggtggagagagtaaaagtattgttcatctgggcaatgccatagcattgctttctgtcgaaaggaatatcccagaaatcaccatccttttcgcggtgccacaagccgataagggtaaggcgcgaattcaaccagttcttcaccttaaacgggatagaggcttgtatgcctgcttgttgctgataatcgaaattgagtgtcttatagatttcaaccagacgttcggaagattggtaaagcgtctgtacggagtagtctttggtgtggttgaaccaggcgctgaagatgtatttgcttttcaaaatataggtcattttcagctcatactcttgtgccggtttcagcaacggattaccatgcagctcagagtatccaccgccgatgtaagagacggcatcctgcacggcccagtagtcgggatagtccttgtcgctgctcaaggagagctggaggatatgtcccggtgccggcatatagttcaagttgacaatgggataccagtcccactggtcccagacgggagtcttgtaatgctccacagccagggaagcgtccaaagcaagtttgtcgccgaaactcttgctgaaacctgcatagatattccaggtctgctcgcggcggcgggacttcatattgctcaaggcatccgatgaggtcagttgtccgccggtttcggggtcataataatattggtagctgttgtcgatgctggtagtatagatggctccgtaattcaaatcccaaccttttcccagactgtgctcctgggccagaaagaatttccagcggttgatgcgctgacagtcttccgtgtagaaatcgagttcctcatcctgcatacggctatgcagtagttggttggacggagagcggtagtaggtcagttcggcaccggctttgaggccgaaaggggtacgatagtccagacggccgttgtgcagccagtcggtgctattgctatgagttgtggacacctgcgtgcccgtcacgcccttccagttgtgggaggtggaatagccaccgttatagacgaaactcagctgatggttcttggcgatattatagtccgcccctaccctgaaattatgggtatggctgcggccacggcccacctcatctgttgtcatggggtgaaccgagccgtccgccagggtgtgcacagcctctttgtcggtagtagagtagccccggccatggctgtgcgagtaaagaaaatctgctgagaatttatttttgctgaagagcaggctggcgcgttcctcaaagccttcgttgtgcttctggcgatacttgacgtagagttcgccttgccaggagccggggccgcctgccgattgtttcaaggtgatattgataagtgcgccacgcacctggtagcgtgcaggggcgttgtacatcacttccgccttctctatgcggctggcagggatgctgcgcagcaaggcatagagctgccctgtgctgagggtggttactttaccgtccaggataacggtgactccctggcctgccaactgcagcccgccattcatctcgatgacgccgggaagctctttcacggcatcgtaggcattgtctacggggaggttccggataaggcggggcaggtcgtacaccagcttgccttgcgctgcctttacgatggggcgttcaccggtaatcatcacttccggcaaggtctgataaaggctgtccagacgggcatcggtcgtgataaggctgtcggcgctgaggatacggttgtcgtccgcaccggaggtggttgcagtgccgttgttctcttgtgccgaaaggctgatgctcaatgcacagcatacaagagggagtaaatagaatcgtttcatgttcttctttttatttatgttcatattcttcttctgtaaatcttcgtctgcaaagtacggcagaatcagcagaaacttgtgttatcagcggcttaccaagtgttatccagtgttatcgggagtgttatttagtcttatcggatgatagggttcacaatattagtcttacctttgtatgtataaaagtaaccggaaacaaacatgaaactgccattcaaatatattgccatacttgtcatcgtctccctggccggcatcttcgcctaccaagcctactggctgacggggctctaccataccatgcacagtgaaatggagagggacatcaccgaagccatgcgcatgagcgactataacgaaatgatgatacgcgtggataaaatgaagcaggacgacataaaccacggtgaagtcagcgtatcagccggatacagcgatgacggaaaatcatttgtccgtagcagtaccaccatctcccgtgaagattctttggacaacaccaccctgcacgaaaccttcatgcccaaaggagacagtgtttacgtgacccacccgaacgattcaacccgcgtggaagtcagtgtcagggactcggacagctctccccaatccgcattgagtgccaaagggggactggatgtgattttgcgcgaccaaaacagtatgctggaactcgccacctacttccagcgcggactgcattcgggactggacatcatttccgaccccgacgtaatgctttatgacagcctgctgacttcattcctgcatgaccgtaacatcaatcttccccataggctgctacatcttcacaaaggcagcaaatgggactctaccattctctatatagatacattggtaaacatcggtacccccggctatgtgcctacctcaaaagccgtggaatataattattctttcgacatcaatacaagtcaaagctaccgtctcatcatggaaccggccggcacgttggtcttgcgacagatgtcgggcattctcaccacatcattcgttattctgatcgtactcgctttctccttctggttcctgatacgcaccatcctgaaacagaagacactggaagagatgaagagcgatttcaccaacaacatcacccacgaactgaaaacccccatcgccgtagcatatgccgccaacgacgctctgctcaacttcaaccaagcggaggaaaaggcccagcgcgacaaatacctgcgtatctgccaggaacagcttcagcgcctcagtggactggttgaacagatactttccatgagtatggaacgccgcaggactttccgcctgcacccggaggagtttgcaatacgtgatattctggaaacgctcatcgaacaacacaagctgaaagcggaaagctccgtccacatatcggtggacatcgaaccggaagatttgagcgtacttgccgaccgtacgcatttcagcaacatcatcagcaacctgatagacaacgccatcaaatattcgcacggagaagccgaagtgaccatccattgccgtaaggtaaccgtcgaaggacagaatgaacagaccgaaatctccgtcagcgaccacggtatcggtattgctcccgagaagcagaagcacatcttcgacaaattctaccgcgtacccacgggtaatctgcacgatgtgaaaggctatgggctgggattgttctatgtgaagaccatgatagagaagcatggtggcagcgtatcggtaaagagtgagttgggaaaaggaagtacctttacgataaggatatgataacattatttgttagggtactttacattacttgttaaggagctttacattacttgtaacaaaagcgacaattatggaaaagataaccgtacttctggttgaggacgaacagaccctcgccatgattatcaaggacacattggaagggcagaacttcatcatccacaccgcagcagacggtgaagagggattgcgcaagttcttcgacctccgtcccgacgtgctggtggcagacgtgatgatgccccgcatggacggctttgaaatggtgcgccgcatccggcagaccgacaaacagaccccggtactgttccttaccgcccgctccaccatcaacgatgtggtggaagggtttgagctgggtgccaacgactacctgaaaaagcctttcggaatgcaggaactcattatccgcataaaggccctggtaggcaaagctttctcctttacagaagaaaatcccaaggaaactaccgtttttgaaatcggtgactaccgtttcaattccgtcactcaacgacttgcttttgcaggcagcaccccgacttcacctgacgcggatacggaagtggaactctcccaccgcgagtccgaaatactgaaacgcctttgcgagaaccgcaaccaggtggtcaacacccagaacgtattgctcgacctctggggagacgacagcttcttcaactcccgcagcctgcatgtgttcatcaccaaactgcggcataaactggccggagacgagcgcatccgtatcgtcaatgtgcggggaataggatataaactaatagtgaactaaactaaaactaaactactatttatgagaaagttattattcattacttttatctgttcctcactctgcgcctatgcacagagcgagattccggaagacacaataaagaaccggcctcccgtaaagaaagagcagattcccttttctccaaaagagaacaagcgtacgggccttgatgaaagccagccccaacaaagtctgcagggcgaacagcaggaagagataaatctccatctccctccctccgactatgtggagcccctgccctggacggacatgaagaagatacactttcagaagaacatctttgaatgggacttccagcgtttcgccgatttcctgctctcgccggaagtcgtactgacgatgtacggcagccataacacctatcctgcaatgggctccatcatgcaggctggcgcaggaattacttattacagtcccgacggacattgggaactgagcggcggagtgtatgccgcccactattccatctcccaaccttcatccattaccggtgcccagtatgccaaaagggatgccccccggggtactcaatgggacataggctacaatgcctccgtatcctaccgcatcaatccctacatacgtctacatgccttcggccagtattcgggctacgggagaagtaactcctttcatggatatatgaacccgatgtatccgcaaagcggttatggcatggtactggaactgaaagtgacggactggctcgacctcaacggagggatggaacgaagatacgaccccactaaaatgaaatgggtaaattcgcccatcttcgcccctaccattcgtataaagaaatagaaataatacaaagatatttccagaaatagagggaaacgagtatctttgttcagtccgcccctatgcggcagacagcaactgaaattgtgaacaaagaactatgaaacgaatcttcttctgcatcatcattttacttgcaggcatgtcatccgtcagcgcacagagcgagatgcctgccgatacggtacgtactgcagtacgtggcgaagcgtctcccgaaggcatgtctccgtccgaaaaggaacttctgccggacgtgaagaattacgacggcttcctgctggatatggggctgatgaatctgtccgcccccactcttcccaaattcactttggagataccggatgccagcaaagactatagccgcatcttccagttgaacccgaacgtgacttattcacaaggtctttcgaacatattctcactcagcaactcccggtatttcagttcgaatcccttcggactgacgggcttctggggctctaccgacaacctgcaaatgggaagtttcactttgaagaacggcatgcgcatccatacgtacggcgaatatgacaaggacggctggaaagtgcccaacccttccgcactgccttgggaaaagaacaatttcaaaggggcgttcgagctgaaatcagccaacggagccttcggcatacgcattgaagtgcagcagggaaggaactatccatattgaaaggggccgaagtgacaatgtgactctggcagccccagcatgcttcttttgtctgtcttcaatcgcgcatttataaacgtaattatgaaaaggaaaatattggtgataggcgccaacggttttaccggcaggcgcatcctggacgatttatcccataatcagtcttaccagacaacgggctgttccctgcacgacgacatctgtccccattcgggcgactatcgctttatccgtacggatatatgcgaccgccaggcggtggaaaagcttttccaggaagtacagccggatgttgtaatcaatacctccgccctctccgtccccgattactgcgaaacgcaccatgcagaagcggatgccgtcaacattactgccgtggagcatctggcagaatgctgtgaggcgggaggcagccgttttatccatctttccaccgacttcgttttcggtggtgatacggaccgaccctatacggaggaggatattcccgctcccgttaattattacggctacaccaaactggaaggtgagaaacgtatcgctgccgtttgcagggattatgccatcgtgcgcgtagtggtggtgtacggtgccgccctgcccggacagcatggaaatgtgctccaactggtggcaaacagattaaggaacaatgaggaagtgttcgtcgtatccgaccaatggcgtacgcccaccttcgtgggagacgtgtcgcaaggagtggagaagctgataagtcatccgcaaaacggtatctatcatctctgtggcagcgagtgcctgaccattgcagacatcgcttatcgggtagcggacgtattggggctgaatcgctcgctcatccgtcccgtcaccacgaaggagatgaacgaaaagacaccacgtccccgtttcagcgggctgagtatagaaaaggcacaccgggaactggggtatcgaccgtatacgctggaggaaggaataaagctgatgttcggatggtaaataatgcaggtgcggatggcagcagattcgactacagcaactccggctctgcaagtccattctctttgcgatacacacgtaccatctccagaatcacatctccatatttctccacccctttttttccgaaatacggaatgcgtacaagcatggccttatccgaaggaagcagattgctgatgcctagaattgccttctgctgaatgacggtgtatacgggcagccctaatgcggaagcttctgcattgcgccatgctaccaagcggttgtaaagttccggatgcagcacatccgtgggtacttcaacagccgcagcatcgcgtttccgctcacgcggacgtttctctttatcagcctgcttactgcttccctgcccttctttggcagaagcacttctccctttgcctttacccttctgcgaagccgaatcatcaatggaaagcagtgctttctgcttcaagtatcctgccatatggaaaccattctccagcacataatccagcaaatcagtcttcatgtcaaacacttcctccagctcctccatggcatcccggagcttcttcttcaactctttattatcagaagttaccgtactcgccatcaccgcatccagcggttgcaactgctcttgaaaataagtggcggcagagtgtatgcgcccctgcaaagtcgggtcggctgcatagtcctgcgcagtatcaatcaggcgggtatactggatactgaacttctgggctactttcgtcactttgtcgtgaaaacgttccatttcctccttacaggctgcgagttgcttgggaaagagcttgtacaagtgttcgtctatcagccgcacataccgccgcaaagcctgctccatgggctggaaatcgaacaagcccgacagcagttccaggaaataggtctgctgcaaggaacggaagcgtttctcgtccggctcgtttctccgtgcctccatcgtgaaggtatctactgcatggtcactgataacggcctttgcagaaagcggggcactgagcaccactccctccaatgtcttgcagcggctcagagccacataggtctgcccatgcgcaaaggaggcactggcatcaatcacggcacgttcaaacgtcagtccctggcttttgtgaatggtaatcgcccacgccagcttcagcggatattgccggaatgttccttcaatatcttctgtaatctccttggtttcctcatcaagcacgtatttggcattcgtccactcttcctcttgaagtaagaaggtagcgtcgcttcccttactgcgcacttcaattccatctgccgacacggctgtcacctctccaatcatgccattgtagtaacggtgctcaccggaggtgtcgttcttcacaaacattacctgagcaccgcgtttcagttccagtacttcatccgtgggataggaatattcgggaaactttccgtcaatcttggcacgaaaggcatacgagcgtcccggaagttgttccagctcatggtcattaatccgttgggcctgataattgtgggtcaccaggcggatgtatccttcttctttatctggtacgaaattgggaatataccggcggttcaaggcttccagcacttgcccgtcacaacggttttcgcgaatgcggttcagtaattcaagaaaagtcccatcgttctgccgatagactttctttagttctatggtgcaatattccgtctgcttcaatgcctggctggagaagaaataaggcgtgtcatagtatttgcgcagcatctgccactcatcgtctttcactacgggagacagctgctgtaagtcgccaatcatcagcagttgcacgccgccaaagggtttgttccggtcgcggaaccgcctcaagacggcatccaccgaatcgagcaagtcggcacggaccatactgatttcatcgatgaccaataaatctatgctgcgtataatgttgattttctctttcccgtaacgaaaacggtaggttgccttgccatctgcgctgaatgagctttcgggcacataaggagcaaaaggtacttggaaaaaagagtggatggtgacaccgcctgcattgatagcggcaattcccgtcggtgcaagtacaatcatccgtttcggactctctgccctcagttttcgcaggaaagttgtcttaccggtacctgccttgccggtcaaaaaaagatgagtgcctgtgttttcaatgaattgccatgcaagcgctatttcgggattattctccat

SEQ ID NO: 495 - DNA, 7433 bp, unidentified
  source 1..7433: mol_type = unassigned DNA
ctaaccattcacgtactccaatgcaaacctcgtccctttctccaaatcccggttcacgttctttcccaatatatctttcagatattttgggtgcaggccgaagcccggacggatggagcgaacgttccactccgtaatcacttctccggccttcatatcctcggccacatagagagaacgtgatgcggaacggctacctctcattttctccgtcaattcgtaagtcattttccccaaagataactcagccatgcgcacatcttttaccatttgggcaaaatctttctcttccatagaaaaagaacaatccgggccaccaatggaacgattcaaaataaagtgcttttctatcatactcgcaccttgagtaactgccacaatgggagaaacactccccaaggtatggtcggaaagtccactttttacctggaaacgttctgccaaatcacgaatcatacaaagattggcttcctcaaccggagccggataagaagaggtacacttaagaaccgtaatatcattatttcccattctgcggcaagcttcaacagccaattgaatatcttcctcggtggctatgcctgtagcaagtaccatcggcttatgcttcgaagccgcgtattctatcaatggaatatccgtaatttcgaaagaagctatcttataaacgggacagtccaaagcctcaagcatatcgacggcagtcttatcaaaaggagaagaaaaacagatcagtccttcttctttggctacatgaaacaactcttcatgccactcccaaggagtataagcctgttcatacaaatcataaaaatattgcccgtcccatatagagccttcattaattataaaatcaggcttgtcacagcgaagcgtaatggtatcagcccgataggtctgcaacttgacggcatcggctccggcacgttttacagccctgacggtttcaatggctgtttctttcttaccgttatggttggcagacatctcagccacaatcatacacttatctctcatgtctttactatttaatcgtccttagaatactttcaagctcttccatactatcagtctgaagtatgatataccctaaacggtctaaagagttttttatttttttttcagaataaggtcttatttcagaccgaaaaacagccgatgaccgggaagagcttagaaaatccacacaacgctgatagttgagcggattaaggaactgtaccgctgagcatttttcatgtttgcgaaggacatcaacgggcaaaccaagagaacagttcaccagatttctcagcatatctatcccggttgacaatggaaccaaatcagaggttatataatctcctccaagccggcaagcaatttctatgatataagcgcccgattcattcagctttatttctgtatgcgaggggcaattattaagtccaatcaggcaaagtgcttttgatacggtctccgaaaccagctcccactcctgtttcgttatacgcgccggttcaatgtgcgtatcttcaacaaagaagccttctgcctcaccgatacaaagtttctccgtaatagtgacaacggtagttttattgttttgcgtatatgtttcaacactgaattcacggcctgttataaagccctcgacaatggcctttccggtacgggaataaccgagagcttcggaaaaagcaagtacaagttctttatgatttgtaaccttttttactccgcggcttgcagaggaatctaccggtttgacaatatatggataatcttgcaatgtgcccaagtccgtatctttatcacaaagcatgaaaaatggtacatcaatcccgttggccgcaaacatttccctctgcaagtatttgtttgtacagatttttgcgacctcagtggacatggacggaagccccagctgttccccgacataggaaaccacatttacaggcgcgtcacttgtagtaagtatgccgtcaacagagtgacgtttggcacattccaaaacaccttccttatccatcgtgctgacaagaaccggttccgaggcgtaccccattcccggagcattcgcatccatatctgcgactatggtatgcaatcccatatcgttcgcctttcggatgacaggaacctgcatttcacctgcgcccagtatcaataatcttttattcatataaccgaatttatcacatcacagatctttcttgcctgtgcttcactgaaccggaaatcattaaacaaattgacgatatgcttcgcctccacttccgcaacaggagaagaaacacctttgaacatgtatgaaaccgaagggaaattagtcccggcaaacagaccggccttgaatattgcgtcaagaaccttctgccggttctcgatgacaatcatgaacctccagttctggaaatcatctcccatctgaatcgattcaggaagcagattcctgtatatcttgtttattttctctttttccgcaatcacttttgggagctttctttcaatgatgtcaaaatattcctcatcggtcatttgcaaatttgaggcgtccagccaaggatagtcagccggaagcatatatctgacattctccaggagacatttccttatatataccgaatgcttttgttcactaatactatcatactgataatcaacaacttcgtaccccccctaaaacttgcatagccaccataggaaagttctatgaatttggcatatccggtactgtaaaggcagagatccacattttcaggcaaggaatctgccaattcgggaatgcacaagcaacaatcatcaatgatacaaagatttggatcgagacttttcactgcccggtaaaattctttgttgtcatactttttcccgtaggcatgcacaaatacaagaccggaatattttcccgcctctatagctgtcaaacatttctcggttgacatggcatggctttcatctatgtctataaactcaaaaccgacacctgctttcataaacgacaggggcactacaggacacacatttgccggcaataagaacggtttatcaaaatggttgccagacagataattatacaatatggccgaagctctttgtgaagttacttgcatatcaacagacttttaaacaaattgacaaaccgtttgggaatatccggagtgatggcatgtcttttacgaatggccatcttatccaaattctcagcaacaagagtaaaggcagcggcatcggtataatcacccgccccctgaatcagcccttcacgcaaaaacatataatagtcgtgctcctgattatcaacataataccctcctataacaggagttccacaggccaatgcctcattcatcatcgtagaggcaggcaatatggcgacatctacagtactaaacaagtctgcaatggaaccggcagacaaattcttctgataggttactttggggtcatcaaccatattctcggctgcatacgaatcaccgacaattgccgttatcttcttcacattgtctttggctttaattgcatgaatggtctgatacgtcaaattcaagaaatcagaaccaccaaaagccaccaatacatataaacctcctgaataattgttccgtttattctgcagcgcaacattgaagaaaggcctcctcaacaatgaaaattgaagcccaaaggcaaattgagtatatggttcacacgaatagtcatcacgcgtgtaacccaatccctgattgactataagatcagccacatagtgcttgtcgtgcatatcatccacacacaccagacagcaacctttttgcttgatggcacgctggtaatcagtagtaaagaaatagttgtcaagtaccacaatttcgtcaccttgcaaaagggaaaggaactcatcataatgcgattcttcttgtaaggggatgaaaggacataccttctccatctcactcacctgataaggggtaggatggcaagtaaagaaggtacaatcaaaatcgtccttcagcatatcggccaaagccagagtacggataaagtggccgtagccgatggtagcgcttgcgtcggcacggaaatagattttctgcattacatcatttatgaagcaactcatacttcatctctgccaatgcccagtcagtctgtgtatcaaggtcctgcacttcaagttcggaaagtaccaacccggctgtattctcaccccaaaaagtccggctctccacaaaggaagcagtacgagagaaatagaactgaccggcatcgtgataaatcggttctaaatcttgggaacgtgcatttttgtattcgggataaaccatactaatttttccatccacgatgtgaaggctgcgctgtataggataggaataagccacacaagtgaaaacggaatctatctccgaattcatttttccgtatgcttcccggagtctttcgggagtgacaaaaggagccgttgagtaaatgcaacaaaccgtttcaaactccctgccttgctctttatacttcctcagtacttcaagaattacatcatcagtaccagcatagtcatttgacatctcggcactccgcataaaaggaactttggcaccatacttacaagctattccggcaatctcctcatcatcggtagaaaccatcacctcctcaaaaagaccgctttgtaaagctgcctctatggaatatgcaatgataggtttacccataaagggcttgatattcttacgcggaatacgtttactgccgccacgtgcaggaatgattgctatatttttcatttctctacaaattctataaccttttcaatcacatactcctgttcctcgtccgtcaacgtgggatacatcggaagactcagacaatgttcgtaatactcttctactataggtaaatcgcctttcctatttccccactgctgatagtaaggcatcagatgaagcggagcataatgaacctgcgcatagacattgttctcgtgcagataattataaaggcccaagcggtcagctacttgaatgatataaaggtgataagcatgatagacatcggcagtattgaacggagtcttgatgccatctattccggaaaacgcttcattatagcgtcttacgatttcatggcggcgttcaagacctgctttcgcacgctccagctgagaaatacccaaggcagcctgaaaatcagtcagacggtaattgtagcctaactcctgcatctcgtaataccagccaccatgatgctcgtgcaataaagcagggtctttcgtaatgccatgcgtacggtaaagacaaagcttgtcatagagctccttgctgttggtggtcaccatgcctccctcacccgtagcgatatgtttcacgggatggaaagagaatacggcacagtcggcaaaacaaccgttaccacaatgttgtttcttgcctttactgtccatgaaatagccgccgggagcatggcaggcatcctctataatccacaagccgtactcgtcggcaagctttctgaactcttccagatccaaaggatagcctgcaaaatcaaccggaacaatacctttgtaagtaccgcggggagaagctttaagcatggcttcaagtttacggatatccatgaggtaagtatccttgtcaatatcacagaataccacctcgccgccacaatagcggatgcagttggcactggcagcaaaggtcatgggagtgacaatcaccttgtcacccggctttacattcagtgcggtagctgcaagatgaagccctgaagtggcattgttcaccgctacggcatattgtgcacctacatattcggcaaatttcgtttcaaattccctgattttgggaccttgtgtcaggtaatcgcttttcaaggtatcgatgactgcccggatatcctcatctgtgatatgctgacgaccgtatggaataggcttgcttatcatttcacctcgaaattagggtcaacgtatttctttatattctcgcgcatagtctctactgtctcccactccgtattgttgtcactgctgtagtggaaaccgtcgggaacgggtactgcattgtgatgtctgatgaactcttcgcgactgtgcttgaaagatacagaaggaagaatgacataatatctgcccaaatcgattgtatcaagagcatcggttacagtaatcatctcctcgtgcagcttctctcccggacggatgcccacttccacctgcggcagattgggtgcaatggcggtagccacgtcctggatatgataggaaggaatcttaggaataaagatttcaccacccaggtgatgtccgatggcatacatgaccaaagcgacaccggcttccagcgaaatgttgaaacgggtcatgcgcatatcggttatgggaagttccttcgccccgttgtcacgcttgttgataaagaaagggattacggaaccgcgggaacccatcacattgccataacggactacggagaacctgatgttcttggaaccgctgatattgttggcagcagtaaacagcttgtcggaagtgagcttggtggcgccataaagattgatgggggcacatgccttgtcggtagaaagggccaccacatgctgtacaccggtggcaagagcagcctttatcacattctgcgcaccgtgtacattggttttgatgcactcttcgggattgtattcagcggtatccacctgcttgatggcggctgcatggataatcacgtccactccttcgcaagcctgcgtcaggcgttcgaggtcacggacatcaccgataaagaaacgcagttgcggatacttatgaccgggatatttctgtttcagctcaaattgcttcagctcatcgcgggagtaaataatgattttctttacttgcggataatcacggagaatggtttccacaaacttctttccgaaggaacccgttcctccggtaatcaatacggatttattgttaagcattataatgaaaagttttattcatcgatatattcccacggatagggattgtctgtcacattctgaaactcatcaaccgcttcctgctgttcgggagtaagtgataaggaatcccaagaggcgatgatggaacggccctcgtcggccaaagactcgtcgaacacttcaccgtagcaggcggtaagcagacggagcttcagtaaggaagcgggaagggcatcgagcacatcccaacaacagtccagcactttctggacatgccgctgcttttcgccatggtccacaaaagaggcgctgtaacccataagaagggcaagacagacatttgcctgctcttcgatggtagtgccttttacacccgaccggtacaaagccatggtaagacggtagacctcaccgttccgccgtgacaagtcatcgctatagacgggactgccgtccatacccaaatacatcagttcgtgcgcagcacgctgaagagtgattgcttcttcggaaagagacat

SEQ ID NO: 496 - DNA, 5548 bp, unidentified
  source 1..5548: mol_type = unassigned DNA
ttatttccggtcgttctcccggatttccacacggcggattttcccgctgatggttttggggagctcatcaacaaattcgatgacacgcgggtatttgtagggagccgtcactttcttcacatggttctgcaactccttgacaagctcttctccggtgcgtgccttgtactcttttgccaacacaatcgtagcttttaccacttgaccgcggatttcatcgggcacaccggtaatggcacattccactacggctgggtgggtcatcaatgcactttccacttcgaacgggccgatgcggtaaccgctacttttgataacgtcgtcggcgcggcccacgaaccagaggtagccgtcttcgtccttccaggctacgtctcccgtgtagtaaatgccgttgttccatgcctcgtgggtacggttggcatcgcggtagtattccttgaacaatcccagcggtttgcctttgtcggtacggattacaatctgtccctgctcaccggcttccacggaacgtccttcgtggtctatcaggtctacgtcgtattgcggattgggcaatcccatgctgccgggtttcggttccatccacggcatggtggcaacggtaagggtcgtttcggtctgtccgaatccctccatcagcttgatgcccgtcaacttcttgaaggtctcgaatacggcggggttcaatgcttctccggcgatggtgcagtattccagactggataggtcgtacttcgtgaggtcttcgtggatgaggaatcggaagatggtgggcggcgcacaaagcgacgtgacgtgataatcttgtatcttctccagtatggctgcgggagtgaatttctcgtggtcgtatacaaatacgttggcgccggcaatccattgtccgtagagcttgccccacacggcttttccccaaccggtgtcggcaatggtgaggtgtaggctgctctctttcaggttgtgccagaagctgccggtgacgatgtgtcccaacggataggtgaagtcgtgggccaccattttgggctctccggtagtgccgctggtgaagtacatcagggagatgtcatcgttcgtattcggatgttcaggtttcacgaaaggagcggcagcctcgatacctttgtgaaagtcttcgaatccttcgggaacttccggcccgacgcttacgaggcgtttcacagaaggagactccggcatggctgccgtgatatggtcggtgatgacgctttcgccggcgcagactatcatcttgatgtctgcggcgttgcaacggtatacgatgtctttcttcgtcagcaggtgggtggcgggaatcaccactgcaccgagtttgtgtagtgccacaatgctgaaccagaattcgtaacggcgcttcagtatcagcatcaccatgtctccgtggccgatgccgaggctttggaaataggaagccgtcatgtctgtgtaccgtttcatgtcggcaaaggtaaactgccggcattcgccctggtcattggtccacaacagtgcgggtttgtcgggttgctcggcggcccaggcatccactacgtcgtagccgaagttgaaattctccggtacgtttatcttcaggttcttgatgaagtcctcctgtgaggtgaaggatgtttgagataaaaatctttctaccataactttattacataattactgccaggaattttacagtctttccgtcaagcgccttcatgccgtgcggcagtttggagttgaagtatagactgtctccttcgtttaagattaagtctttgccgtcgatgctgaccatcatacggccttccagtacgaggttgaactcctgaccggcatggctgttgtaatgtatcggctcgctgtccggtttcggttctacggtcacaatgaacgggtctgccgtgcggttgatgaaaccggctgccagcgattggtatttatatgccttggtacgttctatactggttccttttccggcacgtgtcaggaagtaggagctcattttgggctcttgcccaaacatcagtgcgtccagtgatatgccgtagtgccgtgctatcttctgcagcatgctgaccgagatgtcgaattctccggtttcggccaggcggtactcttctgcagaaatgtcgcagtcacgggcgatatcgtcggcagtcagttccaatacgtcacgcagtccgcgcaggcgttcggctatttgtctgatttgttcgtccataattatattttttaatgggttgttattaaagtgtggcaatgtgccaataggctgcacaatgtttaattacaccgtagctcataggcatatcgggacatcgttacattagcacattaaatatcatttactcgctttgatggctttaatcacagtggaggtgaatccttcatgttccagctcgttgattcccttgatggtaattcctccgggggtacacaccttgtcaatctcaacactggggtgcgtgtcgttgttcagaatcagctcggctgcccctttcacggattgtgccaccatgcgcatgccgtctttgggatagatacccatttcaacgccggcctgcatggctgcctggatatacttaagcacgtaggcgatgccgcaggaagtcatggcagtggttgccgcaatcttttcttcgggaatgagcatggcgagtcccatctggttgaaaatgtccagcatcagttgctcctgctccttggtggcattgcggctggcgatgagtgtcatgctttccatctcgctgatggcggtattgggaataagacggaacatggtcatttctttgtctgctacatagtgtgtcagcttttcaaaaggaatgccggctgcaacggatataagaatctctgtgccttttagttccagttcctttatcactggctccatcagccatggcttcacggcaaagattatcatatctgcaccggctgccgcttcctggttgtcattggtcacttgcaatgcggggaattctgccttcagcttgtccagcttgccctgggtggggttggagacaatgatgttaccggcagggatgattgttccttttgccagccctcgggcaatggctccccccatatttcctgcaccgataattgctgctttcatatctttttgttgttaaaagagttgttttgctggcaaaggtagataaattttctacaaaaaacgaccgagagagaaaggtattctgcttttcggtcgtttcttttgctggctgattatttgtgtcaaatattaaagtactttcttgaagcgttccaagaattcctttgcttcatccatgccgaggcacagaggcggcagcaggcgaagtacattcgtaccgcttacaccggtgaatacatgctgctctttcagtagtcttaggcgcagttccttgatgggttcttcaaattccagccctatcatgagtccgcgtccgcgaacgtccttgatttgagggaatttctttagttccgttatcaggaagttgccgacttgggctgcattctctatcaggttttcctgctctatcacatccagcacggcaagggcggcactgcaagctaggtggtttccaccgaaagtggttccaagttgcccgtatactggtgtaaacattgggctgatgagtacgcctgccatcgggaaaccattgccgatgccttttgccacggtgatgatgtcggctttgatgccgttgtactgatgggcgaagaacttgccgctgcgtccgtagccgctttggatttcatcgagaatcaagaccgtgttgtgttccgtacaagtctggcggagagcctgcatgaattcgtctgtcggcagttggatgccgcctacaccttgtatgccttcgataatcactgcgcagacatctcctttggaccattcggccttcatggcttcgatgtcgttcaacgggaggtaggtgacgtgcccgcagttgttgatgggagcgatgattttaggattgttcgttacttccaccgccagtgaggtacgtccatggaatgcttttgagaaggatatcacacgggtacggccattgtagaaagaggcgagtttcaaggcgttttcattggcttcggcaccgctgttgatgaggaagaatgagtagtcgtcatagccacagacttttcccaagcgttctgccacttgctgttgcagcttgttaattactgagtttgagtagaatcctaacgtagcaacttggttactcaccatctctacataatgtggatgtgcatgtccgattgagatgactgcatggccaccgtagaggtcgaggtattcggtaccgttctcgtcccatacatggcagccttttcctttgacgatgttgatgtcaaagagagggtatacgtcgaataaattcattttttttagaatgcagaaggtttcaaccgtaatcctacggtctcttccaggttaaacattaaattcatgttgtggactgcttgtccgctggcacctttcaggaggttgtcgatgcaggaaatgataagcagcttgtcaccgtgcttctccaggtggatgaggcatttattggtattcaccacttgtttcaggtcaatgttcttttccacgacaaatgtaaaggaatctttggcgtagtattcttcgtacatacggatgatttcttccagagccactttggtctttactacgatggtagtgaagataccgcgcgggaagtcaccccggtaggggataaaatctatttctgcatcgaaactgttttgcagctggcggagtgattgcttgatttcgggcacgtgctggtgctcgaaagctttgtaaacactcatgttgttgttgcgccagctgaagtggctcgtggcacccggtttcactccggcacccgtacttccggtgatggcattcaccatgatgtcatcattcagcatcaggtgcttggcgagcggcagcagccccaattgtatgcaggtggcaaagcagcccggattggctacatgctttgccttgcaggtggcgcggcggttcagttccggcaagccgtaaatgaagtcgtggtcaggagaggctatgcggtagtccatggagaggtcgatgattctcagctcctcgggcacgttgtggctttcgaggaattttctcgtgtcgccatgtgccgtacagaaaaacagcacgtcgatttcttccagcggaagctggtcggtaaataccaaatctgtttcaccgtacagtccttcgtgtacatcagtaattttgttgccggcgttgcttgaactgtttatgaatacgatttccgcttccggatggttgagcagtaaacgtatcagttcgcctgccgtgtatccggctccgccgatgattcctactttaatcatttctataatatctattggattcttctggtatgataatcaataatataatgtatataattacacctgcaaaagcagtaaagacggtagcgaacgtataaacgatgcgtactaaagatacgtcaagtccgaaaaagtttgccagtcctgcacatacaccggaaagtattcttccggttcggggacgtgtcagtttccgtttcttgtccgtcat

SEQ ID NO: 497 - DNA, 6744 bp, unidentified
  source 1..6744: mol_type = unassigned DNA
ttatttgcctaactcagcttttaatgctgttgttaaagcaggaacgatcttattcagatcaccaaccagaccgtaatcagctacgtcgaagattggagcatcttcatctttgttgattgcgatgatcaggtcagaatcttccataccagctacgtgctggattgctccggaaataccgattgcaaagtagatctgaggacgaacagttttaccagtctgacctacctgtaaatcaactggtaaccagccattctctacaactgcacgggagcagcttacagtaccgccaagtacctctgcaagatcttcaagaagtttgaagttctctttggaaccaactccacgaccaccggaaacaaggatctttgcttccataatgtttgctgtgctcttaacagcttttacgatgtttaagatctcaacatatctgttgtttggtgtaaatcccgggttgtactctacaacgtttgcttttgcaccgctgatcggagcgatcttctgcataacacctggacgtacagttgccatctgaggacggttgtccgggcaggcaattgttgcgatggtgttaccaccaaatgcaggacgtgtcattaataactggttgtgtttctgctctgattctttaccaggtgcagcaaccagtgggaaatcaccgatctcaagagatgtacaatctgctgtcagacctgtttttactcttgcagaaacagtaggtcctaagtcacggccgatagcagttgcaccaactaacatgatttcaggtttgaactcgttaattacagatgctaatgcatgagcatacggctctgttctgtagtcttttaattcaggatcatctactacgataactttgtcagcaccatactcagctaactgatctgctaatccttttacaccagaaccaattaatacagcagttacgtctgtacctaaatcttttgctaagtctttgccttttccaagtaactcaaatgcaacgccatctaatacgttatctacctgctgtgcaaagacaaatactcctttatattcttctaatgccatgttattcaccacttttcctttttttattagataatgtgtttctctttgaatttaccgatcaaatatgctacggattctgccggatcaaggtttactttctcaccagcaccctttgcaactttatcagatgcttttgcaatcttagtaggagatccctttaaaccaagatcagaatcgtcaacatcctttaagtctgctctgccccaaacggttacttctttgtcaaatgcatcgaagattccgcccggtgtcatgtaacgcggctcatttaattcagaaagagcagttaccagacaaggcatttttgctcttaactcatgatatctgtcttcgtactgacgttttacaacaacagaatcaccctctactttgatgtctgctgcgtaagagataaccggaagtccaagatgctcagcgatctgaggaccaacctgtgcagtatcaccatcgatagcctgacgtcctgtgatgatcaggtcatagtctaagttacgaagtgcaccagcgattgtggtagatgttgcccatgtatcagctccacctaatacgcggtctgttacaagaactgcttcatcagcacccattgctaatgcttcacgaagaactgcatcagcctttggaagtcccatggtaagaactgtaacttttgctcctgtctcatctttgattctaagtgctgcttcaagaccagctttatcatctgggttcatgatagcaagcattgctgctctgtcaagcgttccatccgggttgaacttaacgccgccctttgtatcaggaacctgtttaatacatactacgatattcatgtatttttcactccttatgttttatatgtttaaattttacgcggattgattcgaaattactttaacagtgcaccggagattaccatacgctggacttcgcttgtaccctcgtagatctcagtgatcttagcatcacgcatcatacgctctacatcgtactctctgatatatccgtatccaccgaataactgaacaacctcagttgtaacagccattgcagtctctgctgcgaataatttcgcttttgcagcttctacagaatatactttctgagtagcttttgccattgcagctttgtaaactaaaagctgtgcagcttcgattcttgcagccatatcagcaagtttgaactgtgtattctgctgctgtgcgattgaacgtccaaactgttttctctcttttgtataagcgatagctctgtctaatgcgccctcagcgataccaagtgcctgagcagcaataccgatacgtccaccatcaagtgtgtgcattgcgatcgggaaaccttttccttccggtcctaacagattctctttcgggattctgcagtcttcgaagatcagctcataagtagatgatccacggatacccatcttcttctcttttgttccgaatgagaagcctggagctcccttatcaacgatgaatgcagagaagtttttcttctttctgcctctcttatcctctgtgatgcttgtgatagcgattacaatataaacatctgcaactttaccattggtaatgaagcattttgatccatttaatacccactcgtcaccatctaaaacagcttttgtctgtgcaccctgtgcatcagtaccagcccccggctcagttaatgcgaatgcacctaacttctcgcctgttgcaagtggttttacatatttctgtttctgctcttctgtaccatatgtcatgatcggatcgatgcagagagatgtatgtgcagatacaacaacacctgtggttgcgcaaactttagataactcttctacgcacataacgtatgtaagaggatcacaaccctgtccaccatattctttcggaaccgggattcccatgaatccgtatttctgcattttcttaaccgtttctgccgggaaagcttctgtctcatctgtttcctgtgcaagcggttttacttctgtttcagcaaattccttgaataaggaacgcgccatttcatgtttcttgtctaaagtgaaatccatgatctaattttcctccataaatatttattttactgagcatcgaccggagtctttgtacgatcagcattgtatacatagaatcccttgccgctctttgctccaaggttaccaccacgaaccatcttacggatcagtgggcatgcacgatatttgctgtcgcctgtctctttgtaaagtacatccatgatagcaaggcagatatcaagaccgatgaaatcacctaactctaacggtcccattgggtggttagcaccaagtttcatagctgcatcgataccagcgatatcggaaacaccttccattttgatgaatgcagcttcgttgatcattgggattaagatacggtttacaacgaaaccagcagcctcattaacctgtaccggagtttttccgatctcttcagaaattttcttaatagcggaaacagtttcatccggagtattcacaccagcgataacctcgatcagtttcatacggtctgccgggttgaagaaatgcataccaaccattggacggtttaatccgtttccaatctctgtaatagaaagactggatgtgttggaagcgaagatacaatctggttttgcgatctcgtctaattctttgaaagtagttttctttacttccatattctcgaaagctgcctctacgatcagatcacagtctttgcaaaggtcttcttttaaacctggagtgatttttgcaaggatgccatcaacagcttcctgtgtcatttttcctttttctactaatcttgcataaccttttttgatcttctcttttccgccttcagcccactcctgcttgatatcgcaaagtgctacttcatatccttctacctgagcaaatgcttttgcaatgccctgtcccatagttcctgcaccaataacgccaaccttcatttcggttacctcctgaaaataattatgttaactgtatgtttgaaaaatgcaatccccgggaagtcattccccgggaattactataaaaaactattatctctcaacgattgtagagcatcccataccaccgccgatgcaaagtgtagcaagacctctcttagcgtctctcttctgcatctcatgcagtaatgtaacaaggatacggcatccggaagcacctaccgggtgtcctaatgcgattgcaccaccgtttacgtttacttttgacatatcgaatttcagatctcttgctactgcgatagactgagctgcgaatgcttcgtttgcttcgattaagtccatatcatcaatagataaaccagtttttgctaatacttttcttgtagaagcaacaggtccaacacccatgatttcaggctcaactccaccaagagcacctgctacccatgtagccattggtgtaacaccaagctcttttgctttttcttcactcataacaacgattgctgctgcaccatcgttgataccggaagcgttacctgctgtaacaagtccgccctctttaccggagcagcattttaattttgctaaagactcagcagttgtaccggcacgtggtccctcatctttcacgaaatcaacgatctcttttttcactttaacaggaaccggaacgatctcatcatcaaatttgccttcagcgattgctttttcacatttctgctggctgtttgctgagaactcgtcaagttcttctcttgtaatgccatatttatcacatacgttctctgcagtgatcatcatatgatagtggttgaatgcatctgttaatgcatcatttaccattgtatcgatgatcgttgcattgttcatacgatatccaaaacgagcttttgtcatagcatatggtgccatagacatgttttccataccacctgcaacaacgatatcagcttcacctgccatgatcatggtagctgcatcattgacacattttaaaccagaaccacaaacaacgttgattgtgattgccggaacttcgattggcagtcctgctttgattgctgcctgacgtgcaacgttctgtccctgagctgcctggattacacaacccatttttacctcgtcaaccatctccggtttaacgtttgctcttcttaaagcctctttgataacgattgcacctaagtctgctgctggagtattgcttaatgctccacccattttaccgattgcggtacggcaggcacctgctaaaactactttctttgccattttgaattctcctttcaatttaacacaaagctctgcttttgcagagaatttgtttctttctctttaaagttgccgaaaaatgctgttaattttttaacaatcttttttaaaaaaataaattcaaactttcggttgaaatttatctttttttctttcattttaaaaagcttatttgctatgtaatcagctatttttctgcatttcttgtactttcttatgctaacatatttcacaattaattgcaatagctttctttatttttcatctttgtaaacaattttttacttcctttttgctccattttgcggggttttttgttaaatttttatcattttatcattttgtttaataaaacacatgattacctataactgttccttctataatgccgttattcacacgaaaatacagacaatttgttgtgctcattccacccagaaccgcctgtgccgcactcatacaatcggaatcgactccctgctccagacggtatgcaagacgaccgctggcaaccggagagaactgccctccctgataaatcacaccggaaaccgtattcggaaaataggagcttctgacacggttcatgatcacgctgcccaccgcaagttttccatcatatggctcgccccatgcctcacactggatgatggcagctaacagatacgcatcgctctgtgccggtgcgtatgtcacattcgacctgttttcctgttcctgctttttgatggctgcaaggcgcgcagcatcctcttttgccttctgtatctcaagctgcttttcgtattcgatcattttctcgatctttgcatcgatcgattccacatcggactgtgcatcttcaattttctcgctggattcctgtatcttcttctgcgtatcctcgatcaggctgttgactttttcctgctctttctgtttttcctgctgtaatacagtcagttcttccttctgctcctcgagttcctttttctgttttttgatctgctccgtgagctcctgatatgccgtaagcatatttctgtcatactgattgattgcacttgtatattccgcctgatttaaaaattctgcgatggaggacacatgaataagcatgtcccatacagactgattgccattttcataaatatactgaatgcgcactttcatatcttcatactgttctgcagatcgttcctcggaacgtttcagatcttccgccgccgtattgatctcgtcctctttctgcgctgcctgctgctctaactggttcatatcggaagtgatcgtatttaactgtccgttcagtccgctaaggtcgctctccaatccctgtttttcattggtcaggctgtccacctgatctttcgcatcttctttctgtttcttaaggtctgtgatctggtcttttgccttatcaatatctttctgtgtcgttcctgcatggacagttgccgtaacaagtatgcagccggtcagtattcctcccaggattcttctcaaaaaattgtgtctcat

SEQ ID NO: 498 - DNA, 5095 bp, unidentified
  source 1..5095: mol_type = unassigned DNA
tgcaagatgaacggcatgaactactccaccttcatgcacggcctgaaggtcgctggcattgagatcaaccggaagatgctggcggagatggctgtcaacgacgccgccgccttcacccagctgaccgagatcgccaagaaggcgtaagatccctttccagactatgtgagcagcgccctcccaaatgggagagcgctgctttttgtatatccaggggcggaggggaggcaatccccgttgtgccccttcggtcaggctttccggcagaagtacggcccgcggtccgcctcatggggctgcgcaaacgtccaggtgaaatccttgtctaccacgtaccagtccgctccgggaatggcgcgtgcatctgcgggcagggtaaccagctcctccgccgtcaccggccgcaccagaggctcaccctccggcggctcttcataataaaagaggtatttctcaccggatgcctccgacagagcctgccgggccgcgtcgccggacaggcagggcaccaggttccaggagaagagatgccacaggtaattcccatccgacagcacatgcctccccaactccgcgtcggacacgccgtcggcaaaaacgtccagccagcggttcttcacccgccgaatgtcggtggggaagggttcctcccagggaaccatggtggccacacaccggcagatgggcagcccctgctcatggaacttggcctcgtagtccgtcatgacgcccaccgggccattcgcatggaggtcccgggtgacctcggacagctcaaagccgaacagaggcagctcctccacggagaaggtgaagaggtcctgattgtccgtcttgaagtggatctgcccgcccatcttcagcacctggcggtacagccgcaggaagttgccgtgggtcaggcggcgcttggcgtggcggttgctgggccagggatcgcagaaattgatatagatccggtccgcctctcccggggcaaagaacaggggcagctggtcagcattggcgtcgatgaagaacacgttggtgagcccctgggccgcacaccgctccatggccatgaccatggcatccggcacccgctccacagcgatgaacagcacgtccggctccgccgccgctgtgccggcggtgaagcggcctttgccgcagcccagctccagccgcagctcccgggcctggggcatcagctcccgccacttgcccggcatggagtagggctcccggatcaggcggtcgccgcagcgctccatccgggggatcagattctttttctttcgcatccgcatgtgtcaacatcctcctgggtcggttcccgatccgatttcaggaagaccccgccggggagtcctccgtacattcagaatgctattgtaccatacagacccggcgctgtaaatggcggcgtggatttcctgcttgcgcggaaagcaaagagatgatatgatagcccaaatgggaggggggagcgatgtgcccaaggtgccctactgcggcagaagcatgttttatcaggaggcgggcgagggcccggtcctgatctttctccatggcaataccgcctcatcccggctgtttgagccgttgcttccactctatacgcctcatttccggtgtgtgctgctggactttctgggaaacgggcgctccgaccgggtggagtcgtttccggcggacctgtggcaggaagaggctcggcaggccctggccctgatccgggcggcgggctatgagaggccctgtctgctgggaaccagcggcggcgcctgggccgccatgaacgcggccctgctggcacccggcgcagtaggcgccgtagtggcggacagctttgacgggcggagccttcacccggggtttgcgcgggatttgacagcagagcgggaccgcgccaaaagagacaaggcagcccgggaattttatgcatggtgccagggaccggactgggaggcggtggtggaccgggacacggatgccctgttgcgatgcgccgcctccggacggccgctgttctgcggcccgctggagcagatgcggccgccagtgctcctgatggggagccgggaggaccccatgtgcagacaggatttggaagaggaatacaaggcgatggcggcgcagatgccccatgccgccgtgcgcttgtttgcatccggtgggcaccctgccattctttcccgggcggaggcggctaaggaggagatcctggcattttggctccggtgcgaggcggccgagaggctgtgagatttccggcagatacaactggaacgaagggccttgtgaatgcattaacaaaattgtataaagtttaacgaacaatttgtatgaagtgtaaaaaacgtgaaatttttcgcaaactgcacaaattatacttgataaatgccgccagtcaccctataataaagtttgtgagtaaattggcaatatcggaatgactctgtgttctcccggaggggcggcacagcccggccccctggagtgccgaaaggcatgaaacaaggaaaccaaacaatttattcaaaaataacaggaggaaaaatcatgaaggttgcagtttttggcgcaggtaccatgggcagcggcattgcgcaggttttcgcggcaaagggccacaccgccctgatgtatgccagctccgtcgcttccgcgcagaagcacaaggataagctggctgcttccctgcagaagcgggtggagaagggcaagatgacccaggaggctgtggacgccctgctggccaacgtgctggtggaggagaagtccgcctgcgccgacgcggatctcatcatcgagtgcgtcaaggaagacatggctaccaagaaggagctgctgaatgagctggacggcctgtgcaagcccgaggccatcttcgcctccaacacctcttctctgtctatcaccgagatgggcaacggtctgaagcaccccgtcatcggtatgcacttcttcaatcccgtgcccagcatgaagctggtggagatcatccgcggcgccaacaccacccaggagaccttcgatttcgtctataagctgtcccaggagatcggcaaggagcccgtcgaagtggctgaggcccccggtttcgtggtcaacaagatcctgatccccatgataaatgaggccatcggcctggtagagactggcgtcgcctccgtggccgacatcgacaaggccatgcagctgggcgccaaccatcccatgggccccctggctctgggcgacttcatcggcctggacgtgtgcttggccattatggagaccctgtacaatgagaccggcgactccaagtaccgtcccgcgctgctgctgcgcaagatggtccgcggcggcctgctgggcaagaagaccggcaagggcttctatgattattccaagtaattgaagtcagcaccaacaagaaaaggagttaatggtatatggattttcatctgacaaacgagcagcagatgctccggaagatgtaccgtgaattcgccgagaacgaagtgaagcctctggctgaggagatcgacgaagaggagcggttccccatggagaccgtcgaaaagatggccaagctggggatgatgggtatttacttccccaaggagtacggcggcgccggcggcgacgttctgtcctacgccatgtgcgtggaggaactggccaaggtctgcggcaccactgctgttatcgtttctgcccacacttccctgtgctgcgcccccatctttgagcacggcaccgaggagcagaagcggaagtatctgcccgacctgctctccggcaagaagatcggtgccttcggcctgaccgagcccaacgccggcacagacgcctccggccagcagaccctggcggtgctggagggcgaccactacgtcctcaacggttccaagtgcttcatcaccaacggcaacgtggccgataccttcgtggtgttcgccatgactgacaagtccaagggcaaccacggcatctctgccttcatcgtggagaaggacttccccggcttctccaccggcaagcacgagaagaagatgggcatccgcggctcctccacctgcgacctgatctttgaggactgcatcgttcccaaggagaatctgctgggcaaagagggcaagggcttcaagatcgccatgcagaccctggacggcggccggatcggcatcgccgcgcaggccctgggcctgggcgagggcgctgtcaacgaggctgtcaagtacacgcaggagcgtgtccagttcggcaagcgcctgagccagttccagaacactcagttccagctggccgacatgcacacccggatgcaggctgctcagtacctggtgtacgctgctgccatgaagaagcagaatcacgaggactattccatggacgcctccatggcgaagctgttcgccgctgaggctgcctccgatgtcacgcgccgcgccgtccagctgttcggcggctacggctacacccgcgagtatcccgtggagcgcatgatgcgcgacgccaagatcaccgagatctacgagggtaccagcgaggtccagcggatggttatttccagccgcctgggcgtgaagtaagataggaggtaaaggttaacatgaaaatcattgtttccatcaagcaggttcccgacacctccggtaaggtggcggtgaatccggacggcaccctgaaccgtgcgtccatgcagaccatcaccaaccccgacgatatgaacgccctggaggcggccctgaagatcaaggacgccaccggctgcaaggttgttgtggtgaccatgggtccgcctcccgctgccggtatgctccgcgaggcgctggctatgggcgctgacgaggccgtgctggtgtccgcccgcgagttcggcggttccgatacatacgccacttctcagatcctggctgccgccatcaacaagatcggcgtagaggctgacgacatcgtcatgtgcggccggcaggccatcgatggcgacactgcccaggtgggtccccagattgccgagaagctgcatctgccccaggtgacctacgccgccgacatccagaaggacggcgacaccatcaccgtcaagcggatgctggaggacggctacatgaccatcaaggtc

SEQ ID NO: 499 - DNA, 6697 bp, unidentified
  source 1..6697: mol_type = unassigned DNA
atggaactgatttacacaaatgatttatgcaccggatgcaacaaatgcgtgcggggctgtcctgtacttacggcaaatattgcaacgcaggaaggttatgtaacggtagacccggacaaatgtattgcatgtggggaatgctttgatgtctgcccacatgaagcgagagactattatgatgatacggaccgcttctttgaagaccttgcatcgggaaagaaaatttccgtgatactggcaccggcatttctggcaaattatcccaaagaataccagcgtgtgctgggatatttaaagagtaagggagtcaaccatatctgcagtgtatcgttcggtgcggatatcacaacctggggatatctcaaatacattacggaacacaaatttttcgggggcatttcccagccgtgtccggcagtagtcacctatgtggaaaaatatataccggagctgattccgcgtctgatgccggtacacagtccgatgatgtgtactgctatttatatgaaaaaatacatgcaggtcacagatgaaatcgcttttatcagtccgtgtattgccaaaaaattagagattaccgatccaaattgcggcggatatgtttcttataatgtaacttttgaaaagatgatgaagtatatcggaaacgattatgaaggatgtgaaccatataccgatgaactggaatatggactggggtctttgtatccgatgcctggtggattgagggagaatgtagaacattttcttggaaaagagcaggtagtgcgtcaggtagaaggcgagcatgaggcatatgaatatctgcgttcctatgcaaaacgcattcagcagaataaagaacttccgtttatggtagatatcttaaattgcgcgaagggctgtctctacggaactgccacagatccgaaacggggaaccgatgatgtcatgctgacaatcgcaaaactgcggaacagcaaaaccagtgcaaaacaggagaaggcacactttggcaggaagagcaaaagcaggagtccgtgggcagatacactgacaccggaggaacgtctgaaaaacttcatggacgcttttggaaagctggacatcaacgattttatgcgcagctacaccaatcgcgcagtacatattgaggaaccgtccgaacaggagaagaaccgcctgtttgcagaaatgaaaaaagatacctatgaggaacagcacagggactgcgaatcctgtggatattcaagctgcaccaacatggtacgtgccatccacaatggagtcaacgtaaaagaaaactgtgtgcactatgtgcggggcatggcagaggaagagacaaaaaagattgcagaacttcgcgatcaggagcggacggaacaggaaatccgccagcagaagattacagatatcacagaccggtttattaccctgagtgataacattgcagaattgaatacggcaaatgaggagtctgcaaatgaagcaaccaatctggcacagtatattcaggatatttcccgcctgtgcgatgaactgaatgaatccatccgcattatgtcggatttcatcagtgtatataaaaagagcaatgaagatatttctgccattgcaggacagacaaatctgctttcgctcaatgcctccattgaggcggcgcgtgccggtgagaacggaagaggctttgcagtggtagcggaggaaatccgtacactgtctgattccacgaaggatcttctgacacagaacgaccagaaagccgaggcaattcttccaaagattacacagagcatggattcgatcaaagatctggtagaaagcatgaataccatgacgcagaaagtgtcaacgattgccgcaaacacggaagaaatttcttcccagacgacctatgtacagaatatgacagaagaaatgcgggatgaggtgaaagaactgtagatgaaaaaggatgcgtattacacatccggacaatttgcaaaaaaagcacatgtgacacttcgcgcgattcggtattatgataaacagaatattttaaaaccaagtgcacggactgccgcaggagcgcggctgtatacggatgcagatctggcaaaactccagcagatccttttattaaaatatctgggattttcgctggaagatatccgggagatgacacttgcctcggcagatcagcagtatcttcttgaatccatgcggatacagaagaagctgctgcggcagaaaatggacgaaatgcaggcgatggatgaggcaattgaccgcaccatagaagccatccagacggaacaggcgattgactggaacagtatgctggatctgatccatttgacggcagtagaacgaagcctgaaaaaccagtaccagaatgcggcaaatatttccgcccggattcgcctgcacagggagtattccgtcaatccgcaggggtggtttccgtggattatgcagcagtgtaatctgcagccggggatgcggattctggagctcggctgtggaaatggagcattatggactgaaaacagagaacagctgcctgcggatctatgggtcgttctctcggacaaatcagaaggaatgctaaaggatgcccggcgtgcactgggagaggacagccgtttttcctataaaaaatttgactgcgaaaaaattccttacgaggaggaaatgtttgatcttgtgatcgcggatcatgtgctgttttactgtgaagatatcccacaggtgcttgcagaatgtcggagggtcttaaaaaatgggggacggtttctatgcagtacctacggaaagcagcatatgcgggaaattaccgatctggtgcagcagttccataaagaaatcgttttgtcagcggaggtgctgtatgagcggttcgggcttgaaaacggagaaaacctgttagcaccgtatttttcggaaattcagatgcgaagatacgaggatgcgattgaaatagcggaagcagaaccgctgatttcctatattctttcctgtcacggaaatcagaaccagctgcttttgaaccagtacaaagagttccgggaatttgtttctgcccgcgtggcagatggattttatatcacaaaagatgccggaatcttcctgtgcagaaaataattagaaaaatctataaaaaagacttgaaggtgacctagcgtcaccttttataatggaaataaatatagaaatcgtaaatgcacacaggaggaaatgctcatgaccattattgtaacgggcggtgccggtttcatcggcagcaactttattttctatatgttaaaggaacatccgcaggatcgcattgtttgtctggattccctgacctatgcgggcaatctgtccacgcttgcaccggtgatggatcagccgaattttcgtttcgtaaaactcgatatctgcgaccgtccgggagtatataccctttttgaggaagaaaaaccggatgtgatcgtcaattttgcagcggagtcccatgtggaccgctccattgagaatccggaagtctttttgcagaccaatattatcggtacttccgtgctgatggacgcatgcaggaagtatggtatttcacggtatcatcaggtatccacggatgaggtatacggagatctgccactggaccgtccggatctgttcttccatgaggatacaccgatccacacctccagtccttacagcacttccaaggcatctgcggatctgcttgttatggcatatcacagaacgtacggcctgccggtgacgatcagccgctgttccaacaactacggcccataccagttcccggaaaaactcattccgcttatgattgcaaatgcgctggcagataagccgcttccggtatacggagagggactcaatgtgcgcgactggctgtatgtcggggatcactgtaaggcgattgacctgatcctgcgcaacggaaccgtcggagaagtctacaacattggtggacacaatgagatgaaaaatattgatatcgtaaaactcatctgtgaatatcttggcaagccggagagtctgatcgagcatgtgcaggacagaaaaggacacgatatgcgctatgccatcgatccgaccaagattcacaacgagctgggctggctgccggagacgatgtttaaagatggtatccgcctgaccatccagtggtatctggatcataaggaatggtgggagaatatcgtaaacggagagtatcaaaattactataaagaaatgtatgggaaaaaagggatataaagaaaggcatataaatatgaaagtattcgtgacaggcgttgccggacagctgggacatgatgtggtaaacgaactgacaaagcgcggacatcaggcagtcggttcggatattgcaccgacactggaatcctgtgcatcgtatgtgccgctggacatcaccgatgcggcagcagtggaacagacaatcatgcaagtacagccggatgccatcgtgcactgtgcggcatggaccgctgtggatgcagcagaggacgaagaaaatcaggcaaaagtcagagccatcaacgtagatggaacgaaacatattgcggacgcagcgaaaaaagcagatgccaaaatgatctatatcagtaccgactatgtgtttgacggacagggcgagactccgtgggagccggactgcaaagcatacgcaccgcttaacgtatacggacagacgaaacttggtggggaactggcagtggcacagacactggaaaagtatttcatcgttcgtatcgcttgggtatttggattaaatggaaagaattttatcaaaaccatgttgcaggtagcgaaaaatcacccacaggtgtgcgtggtaaatgaccagatcggcacaccaacctatacttacgatctggcaagactgcttgttgacatgatggaaaccgaaaaatatggttattatcatgcgacaaacgaaggtggctacatctcctggtatgattttacaaaagaaatttaccggcaggcaggactcgctaccgaagtgcagcctgtgacaaccgcggaatacggtctgtcaaaggcagcgcgtccgtttaacagcagactggaaaaaaagaaactgaaagaaaatggatttacaccgcttccaacctggcaggacgcactggggcggtatctgcaggaattaaagcgacagggggaactttaagatgaagggaattatattggcaggcggcgcagggacacggctgtatccgctgacgatggtaaccagtaaacaattgcttccggtatatgacaaaccgatgatttattatccgctgtctacactgatgctggcaggcatccgtgatattttagttatttccacgcaggaagataccccgagatttgaagcacttttgggggatggaaatcagttcgggcttcatctgtcctacaaagtgcagccgtccccggacggacttgcacaggcatttttgcttggagaggaatttatcggagaggatgcctgtgccatggtactcggcgacaacattttctacggaaacggattcggaaaaattctgcgcaatgccgcaaaggatgcacaagagggacaggcaaccgtctttggctattatgtcaacgatccggagcgtttcggtgtcgtggatttcgatgcgaacggaaaagccgtatccattgaagaaaaaccggcacagccaaagagcaactatgccgtgaccggactgtatttctatccggcaggcgtgagcaaaatggcaaaacaggtgcagccatccgcccgtggcgaactggagatcaccaccttaaatgacctgtatctgcagcagaaaaacttaaatgtgcagctgctcggacgtgggtttgcatggctggataccggaacgatggacagtctgttggatgcggcagcatttgtgcagatgatcgagcaccgtcagggtgtgaccatttccgcgccggaagaaatcgcatatatcaatcagtggatcacaaaggaaaaactgatggactcggccgcacgctacggaaagagtccgtatggagagcatttgaaagcagtcgcagagggcagagtgaaatattaaaatcagcgtaactattctgagggggttctgaatagatacaaattagcatgaaagaggaaaaaacagtgggacagataacagttgaaaaaaatgtcggcggtatcgaagggctgtgtgtgattacaccggccgtacacggggatgcccgcggatactttatggagacctacaatgaacgggaaatgaaagaagccggattcgatatccagtttgtacaggataaccagtccatgtccgtcaaaggcgtattgcgcggactgcatttccagatcaactatccgcagtgcaaactcgtgcgcgctgtgcgcggcagcgtgtttgatgtggcagtggatctgcgggaaggttccgcaacctatggaaaatggtacggagtggaactttccgaggaaaacaaaaagcagtttttgattccggaaggctttgcgcatggctttctggtcctgtccgatgaggcagagttctgttacaaagtcaatgacttctggcatccgaacgacgagggcggcctggcatggaatgacccaaagatcggtatccggtggccggatgtgacaggtgggtatcgcggaatcccgtcggcggaaggatattgtatggcagatgggacaccgctgacactttcggagaaagaccagaagtggcctggattagaggaaaaataa

SEQ ID NO: 500 - DNA, 8200 bp, unidentified
  source 1..8200: mol_type = unassigned DNA
ctaatggctgatatgtaataattcgtgtgccttgtgtgataatggctcaccaaaataatctttgtagcactgcattactgatggattttcgtgtgaaaatctgagattattcactttatcaagtccataaagcaccttgcttctattggctactttgttatcatcatctttaataggctgtccaccaccattaatacatccaccaggacaagccataacttcaacaaagtcataatgtgccttgcctgttgcaatagcttccataagctttcttgcattagaaagactgcttgcaaccgcaaccttaagtatattgccattaattgtaaacttagcttccttccagccgtcaagacctcttacacactggaaagcatcaggttctggattagtcttattaacaaggtaataagcacttctaagtgcggcttccataactccgcctgtagcaccaaatataacacctgctccgcttcctacacctaatgggtcgtcaaattcttcttcctcaagttcctgaacttttataaagaaagactttaacatacgttccacttctcttgtagtaagaaccgcatcaacatctttaccatcatcccatgtacattcatctttcttggcaagacaaggcataagtgatacacagaatattctttcaggctctatgcccagcttttctgcataatatgacttagtcaccgctccaaacatctgctgtggtgactttgctgttgaaagcctgtccacatactgaggatattccttctttataaagttgacccagcccggacagcacgatgtaaacattggaagtcctgactccttaatctctggaagtctttcaagaagttcgcttccctcctccataatagtaagatctgctgaaaatgttgtatcaaatatgtaatcaaagccaatccttctaagtcctgcaacaagtcttttggctgttgcgaaatctttagaaagtccaaagccttcaccccacgctgttcttacagctggggctatctgaacgactgttataatattctcatcttcaactgcatcaagaacacggcctacatcatctctttcccttaatgcacctactggacagttcacaacgcactgtccacaaagagtacagttagtctcctgaataagtctgttcttagccacattcacagttgttcttgaacctgtattaactacgtcccatacgtgcataccctgaacattatcacatatctgcacacaacgcatacatttaatacatttgttattctctcttataagtggaaatgtcttatcccatttattcttttcaagaatagagtcataaggcatctcagatatattaagttcattggcaagtgactgtaatgtacagttaccgcttcttacacaggaagcacattcataatcgtgctgtgaaagtataaacttaacattagtctttcttgttgtacgtacctttcttgtgttagtacggataaccataccttcctgaacaacattattgcacgccgtaacacatctgtcctgtccctcaacctcaacaacgcacacacggcacgcacctatttcattaacttccttaagatagcagagtgtaggtatctcaacgcctacttttcttgcagcttcaaggatagttgtaccatcttctactgatatagctataccattaattgttgcatttaccattgttcttctctgcctcctctgaatgctccaaatccaaaatggtcacatcttagacagcgtccagcctcctgacacgcttcctcacaagaaaatccatattcgattggctcaaaatcattctttctttctgccgcatctcttaacgcaacctcaactcttccacaggcaaccttatcttcattgcttgcatacggaatttcaatatcacatgtaatctcgtggttaaatcctaaatattcatctatattagccgccgcaactttacctgccgcaatagccttaataactgtcgctggtccagttacacagtcaccacctgcaaatacaccctcagacatttctccgtcctgtggtgtaatattacctgtattaagtgctgatataacacctctctgaaccttaataccgtgttcctcgaagctcttagtctctataccttgtccgatagcaacaactataaggtcactttctaataaaacctcatctttagccgctgccttaggagctggtcgtccgtgtgaaacccttgatatcatctgtggctttacaataagtcctatagcattaccttcttcgtcctgcttaatacgcactggtgacataagttcaagaacatcacagccttccgcctctgcaccctcaacttcttcttcaagggcagtcatatctgctttacgtcttctgtatacaatgcttaccttgctcgcaccaagtcttattgaagaacgtgcaacgtccattgccacgttaccaccaccgataacgataaccttctttcctgtataatccggcatatctccatcaccgatagcacgaagcatctctacagcagatgtaatgccgctcttggcatcctcgccttctataccaatctttttatcagcgtgtgctccaattgatatgtatgtagcatcgtattctttggttatatcatcaaatgatatatcctttcctacgcttatattcttcttaacttctattcctgttgaaagtattgagtcaatttcctcgtcaagcttctttcttggaaatctataattaggaataccatatcttaacattccgccaagctgctttctctgctcaaatatagtaaccttatgtcccataagtgcaagataataagccgcactaagaccacccggtccgccaccgataatagcaaccttcttgcctgtcggtgcttcacattctggaaccggaacaatacctgaattatcaacagccattttcttaagtccacggatattaacaggtgcatctataattgttcttttacatctgttctcacaagggtgctcacatatataagcacaggttgttggcattgggttatcccttcttataagtcttaccgcatcagcatatcttccctgctgtacaagtgctatgtaacctggaatatcaacacctgcaggacatgacttaacacaagcaaccggctggttactgttgcatgaacagaaaccattatgtatatgtgattcaaaatcatctatacagccatcaactgactttaatgcaagctttgcagcttcatatccaattgcacagtctgctgaataatatataccttctgctgtaagcttaatattctctactgtctcctcatttgcctcaccatcaagaacattatcaaaaagtcttgcaagctgtcttaagcctacacggcagggaacacatttaccacacgactgtgcaagacacatttttataaatgaccttgtaaggtcaactgggcaaagcccaggaggactggctacaattcgtctttcaagatcctgatacaaagactccattgtaacctgagccttatctttagttaatatcgttaatctactcactaataaatagacctcgctttctataataatattactgctttcaatctgcaatccgacaccaatatataatctgatatcaatatataattagacatcaatatataatctgatatcaatatataattagacaccaacatataatctgatatcatcattgcagctttcttctatatccaaactattatagtgtaacattaccattaataattgacaacaaaggttatttctttaacaaactaacacaaataccatattttacatacaattcttaatacaatgtgctgtcctgcaaacttttacaactaaacaccttattatccatataatacacgatatcactataaatacaccatacaattaacttaatctaatattataccgccacgcattattatgcaagcggaaacaggtaggcatttcacactactgtgcaggaaaaaagcaggtgcaaaacgaatttcacacctgccaaaataaattatataacatttattattcttaattatccagaataaattgttgctgctaagttttgtaattacttaacaactcttaccttaataacaccatctatagctgaaagcttagctgttacatcttctgtgatagctgaacctgtatcaagaacagagtaagcataatctcctcttgacttgttatccatagattcgatattaatacctgcatcacccataacgcttgtaagcttgcttatgattgctggaacattcttatggcatactgtaactcttcctgctgatgtacatacgccacaatcacagttaggataattaacagaattaacaatattaccgttctctatgtagtttcttaattccttaactgccataacagcacagttatcctctgcttcttcagttgaagcaccaagatgaggaagtacaataacaccttcctgacctgctgttgttgtattaggaaaatctgtaacatacttagcaaccttgccagacttaatagcatcaagaatagctggctcatcaacaagtacatctcttgcacaattaacaacgactgtacccttcttcatcatatcaaatgctgccttattaatcatgcccttagtactatcaagtgctggcacatggattgtgatataatcacattccttgtatatatcctcaacattaacaatatgcttaacttcgcttgaaagattccaggctgcattaactgaaagatatgggtcatatccatatacttccattccaaggcttatagctgcattagcaactagctgtccgatagcaccaagtccgataacaccaagcttcttgcctttgatttccttaccagcaaatgctttcttagccttttctgctgactttgcaatatctgcatcatctttattatcttctacccacttgataccgccaagtaaatctcttgaagctaaaagtaaagctgcaagaacgtgttccttaaccgcattagcattagcacctggtgtattaaatacaacgatacccttatctgcacatttatcaagtggaatattattaacaccagctccagctcttgctatagcaagaagattatctggtaattccatatcgtgcatcttagcacttcttacaagtactgcatctgcttcttcaaatgctgcattagcattataatcgcttgagaaaaggtcaagacctacagaagctatattattaagacaatttacgttaatcattaggcattctccttttcgaacttcttcataaattcaactaacttctcaacgccttcgattggcattgcattatagatagaagctctcataccgccaactgttctgtgacccttaagatttacaaatccagccgcttctgcttctttaacaaatttagcatcaagttctttatcacctgttacgaaaggaacattcataagtgaacggtcttccttaacaactgttcccttaaacatcttagactcatcaaggaaatcataaagaattttagccttcttttcattgtgttctttcatagctgaaagtccacccatcttcttaatccacttaaataccttgccgcagatatagatattgtagcaaggaggtgtattataaagagaatctgcatctgcctgtgtcttccactttaacatagttggtgttccaggaagtacatcatctgttataaggtcttctctgataattgcaataacaacaccagcaggtccgatattcttctgaactccgccgtatactacaccatattttgttacatcaattggttctgataagaaacaagatgaaacatctgatacaagtatatgtcccttagtattagggagtgtcttatactttgttccatatattgtgttgttctcacagatgtatacataatctgcatcctctggaatatcaagatctgaacaatctggtatgtatgaatatgtcttatcctctgaggaagctacagcaacagcctcaccatagattttagcttcattaaatgctttcttagcccactggccagtgataatataagctgcttttttgttcttcataaggttcattggaacttctgcgaagaactgcgatgcaccaccctgaaggaataataccttataattgtcaggtatattcataagctctcttaagtctttttcagcttctttgatgatgttatcgtaaaccttggaacgatggctcatctccataaccgactgaccagaaccctggtaatctaacatctcatctgctgcttcccttaatacttcttcgggtaatactgctggacctgcactaaagttataaactcttgccactttctcttcctcctgattcatttcaataattaatcataaacatttaatcataagtaaatatattcaaaataacttaatatattaaaaatttattaacatttattctattcctgctaaatcgctctgtcaagttaatattttatcataataaagtatttgctgtactttttttaataccaaaaggctgatgcttaattagcactctcctttttattaagatcatctctgtcaaatgcttctgatataggtgctccaggtgcaaccatagggaataccttatcatctttgcatatatcacattcaatgacgcaaggtatattaagctcgatagcttctttaagagccttctcaaagctttctatatctgctacacggtatgccttagctcccataccttctgataccttaacaaaatcaacctgatcgttaagtactgttgcagaataacgctgtccatagaaaagatcctgccactggcgtaccataccaagaacgtgattattaaatataacctcgattattggaatattgtaacgtgtagctgttgcaatctcattcatattcatacggaaacagccatctcctgctatattaataacaaccttatcacgacagccaaccttagcacctatgcttgcaccaagtccatatcccattgtgccaagtccacctgatgtaagaagtgttcttggacttttgaacttataatgctgtgcagcccacatctggtgctgtcctacatctgtagatataattgcatctccgttagtaatctcatatatcttttccataatatatggtccattaagaacatcttttctatacttcatagggaacttttcttcataatttttgatatgttccatccattctgtatgctctgactgctcaagcttggcattaactctctttagtatctcagccgcatcacctattacagaagcatctgtatgtatattcttattaacctcagccgcatctacatcaaactgaagaattttcgcattctttgcaaatttctttgtatttcctgtaaccctgtcagaaaatcttgcaccgattgtaataagaaggtcacattctgacacaccaaagttagatgtcttagttccgtgcataccaagcatacctgtataatgaggatctgaaccatcaaatgcacctttacccataagtgtatcgcatacaggtgcatctatctttttaacgaattttcttaattcatccgaagcttctgatgcaataactccgccgccaacaaatacatatggcttcttagcagctttaatcatagcaactgcattttctacatcttcttctgtgattgtatctgtaactctctcaattggcttaggagtttctttaatgtaatcacactcattagctgttgcatctttagttatatcaacaagaacaggacccggacgtccttccttagctatcttaaaggctcttcttaatgtagcagcaagatcctttacatcttttacaataaagctgtgcttagtaatcggcataactattccagctatatctacttcctgaaaactatctctaccaaggagtggaagtgtaacattacatgtaatggcaacgattggaattgaatccatcatagctgttgcaatacctgttacaagattagtggcaccaggtcctgatgtcgcaaagcatacaccaacctttcctgttgctctcgcatatccgtctgcggcgtgagatgcaccctgttcgtgagatgtaaggatatgtgttatctcatctgagtgcttatataacgcatcatagacgttaagaatggctccacctgggtatccaaatacagtatctacaccctgttcttttaagcattcaactataatctctgaaccatttaatatcat

SEQ ID NO: 501 - DNA, 24688 bp, unidentified
  source 1..24688: mol_type = unassigned DNA
ttatacaaccgtcacaacacctatttcaacttgattattgattctggggatgaatacggtgttgctcagacctgcgcagacaatcatttttgtgccgtcaaggtcaaattcgcctttgtcatatttcggaaaaagtccctgattcggagcgattactccgccgatgaacggcaattgaatctgtcctccgtgagtgtgaccgcagacgattaagtctatgtcggttttctttgcgtcctcggcaatgtattcgggctggtggtgcagaagaattgtgaaattgttctttgctttttcggcaaattcttcccacagcgttcttgacggaacatcgtcatcgggagtgtagaactcataataagggtagtcgctcattccgccgataagcacactcttgccgtttttggtgaattttatgtattcattatcgagcaatacagcgcctgttgaatttgtttcgcttttaaaatccgttccgaatttggcggcattgtcacgctcatggttgccgagacagcagtatgtgggtgcaatttttgaaagcttttcaagcacatctttcatcttcgttgtgtcgggatcgccacggttgaccatatctccgcaaactgcaataaaatcgggattttgttcctttacaagctctgcaaggtctgcgttcttttctccgtattccttgttgtgcaaatccgtgatgacaacaaatttcagctttgcatcgttcttagtattgtttacacagtaatttgtgattgcaattgtgttgtcacagtaaacgccccatattacgagagtcacaaacagcacaagtattattgctccgaggattatcgaaaattttttcattcaattcaccgctcatattaagtatggtattattttaggctcgttttgtgcggttgtcaacaaatgtgtgtcgaacaagtctgattattactgttccttgtgctttgattgtcggattttaagttgatttaggaattgctttgtttgacattccttttgcactgttgtataataaatcgtaattgtatttatatgttactcgggaaatttacacaaagttaaacagaagaggtatgggttatgaagaagattaatttgcgtaagatgtttctggctctcgcagatgtgtttattatcgttgtcagcggtattcttgcaaattatattctcttgcttgtcggttacataggtactgcttcaagcaaaggcttgttgagctatattgttattgatcttgtcatgtgtctgtttacgctttatataagcggaacatattcaaaattgtggcgatactttaacgcaaaggactatatggtgtgcggaactgccgtcttttcggggtttacgctcggctttgtaatctcgttgtttttgcagattccgcagagaaagattttttgtatagtacattttgcaatagcccttgtcggaattcttgcattccgttttgttttcagaagggcttttcttgaccttaccgaggcaggaagggcagagggcggagagcgcacccttattgtgggcgcaggcaatgccggcagaatgattgttcgtgaaattcacaatgcgaatgagcagaatgatgttaataacccttcaaaaagtatcattccggtatgctttgtcgatgatgatttgaaaaagctgaatcagaaaatcgaaggaatccccgttgtcggaacctgtcccgaaattgttaaaatatgtgatgaatatcgcatagacaatattattgttgcagttccgtcatgtgaggaagatgagaagaggaagattcttgactactgttccgcaacagagtgcaaaatcaagattatcccttatctcggtgagcttttgtttgatgacgggcatacacagcttatttcacaggcaaaggaaatcaagattgaggatcttctcggcagaaaaccaattgagtttgaccgaaaggagattcatgaccttatcaacggaaagatttgtcttgttacaggcggcggcggttcaatcggcagtgagcttgtaagacagattgcaaagaatgatccaaaacaaatcatcattgttgatatctacgaaaacaacgcatatgacattcagcaggaacttgtgcttgaatacggcacaaagcttaaccttgtaacgcttatttcatcggttcgtgattacgataaaatggagcttatcttcaagacatatcgccccgaactcgtattccacgctgccgctcacaagcatgttccgcttatggaaaccgttcccgaggaggctgtaaagaacaacatcttcggcacattcaatgttgcaacccttgcagaaaagtacaaggcaaagaagtttgttatgatttcaaccgacaaggctgttaatccgacaaatgttatgggcgcaacaaagcgtgcgtgtgagatgattattcagtacaaggcgcagcacagcaccgatactgaatttgtaacaacaagattcggtaatgttctcggctcaaacggctcggttattccgctgtttcgccgtgagattgaaaacggtgcgcccgttaccgtaacacatcccgatattatcagatattttatgactattcccgaggctgtttcgcttgttcttgaggcaggtgcaatggcaaagggcggtgagatttttgttcttgatatgggtgctcccgtcaagattacaacccttgccgagaatcttatcagaatgtacggtaaggttccgtacaaagatgttccgattattttcacgggacttcgtccgggtgaaaagctttttgaggagcttcttatggacgaagaaggtcttaagtcaacacagaacaagaaaattttcataggaaatcaaattaaaatagacgaaacagatatgctgtcaaagcttgaggttctcaaaaagaccgcagaaaacaatgacagtgaaaagacagttgaacttttggcagaacttgtacctactttttgccacaaggtcaatgattaaccgaaaaggagaaattttatgtgcggtattgtaggttatgtaggacctaaggattgcagtgaggtgcttgttaatgctctcacaaagcttgaatacagaggctatgactcggcaggtattgcggtttttgataacggggaaatcaagaccgtaaagaccaagggtaagcttcaggacttaaaggataagcttgcagaggtcggcactccgaaaggtcatgtcggcataggtcacacccgttgggcaacccacggcgagccttcggatgtaaactcacatccacacagcggtacaagggttacaatcgttcacaacggtattattgaaaactatatggaacttaaagacttcctcatctcaaagggaagaacttttttaagcgacacagatacagaggttgttgctcagctcctcgactataaatacaacggaaatcctcttgaaacaattgacagtgtaatggctgagcttaagggttcgtttgcactcggaattatgttcaaggatttccccgacagagtttttgcggttcgccgtgaaagtcctcttatcgtaggcgttgcagagggcgagtgctttattgcgtccgatgttcctgcaattcttcagtacacaagggattattatcttcttgaccatgatgaaatcgtaacactttcacctgacggtgtttcgttcgttgacgaacaccttgatccgattgaaaaggaacttcagacagctgactgggatatggaggctgccgaaaagagcggttatccgcactttatgattaaggaaatcaacgaacagcccgaggctatcagaacaacgattatgccgagaatcaaagagggacttccgttccttgaggaatgcggcatcacaacggaaacaatcaagaatttcaaaaatatcacaatcgttgcctgcggtactgccatgcatgcaggtatggtcggcaagtatgttattgaggatatcgcaagagttcccgtaaatgttgacattgcgtccgagttccgttacagaaatccgattgtaggcgagggcgaccttgtaatcatcatttcacagtcgggcgaaacagccgacagccttgccgcaatgcgtcttgcaaagcagaagggtgcaaaaactcttgcaattgtaaacgcaaagggcagttcaattgcccgtgaggcggatatgctcatctacacactcgcaggtcccgaaatttccgttccgtcaacaaaggcatacatcacacagctttccgttatgtatctctttgcctttgagcttgctcttgcaaaggaaacaatcagcacagccgagtgcaagcgacttgtttcggctcttacaaaaatgcccgaggcagttcagtatgtaattgacaactgcgaggaaatctgcaagttcgttgccacaaagcttgttgcaaccgacagcttgctttacataggcagaggtcttgactatgccctttcaatggagggttcgctcaagctcaaagaggtttcgtacattcactcagaaagctacgccgcaggcgagttaaagcacggcacaatttcgcttattgacgaggatgttccggttattgccgttgcaactcagacaggtattatccccaagacaatcagcaatgttgttgaggttaagtcaagaggagcgaaggttattcttgtttgtacagacgcctgtgcaagagaactcaaggacggtgttgcggattatgttatcgaaattccgcatacagacgagcttcttatgccgattacagcggttgttccgctccagattcttgcttattacacatcaatcaacagaggtattgatcccgataagccaaagaaccttgctaagtcggttactgtagaataaacggcggtcttgtatttaattgaaaattgaaaattgaaaatgtaaaatttcggttggcggtgtgccaccgcagtcaattcgagaagatagttagataaagaaattgcattgatgcccgatacggcattgatgcaatttttgttttatatgaaagtgaatgtttatttatataattttaatttgtacaaatctttgcgtggttatctgcaggcggataatatccgtacatacagttttgcaacaacttccgtatataccaaaatatacaaaaacagtcgggcgacaattttttgtattcttgcgaattgtcttctcgaccataattttccattttccattttcaattttcaattttatgcacgctcgggcgtaatatgttctttaatatcatactgtattcacgaatagggtgctcttgttttcaaatttcagcggtaaaaaccttgtatttttttgacagattatgtataattaattagatatacattctaaaaagcagtattgatgaatctaatttagtttcgggggaatatacggacatgatgaaaactgtttttaaaagagctgtaacgcttgcaatttgtgccgtaacggtattttgcggtatttttgcctgttcgggcgcaacaaaagattacgagattccgcagattgacgatatgacgctttcaatgcctgacggtatgagcgctgttacaagggacagtaaaagcacagataaatatttttctgttttcggtcttgattatgacacaacaatgaaaacctttcagaacggaaatatctatcttcagggtatggataatatgtcatcggttattctgaccgtgacaatgacaaaaaatgagagcagcgagaatgtcggcaactatgctcagctttcttcaagcgagctttcaaatatacgcaacaattttcttaattccgacgagtatcggagctgtactcccgaccaaaaagaaaaagctgtgtggcttgtgtttgacgcaactgctcagagcagtaagggcgatgtgaaaacctttgttgccaacacggtttatgacggtatgaacattaatatcacaatgcagagaacagagggtgatgttacaaccgttgactacgatactttttccaaaattgtatcttcgataaaattcagcgacctgccgttttcaaagggatttattccgtacataatcatcggcggcggtgttgttatccttattttgattgttctcatcataatttttgccgtgagaatcagaaagcataaaaaggctaagaagaataacgctattcttgaggagcttgcagtcaagtataaactcggtgaaaagggtacggactacgacattgacaattttgacgattctcccgaaaagcccgataaacgctcaaagaaaaagcagaaatatgcggaagaggttgaagaagaaccggctttgcagggcagaagatatgctcccgagccgataatcgaaaatatggaagaaccggaagaaattacaagtgagtattcaaactttggttatgacacggatgatgccaaggaaaaagaaattgacgagataatcaactccgcaaaggcttacaagagtgagcttgagcgtgaggcatataaaaacaactacggttacgaggaaaacagcacggaggacgaaaaaaaaaaggagcctaccgcagcagatacctcagagactgaacccgaaaaaattgacgaaaacgaaaaagataacgcagaaacacctgaaaaacacgaggacataagctcttcgtcaggtcctacactcgttatccccgaacccgaacacgatctttttgaaacaagcgagcctgacgatatcgaccgtgaggacgatgccgatgttgaagaaaccgaggaggtttccgaacaaaagcatccgcttgaaaaaaaggttgacaagtacgcaaacatcattttcggcagtgacgatcccgaggagaaaaccggggaagaggttgatgacgaggagcttgtaagggcaaaggctaagaaaaacaagtttgacagcggttatgacttttttgacgaagctcccaaaaagtcaatgggggttatcaaaagctcagatctcagagatgccgaggactttgatgttatcggcgaggttgaaaaaaaagcagaaaccgtaaagcagaacgctcttgaaaaagagaataataaagaaaccgagggtgaaccgaccgataaacggtcaacggaagaggttcttgccaatgtaggcaaaaacatcggtaacgctctcaggggctttgcaggcggagttaagaattttggcattcactgcggatatttctgcaagaatgtttcaataatgataaagcgtaagcgtgcgattgccaaacgcaaaaaggcagaggaagagagaagagagagagaaagacaaaaggcagagcgtgcaagaaagcgtgccgaaagaggcgaaagtgacggacttgttcaggttcacagcagaaccgaccgccgcccacagcagaatcaccgccctgcaaacagaaacaagagaagataatttcttttcttaacggaggaaaaacatggaaatgctaattaaaaacgcagtggttgtttcccctgccgacaagcttaatgaaaaaacagatattctcataaagaacggtgtgattgccgaaatcggcagcggcattacatcagacggagagattattgacgcagacggtctttgtgccgttccgggatttgttgatatgcatgtgcatcttcgtgatcccggtcagactcacaaagaggatattatcacgggatgcaaggcagctgccgcaggcggtgttacaagcctgcttgcaatgcctaacaccaatcccacaaccgacagccccgaaattgtaaagtatattcttgacaaggctaaagacgccgatagccgtgtttatgttgcggcaagcgttaccaaggggcttaaaagcgaagaacccacagacattgacgctgtgaaaagtgcaggtgcaatagcacttaccgatgacggcagacctgttgaaaacacaaagtatttgagtgacgcaatgaaaaaagctccaaagctcggcatgacaattgtcgcacattgcgaggacttgtttcttgccgacggcggtaaaattaacgagggcgaggtttcggaaaagctcggagtcaagggaatccctgccggtgccgaggactgcggaactgcaagagaaattgcacttgccgccgctcttaacgagcctattcatatctgccatgtcagcaccaaaacaagcgttgcacttatccgtgatgccaaaaggagaggtgttaaggtgaccgccgaaaccgctccgcattatgtttcgctcacggacagggagcttttaagaggtgacgctgattacagaatgaatccgcctctcagaactcaggctgatgttgacgagattatcagcgggctttgtgacggtacgcttgatgccatagcaaccgaccacgcaccgcacacacccgaggaaaaggctgattttgtaaaagcccccaacggctcaatcggcatggaaacctcgtttgcggtctgcaacacatacctggttaagacaggcagaatgacgctttcacagcttgttgagaagatgagcgttaatcctgcaaggattttgaaaatcaatgcaggcacactttcagtcggtgcaaatgccgatgttgttcttataaatcccgatgaagaatggacagttgatgctggtaaacttcacggcaaaagcaaaaacaccccgtttaaaggcagaaccctcacaggtaaagtcaaaaagacaatcctcggcggtaaggtagtttttgaggattgagcaaataaaacccgtaggggcggatattatccgcccgcaagtaatagtgcgaaattgttgttaaaacaaattatataaatgaaacaaagataatgatatactgtagcggcgaaccgtgttcgccaatcggttaaaatagcagtcaatgactgtcggtaaataaacagaaaatttatttaacataaaggagtaaaattatggcacagaaaggcgacctcctgtcggtaagacaggatatcagagtagtagacgcaacaatccgtgacggcggtctttgtaacgatttcagatttgacgacaaatttatcaaggctctttacaatgcaaatgttaaagccggtgttgattatatggaattcggctacaaggcatcaaaggaaatctttaacgaagaagatttcggtaagtggaaattctgtaacgatgcagatatcagaaaaattgtaggcgacaacaagacttctcttaaaatcgctgttatggctgatgtcggcagaacagattttaagaaggatattatcgcaaagaaggacagtccgattgacctcatcagaattgcaacatacatcaacgcaattcctgcggctgttgaaatgattgaggacgctgcaaagaagggctacgaaacaacaatcaatattatggctgtttcaaaggcaagaaccgaggatattacagcggctcttgaaactctcggcaaaactcccgtaaacgctttctacattgttgacagctacggcgcactctatcccgaggagtcaagacgacttgcagacctttactgctcaattgccgacaagtacggcaagtcggtaggtattcacgctcacaacaatcagcagcttgcttttgccaacacaattgaggctatgacccagggcgtcagctaccttgacgcaaccgttgacggcatgggcagaggcgcaggcaactgtgcgcttgaacttcttctcggttttctcaagaacccgaagtatcaggttgcgcctattctcaaaatcattgaggagtacacccacaagtttaaggctgagggcgttaagtggggttacgatattccgtaccttctcacaggtcagtacaacacacatccccgtcctgcaattcagttcgtaaaagaggacagacaggattattacaagttctcaaatgaactttatgatattatcaacagctaattaaatttgtagcggcgttcattgaacgccaatcgaaccgattgcaaaatcggttcgaccatacaaacgatttgaattaaagtaattaaccacgatataacaatacatttgttgtttattcgttttggtttcacaaccaaaacgattggcggtcattgaccgccgctacggttaagcaataacattgtttaaatcaaaatatgaacgaacaaattgtttttacattataaaaaatgaggagaatcactatggcatttgacagacttatcgaaaatattgtaaaaatgcagaatcctacggttgcaggtcttgaccctaagctcgactatgttcccgaatcaatcaaaacaaaatgctttgaaaagtatggcaagacgcttgagggtgcggctgctgcactttttgaattcaacaaggcgcttattgacgcactttatgatattgttcctgccgtaaagccacaggctgcatattatgaaatgtacggctggcagggtgttaaggctctttgtgacacaatcgcttatgcaaagtcaaagggtatgttcgttatcacagacggcaagcgtaacgatatcggcacaactatggaggcatatgctacggcacacctcggtcatacagatgttgcaggcgaaagtattgacgcattcggtgcagacgcactcacggtaaacggttacctcggaacagacggtatcaagccgcttgcaaaaatttgcgattcggacgacaagggcatttttgttcttgtaaaaacttcaaacccaagctcgggcgaacttcaggatatgaagcttgaaacaaatgagagcgtttatgagcatatgggcaagatgtgcgaaggctggggcgaagaccttatgggtaagcacggctattcggcagtaggtgcagttgtgggtgcaacatatcccgaacagctcggtgaaatgagagcaaaacttccgcacacattcttccttgttcccggttacggtgctcagggcggcggtgccgatgatgttaaaaacgcatttgacgaaaacggtcttggtgcaatcatcaactcaagccgcggcattatgtgcgcatggaaaaagcaggggcttacagaagatgactttgccgttgccgctcgtaaagaggctgagcgtatgagggatgaaatcgttggctgtatcggcaaaattaagcttggctgattcatttgcacaacagaatcacgaaatttttcgatttctatgctttagtgctatgaatttattgactttagcgtgctaaaagcgtataatttgaatgtatttatttttacaactatatttttaaattttctttaaaaagggagatatcagaaatggcaagagtatataatttttcggcaggtccttcaatgctgcctgagtctgtgcttaaaaaagcagcggcagaaatgctcgactacgaaggcagtggtcagagcgttatggaaatgtcacaccgctcaaaaatttacggtacaatcatcgagggtgcagaggctcttttgagagaggttatgaacattcctgacaactacaaggttcttttccttcagggcggtgcgtcaacacagtttgcggctatccctatgaaccttatgacaaagagcggtaaggctgattatgttattacaggtcagtgggctaaaaaggctcatgcagaggctgcccgttacggtcaggctaatgttgttgcttcatcggctgacaagaccttcacatacattccaaagcttgatccttcaacattcacaaaggatgctgactatttctacatttgcatgaacaacacaatttacggtactgtttatcacgagcttcccgacacaggtgatgttccgctcgttgcagatatttcttcctgtattctttcaagaccgattgatgtttcaaaattcggcgttctctatgcaggcgcacagaagaacatggctccggcaggtcttacggttgttatcgttcgtgaggatcttatcggcaacgctatggatatcactcctacaatgcttaactggaaaactcacgctgacaacggttcaatgttcaacacaccgccttgctacacaatctacattgcaaagcttgttcttgagtggattaagaacgaggttggcggtcttgataagatgtatgaaatcaacaagaagaaggctgaccttctctacggtttcctcgattcttcagagcttttcaagggtactgttgttcccgaggatcgttcgcttatgaatgttccgttcgttacaggtgacgctgaccttgacgctaaattcgttaaagaggctactgaaaacggtcttgttaatatcaagggtcatcgcacagtcggcggtatgagagcttcaatctacaacgctatgccttatgagggcgttgaaaaactcgttgagtttatgaagaagttcgaggctgaaaacaagtaattattgaatattatgatataacgggcgaacgctgttcgcctgttattgtaaattcttaaaataaaaaattaaaaaggattgattttgatgtataacattcttacattaaacaaaatcgccgctatcggcacaagccgtctcggtgataactataaatacggtgacgatgttcaaaaccctgacgcagttcttgtaagaagtgccgcaatgcacgatatggaatttgccgataaccttcttgcaattgcaagagcaggcgcaggcacaaacaacattccgaaggataagtgcagtgagcagggcattgttgttttcaatacaccgggtgctaacgcaaacgctgttaaggagcttgttatcgcaggacttcttatttcaaatcgtaaggttattgagggttatgaatgggcaaagactctcaagggcaacggtgcagctgtcggtaagatggttgaaaagggcaagagtcagttcgtcggccccgaaatcaagggtaagactctcggtgttatcggtcttggagcaatcggtattcttgttgcaaatgccgctgttgctctcggtatgaatgtaatcggctttgacccgtttatgtctgttggcaacgctctcaagcttgctcctacagttaagcttcaaaagagcgcagaagatgttatggtaaattgcgactacctcacaatccatgttccgcttactgacgacacaagagatatggttgatgccgatatgattgccaagatgaaagacggtgttcgtattctcaacttcagccgtgacggtcttgttaattcaacagcagttcttgaggctgttaagagcggcaaggttgccaagtatgttacagacttcggaacagacgatatcctcggtgaagagaatattatctgcctcccacacctcggcgcatcaactcccgaaagtgaagaaaattgtgctgttatggcttgtgatcaggttaaggagtacctcgagaatggtaacatcatcaactccgtaaactatcctgcaatttcacttgcaagaacaaatgctgacgatacccgtttctgcgttgctcacaagaatgttcccgagcttctcaagaaggttctcacacagatcagcggcaatgttgaaaatatgctttcaaagagccgtggcgactatgcttacacaattattgatgttgcaggcgccggtgcagatgaccttgcaaaaatcgcagcagttgacggcgtaatcagagttcgtgcaatctgatttcgattaaaatttaatcgttgaaaatttaatctatgaaaaaagtccgaacacgcaaaatgttcggactttttgtttgtgtgaatctaaatatgtagcggcgttcagtgaacgccaatcgaaacgattgcaaaatcggttcgatcgtatttcaaaatattggtgtatggttgatttggctttgcagccaaatcaaatggcgatcactgatcgccgctacgtatcgctatatattaaacttttaccagatggtatttttttgcattggcaattataaatgttacggaaattgcaacggcacacaattctgcaacgggcaatgccgaccatacaccgtttatgcctataaacatcggcaaaatcagcattgcggcacactcgaaaacaagcgttcttgcaactgaaattacggctgaaatcttgccgttgttgagtgcggtgaaaagtcccgatgcgaaaatattcattccgcacaacagataatttattgcaaaaattctgaatccgctgagtgcaatctgctgaattttttcgtcgcctgccgagaaaattccgacaagcggttctgcaaaaaattcagatgccgtaatcattgcaaccgaaattatcagcgtgatttttatgcataatttgaacagcttttgcagtttttcgtgattttgtgcgccgtagttaaagctgatgacgggtgaaactcccgaagtgaatccaaacgaaaccgcagtgaaaataaagtgaatgtacaaaatagcacttatagccgcaacgccttttgcgcctgcaaagtgcatcatctgaatgttgaacagcgctgttgtcacggctgttgaaagatttgtcacagcctctgacgagccgtttgccattgcaaagaggatttcactgaccttgaattcaggcttgccaaagtgcagagtctgctttttgttgaaaaagagcaaaagcggaattgcacccacagccattccgataatggtgccgagtcctgcaccgattattccaaaatcccacactgccataaaaagaatgtcaagcacaatgtttgtgcaacccgacagtatcgagaaaagaagcatgatatgtggcttgtccgctgttacaaggtacgattggttgagcatctgccagcacattacaaagccatacggaatcataacgctgccgtagtcaatgcagtaggggagaatcttttcgtttgagccgaacatcatatacataggttcggcaaaaattgtgaacagcacagcaatgataatagaaatggccgttgccgtgattgcaacaccggacataagtcggtttgcttcctcctgtttgccttctcccattttctttgcgattatggcatttgagcctgttgaaaacattaagcccacagccataaatacgagcgtgaacggatatacaatattgattgcggacaatgcgtcacttccgacacagttcgcaacaacgattccgtcaacaaccgtgtaaagtgacataaaaaccatcataagaacggttggcaaagtgaatttcagaatcgtttttgctttgataggttttgcataaattgatgttgccataaaacttccttaccctcaaatttatatttttcacagaccattcaaacgattgtatcataactttgtcgcaattacaactgatttgtctttttttgtaaaatatgctattatatacagacttaaaagcgaaaaaaggggcggttttatgtttaagggcgcagtttttgatatggacgggcttatgattgacagcgaaaggcttgtttattcaatctggcaggaaatgcttgatgaggacggcaaagagtttaatctcgacattttcaaaaagacaatcggacttcgcagtgaggattcctacgaatattacaagtcggtttacggcgatgattttgactatcctgcttacaaggcggagtcgagaatccgctattttaagcgtatcgaaaagaacggcgtgcctgtaaaaaaaggcttgtacgaaatttttgattatttaaaatcagtcggttgtaaaatttcgcttgcaacttcaacctcgtcacaaacggctttgaagattatgaagaaaatcaatctctatgataaatttgacgcattcgtgtgcggtgatgatgttaaaaacggcaaacccgatcccgaggtttttttgattgccgcaaagaagctcggacttgagccggtggactgcgttgcgtttgaggacagcattaacggcataaaatctgcacatgccgcaggtatgaccacagttatggtacccgatttgtcagagccgacagacgaaattaaaccgatgatagattttttgtgtacggatttaagcgaagcgatagaacgaatttcaaattgaaaatggaaaattgaaaattaatgtcgggcagacagtttgtaatgtaaaaaacatattatgcccgagcgtagcattgtaattgttcgcacaaatctgtatgggcggatattatccgccacaggcggcggtcgcaaggctacccctacgagtttacggttccggcatattgttggctcaattatccgagaaaattacaaataattacaaatggttacaatttacaaaaatacaattgagcagggctgattattatacacattttccacatggttttcaacaattgttgaaaaagaacggcaatgcctgttgagcgttgccacggttactgcggaaaagggaaaaatgaaaaaataatcattgaataacagcacgataatatgttatactttggtaaacaacaatttttacggaggacaaaatgaagaaaattataaataaaaagtcactcaagggtacgcttgctgttatgttgtgtgccgttatggcattttctgtctgtgcctgtgactttaactctgacacagaaccaaccaaaacggatgcacaaattcagtttgataaatattgtgacgatttgttttcggaagaacttgaggacgacgctcttaccgcacattttgacatttcaaatccgtcggactacggcttgaaatatgacgaggaggactataccctcggtcatgtgtccgatgaagatacaaaagaatcctttgatgaactgaaagaggcaaaaacggatttggaggagtttgaccgttcgggacttacttcttctcaaaagcagacatatgacacccttgaaagctactttgaaattcagctttcatatgatggtacaacagaattgcagagtatatttgcaccgcagtcgggaattgttgcaaacctctttaccaccctgtccgagtttactttctatgaaaaggatgataccgacctttaccttgctgttttgaaggacacaaaacgctatatggacgagtgcattgagttcacaaagaaacaggctgaggacggttactttatggctgaagatattgcacagcagtcaattgacgagtgcgaaaagcatattaagaatgacaagtccgtgcttgttgacgagtttgagtcgagaataaagtcacttggtcttagcgattccgagaaaaagactgttgtcgaaaccaacaaaaagtattttgaagaatactacattcctgctttgaaatcagcaaattcagcacttgaaagtctcaaaaaatcaggcaaaaacgaagaaggtctttgcggttacggcaaaatcggcaaaaagtattattcggcaattgtcaaagacaaaacaagcagcagcatgactcccgaggagcttaagtcataccttacaaacagctttacaaaggttggaatgagtatgagcaatgtttcgcaggatgacttgagcaaatttcaggactacaaacccgactttaaggacgccgatgaggtgcttgaatttttgattgagaatatcgaggaggactttccgactcccgttacaacctcttacacggcagattatatgagcgattccgcaaagagcgacaatgtgggagcgtactatgttcagggacgaattgacgatacaagcgttaatatcatcaaaatcaaccccgactttgcaaataagggtatgactcagatgtacacaactcttgcccacgaaggctatccgggtcatctttatcagtttaccgcatcaaatgcaaacaaggatatcccgaatgtacgcaagattttaagctttatcggcgctaccgagggttgggcgcagtatgcctcgaaatgtacgcttgattaccttgatacaagcgatggcattaagaagcttatctacgcaaatgatattctcggctacattctctattccatggtcgatgtcggtgtgaactataacggctgggattatgaaaaagtcaaggagtatatgtcaacggcactcggttcggctgacagcgagagcgttacagccgcaacaaaagaggcgtatgaccttgcccgttcaaatccgggttactttctcccctataccgtaggctacctcaagatgattgatatgcgtgaaacagccgaaagcgagcttggctcaagctttgacgcaaaggaatatcacacattcattatgaatctcggaatcacaagcattgatgtctacgaaaaagcccttgatatgtggcttgaaagcaagaagtaaatttttggtgattatcttgaatattttttacaggtatgatataattaactcattgatatgataaatctaaattggtatggatttttctaagatgtgattcttattttcgccatacactcattatgggtgtatggcgatttttattttacgcaaaggggtgttaatatgggcgttaaaacggaaaacaaaatggcttatgaacctgtcaacaaacttataattcaaatgtcggcaccgccgctgatttcaatgttctttcagtattcatacaaccttgttgacagtatgtttgttgcggggataaatgaacaggcacttgcggcagtatcgcttgcattcccgattacaacgcttatgaatgcgttgtccgtgtggataggtgtgggtgttaatgttttgattgcaggctatttgggacagaaaaatcagcaaaaggcaaattctgcagcggctctcggagtggtaatttcggtagttgtcggagtgctgataaatttcctttcgcttttcataataaatccctattattcggcttttacgcaaaacaaagagatttttgaatacggaattgcgtatatgagtgtctgcgtttttatgcagataccaaatatggtgcatattgtaattcaaaaaatacttcaggcaacaggcaatatgattgctccgatgtggtttcaaattgcaggtgttgtattcaattttgtgtttgaccctttgctaattttcggcataggtccgtttccgaaaatgggtgtggtcggagctgcagttgccacggttttaggctatgttgtttcaacaatcattgcgttgatacagctgtttcttacaaaacaaaaggttaagccggtgtttaaaaactgccttgaaccgaagatgataaagctgatattttcctacggattgccctcgtttgttatgaatgcgttgggagcattcaccgtgaattttgcaaatatgtttttggtgcgatattcggacacggcggttgcatttttcggagcatatttcaaggttcagcagttgatttttatgacggtgaacggactaattcaaggctgtttgcctataatgcggtttaattacagagcaaaagagtacggtcgccttaaacaagcaaataagagcggaacaattatcgcgactgttatgatgattgtcggtatgttcttggtgctgattttcccaaaagagatattgtttttgttttcggcatcggaagaaatgtgtgcttttggagtgccggcaatgagaattatgtcactcggatttgtgttcagcggcttttctgcaatgattgcaacctatgaacaggcaacagacagtattatgcccggcgttgtagttcaactgttgcgacagggcgtgctgttagtccccgtaatttggcttttaaacagcgctgttcaaatgacaggcatatggattgcgttcccaattacagaatttgtcacatttcttgttgctgttgtatttgcaaaaattaaaaatcattgaataaataaaaataacaaccgccaaaacccgatataatggattttggcggttgtttgttatttaaaatatgtttaattttaaattgtttttgcaaaaacattatcagatgattttgctctgaaaattgtttttacgagcaggaatgttatataaacataaagtgcggtgtagatgattgccgtaaatttaaggctaataagctcgtaggagaacagatagtagcaatagcctctcaggcttataagcgttgacacaatcggaatccacaaatgctttgcacttaccgccgcatagacaattaaaataatgtcaagcagataaccgtagcgttcgtgcattgacgaaaggaacatgatacaggtgaacacagtccacgctgttgtcaaaagaaaagtttcaaggtttttcaaatcaacctttttatagatgataatgcacatcataattccgagtacggcaattgtcagaaagaccgaaaactgcttgaacagataataatatgttatatcgtttccgtcacatatgagtgcgtaaaagttcggacagttcatctgaataagcttgccgtagtcggtctgttccgcatatattgtgatgatatcgataaacggtctacccataataattgcaggcaggcacattatcacatcaagtgcagggattataaagaaatgcagaatcgaaattttctttgtcgaaatccagtaataaagcagaacaggaatgatgaatacggtttgcagcttgaatgcaaacgcaatgccgatgaacacaaacgatgcaatcggcttgtctttgtgcaaaaacaggattgcaaggattataaacgaggtgtaaattgaatcgcactgtgcccaaaacgatgagttaaaaatcaccgttgccgaaagaagtacggctgagtaggtgagtatcgctttgagccgtcggttattctttgcaaacgaataaacaagcattgcggttgaaattgcaagtacaaagtcaaagattattgatacgattttgtacgcatacagagcatttagcggcaaaagagtcataagatagattatgacttgatacggaatgttgtagttacccacctgagttgcaagccccgtaaaatcattcagcttgattatgctccaccacgaatttaaaaagctgttgaaatcatcgctttgaaaatccattccgcaggctctgaggaaaattgcaataatcgttaccgcaacgagtaaaaataaaataatgtgtttttttataaagtcaatgactttgctttctgcttttgtcatagagaaaattcctgttcgggtttaaataaaaccgattttcttcataaccttgcccattgtgcggctgctgattttaagggcaatttcatcggcttttctgtaacagctttcaagatatgccttgtctgcaacaagcttttcgtagcgttcacgaatcggacgaagttcttcaacaactgcctcgcctacagctgtcttgaagtcgccgtagcccttgccgtcaaaatccttttcaatctgttcatatgaaagacctgtaactgcgctgtaaattgccataaggttatttacgccgtctttgccctctgcatagcgaacctttgcctcgctgtccgtaacggctctcttgaacttcttcattataacctcgggtgcatcaagaagatgtacacagccgttgacattttcatcggacttgctcatctttcttgtcgggtcctgaagactcataacccttgcaccgttttttggaatgaaaccgtccggaatcttgaacacattgccgtaaataccgttaaaacgctctgcaatgtttcttgtaatttcaatgtgctgtttctggtctgcaccgacaggcaccttgtcagcctgatagagaagaatgtcggcagccatgagtacgggatatgtgaaaagacctgcgttgatgttgtcggcgtgctttgcagacttgtccttgaactgcgtcattcttgaaagctcgccgaactgtgtgtaacagctgagcgcccatgcaagctctgcgtgagtgtgaacatgactctgaatgaagaaaaggcttttttcaacatcaataccgcaagccataattgaagcataagcgtcaattatattcttacgcataacggcaggagtctgtcttaccgtgattgtgtgcaaatctgcaagagcgtaaatgcagtcgtattcgttctgcattgtaacccagttgcgaaccgcaccgagatagtttccgagtgtaattgttccgctgggctgtattgcgctgaatacaacctctttttttgtctgattttccattattcccctccgtgattaaagactgtttgcatactcgccgaggattttgattcctctttcaagctgttcgtcagtcggtgttgaaaagtttattctgaaactgtgacaggtttcgttttcgtcagttaaaaatgcgttgcccggaactacgcaaacctttttgagaacgagttctttgcagaaattcggcatatcaatatcctcgggcaagtcacaccagatgaaaagaccgccgtcaattttatgatatgtgattttcggtgcgcagtatttgtcaagaagctccatgcagaagttcgctttctttgtgtagatttcacgaagctttgcaaggtgagcgttaaagtcgtactttgtgatgaattcatcgcatacatattgtgaccagatgtttgtatgtacatcgttgccctgtttgcacacaacaagcttttgaaaaatcggctttggtgcaatcgtgtaagcaacacgcatacccggtgaaattacctttgagaatgaaccggcatagattacaattccgtccgtatcaaagctttttatgttcggaacatattcaccgctgtaacgcaggtcgccgtacgggttgtcctcaatgatgagaacaccgtattttttggcaagctcataaactttcttacgcttttcaaggctcattgtaacacccgaaggattttgaaaattcggaattgtgtaaatgagctttgcgttcggattggcttttaaagcctcttcaagcttttctgtgctcataccgtcaggctcaacgggaacacctgcaagctttgcgttgtagcttctgaatgtgtttagcgaaccgatgaatgacggtgcctcgcagattacaacatcaccctcgtttacaagagcctttgagcataaatccataatctgttgtgcgcctgttgtgatgagaatgtcgtcattgtcggagcctgtgttatgctcctttttcatatattccgtaaggtgctttctcagcggagtgtaaccctccgaaacgctgtactgtaaaaccgaaataggatcttctgcaagaacctttgccgagatttccgcaatctcctttgagggaaatgcatcgggcgacgggtttcctgccgaaagcgacacaacgctcggatcggcggcatatttgaaaatttctctgatagcactcggcttcaggcttgaaaccctgtcggaaaacctgtattccataaaaatatctccttttaagatgataaggattttttaaaattccataccctgtaattctatcacgaattgcatatatgttcaagaaatttgactgtttttactgcgattttattcaaaaaatgtgtaatttattattttgcatttgtaaatgttaattcacggaaattgtattttttgtgctttttgtattgtttttgatgagtttctgttgtataatctaagtgataatgtccttacggtcagagcaaggcttgctttgattcaaacaggagtacactgcgagtaattaatacacttatataattcattgaattcaaattgaatttaaaaatcttcagtttgggagaataacactatgagcagaagaaacgattacgattattttgatcttgataatttcgatgacagcattgattcccgtgaatatcgtcgcagacagcaacagcgccgttctgcaagctatgccgcaagaccgtcatcacagcgtcccgccagaagacctgtaaaaagaagaaacaaaagaagaaccagaaacagaattattatcgttgtgagcgcattggtaattctgtttgttattatttttattataacttcaatttttaagggttgttcaaaggaagatgcccttgcaagcgttcccacgggaacagtgggcacaacggcgtctcccgacgaaaccgcaaaatcttcgaaagctaacaaagcagacgagctttctcctacatactttatgacaccgagcataaaggacgacaatacaaaaggaactctttcatacggcatttatgtgtggaacaaaataggctacgaattgttcagcagtgatgatgcaagagcgcagaactatgctcagacaatcaacggctttgcagacaagttcggcagttccgtaaaggtttatgatatgattgttcctaaccataccgaaatgggacttccgcaaagactcaaagacagcgacgctccgtcaacctcacaggctgacaacatcaaggcagcttatgcggctctttccgacaaggtaactccgattaactgctacaaccgtcttgcggaacataatacagattacatctactttaagagcgaccaccattggacaggccttggtgcttactatgcttacacagcatttgccgatacaaacgatttgcccgttctttcgcttgatgattgcaaggaacagaaaattgacggctttacaggctcgtttaccaactcggcagacggtcttgacagcgatacggtaagttattggaaattcccttataatgtaacaatggatatcacacaggcagacggttcttccgcaagctatgacagtccctactatgaagccgcagagggcggttcaaacacctacggtgtgtttattatgggtgataatgccctcacggttctgaaatcagcttcgaaaaatgcggcggcaggcaagaagattgccgttgtaaaggaaagctacggcaacgcttttgttccgtatctcaccaataactacgaagaagttcatgttatcgatttcagatatttcaaacataatcttgttgattactgcaaaaccaacgaaattaacgaggtgctttttatgaacggtgtaatgagtgccaacactcaggttcagcttgacagtatgagcggactttttaactga

SEQ ID NO: 502 - DNA, 31696 bp, unidentified
  source 1..31696: mol_type = unassigned DNA
  misc_difference 4452: note = a, c, g, or t
  misc_difference 4453: note = a, c, g, or t
  misc_difference 4454: note = a, c, g, or t
  misc_difference 4455: note = a, c, g, or t
  misc_difference 4456: note = a, c, g, or t
  misc_difference 4457: note = a, c, g, or t
  misc_difference 4458: note = a, c, g, or t
  misc_difference 4459: note = a, c, g, or t
  misc_difference 4460: note = a, c, g, or t
  misc_difference 4461: note = a, c, g, or t
  misc_difference 11010: note = a, c, g, or t
  misc_difference 11011: note = a, c, g, or t
  misc_difference 11012: note = a, c, g, or t
  misc_difference 11013: note = a, c, g, or t
  misc_difference 11014: note = a, c, g, or t
  misc_difference 11015: note = a, c, g, or t
  misc_difference 11016: note = a, c, g, or t
  misc_difference 11017: note = a, c, g, or t
  misc_difference 11018: note = a, c, g, or t
  misc_difference 11019: note = a, c, g, or t
  misc_difference 16899: note = a, c, g, or t
  misc_difference 16900: note = a, c, g, or t
  misc_difference 16901: note = a, c, g, or t
  misc_difference 16902: note = a, c, g, or t
  misc_difference 16903: note = a, c, g, or t
  misc_difference 16904: note = a, c, g, or t
  misc_difference 16905: note = a, c, g, or t
  misc_difference 16906: note = a, c, g, or t
  misc_difference 16907: note = a, c, g, or t
  misc_difference 16908: note = a, c, g, or t
atggctgctgcacaatattacacttgttataataatgaggtcgttatgcttaataatttaaaaaaaattcgtgaatcaaaaggtatgtcacaagagtttgttgcgaaagctcttaacgtgtcaagacaatccgtttctaaatgggaaaataataaagcttttccagacatagaaaatattaagcttttatcgcaactttatcaaatctctatagatgaaatacttgataataacataccatctgataaaaatattaggacagttgactttgattcccacatgcatgagaaaaatatttatcgtgctgtctacttattaacaattgtactcattacttctagctttatttcagtaataggattcttgagcgctattgttattttattaaaaacatggagaaagaaatatccatactatttttatgtcttatgcatcatctgcttagtcatcaatataataaacatggggatcttttttaatagtttattgtttcatattggtattacagtgattcaataggaaggatgtcatattaccgcaacttgtaaactattgtttactacttttgtttttacccctgttgaatggctcaatcccatatacttgtatataaaactcatagttgcttgtttgcttgagttcctttttagcacacagttatatatgtttcctttataacaagtatatgatggagaatttacagaagagatgttgttatccttaatcacaacattatattctgctttccatgcaaaaatagattcataggcaatatgataagacctatttttcaatgatcaagaaactgtaagtagaattacaatcaatctttggtgagtttttttcataaatatagtcctccacaaaatttttgacaggtatgaattttgacacatacaaactgatttggaaagcaactagcactttacattatgtatatagtgcttaacatattgaaaaattctcctgatgcattgcatataggaaaagaaaatatttcgtcatcgtaaagatttatcagaattttggagttatactggaaaagtgcaaattccggtcgatcggggcatccataccagaactagtggggcctcccggccatcctgctcctcccgttcctgtgggggatgaacagggtcacgtacgcacaggccgccgcggatctgctgacaacagctgtgaccgtgttttcgcggtgcagatccaccgccagttaaagcagcccgtcgcctgacggactgctgcaacctgcggattgccctaacttccaagctcccactgctccgctttctttctcacatccacaaacctgcggtaaatcccttcttccttcaggagttcttcatgggttcccctctgcgcgatcgttccgtcctccaccaccagaatctggtcagcatgctcaatggttgccaggcggtgggcgatggtgatgaccgtcctgccctttgtcagttctgtgagcgcttcctgaatcagatgttcgttctccggatcgatactcgccgtggcttcatcgaggatgatgaccggcgcatcctttaagatcgcccgggcaatggaaatcctctgcttttccccgccggacagcgtaccgccgccttcgccgatcaccgtgtcatatccgttgggcagtgccatgataaagtcatggcagcgtgcagcctttgccgcgtttatgatttcctccccggtggcatccggctttccgaaacggatgttgttccttatcgtatcgtggaagagatagacattctggaataccatggagatattcgcaagcaggctgtcgcaggtaaactctcgtacatcatgccctcccatgcgcacactcccgccctgtacatcatagaaacgggcgatcagactgcagatggtggtctttccgctgccggaaggcccgacgatggctgttgtggtatgttccgggatgcaaaagcttacatttttcaggaccttgcgcctattattttctccatagctgaaatcaacatttttaaattcaatgtcataatgacacagttcgatcttctttccgtcccggtcaatataatttccttccttcagggcttcaagctgatccatggtcgtatcgatcacaccgagtacatgggcgctgtcgctgatgggctccagcccggacaggatgctgaaagagaagaacacaaacatcagcatataggagaaaggcatttcccccgtcattcccagatagaacgccgcacccgccataaatacagacgccgtcttgatcgccagcagatgcaggcagttcgccggggtatatccccactcaatcttcaggcagatatcacggctgtcgctgcatgccttttttacagccgccatggacgcaccgccctggccgaaagatttgaccaccggaagtcctctggcgtactcaaggattgccgcggtaagatccttccccgcctgtgccgataccggagcgttcttcacactgtgccgggagaccagaagcaggaacaggaaggaaatggctgctcctgccagtgcaattaggcagacagccgggctgaaaaagagcaggaaaaggaaaatgcataggaagtttaagtaccctcccacaaaagtatccaccatccgcatccccatattttccagagaatgaagccctgtcgtaatagagtttagaatgttcccggtatctacctgccggaaatagcccagagatacccgcttcagggcgtcgccgatggcaagccggtctctggcaaccagctcatagctgatcccttcctgaaatctggcgcgcagatagtcaaaaagaaaccgcagcagcacaaggcagaggatgataccggtgctcagccagatccagttcttgtcaaatccagtccctttcctctcactctcgatcagcataccgacggtataagccgctgccatggtcggcattgccgcaaaccatgtggagaggaaggaaaagaaaaatcccatataaagcctgcttttaaactccccgcaccagttgatgatccgctttactgtccggaacatatcaggtcacctcctttttctctccgcattttgtgcgcctcatcggaaaccgcccatccttttgcaccgatatgggctttccacatctcacagtacagagggcaggtcaaaaggagctgctcctgcgttccctgtgcgatgatcctgccattatccaatactgcgatacgatccgctccccggatcgtggagagacggtgggcgatcacaagcagtgtcttccccctcgtcagctctgtgatactcttctggagcttatcttcattttccgggtctgtaaaagccgtagcctcgtcaaggataacgatcggcgcgttcttgagcatcatcctggcgatggcgacccgctgcttctccccgccggaaagccgcttcccggcctcccctgccggcgtgtcgtacccattaggcagtttccggatgaattcatcgcactgtgccgcttttgccgcggcaaagacttcctcatcacttgccgcagggttcccgatgcggatattttctttcagggaacaacggaagagaaagttatcctgtgtgacaaaactgaccatcccggacagctccgacagggagtattctttgaggctctttcctccaagaaggatctccccgctgtccggatcccagaacctcgcgatcaagcgtgctacagtggacttaccgccgccggacggccctaccagcgctgtgaagctgccgggtgagagttttaagttaatgccgtggagcacctcctctttgcctttcccataagaaaatcttacattcctaagttctataccataagccgcggcagaagcctgtgaaaaagccgggcttttggtctcttcttccgctgctccttgcggttccggcagttcttcaagctccagatacgcctgcagctcttccaccgtcatctgtatttccttgatactgttggagaacacttccagctttgccagggatgtgaccatggacatggacaacatcacgcacagagccgcctgccctgcgctgacagatcctgacacagccaaaaacaggctcacggggagcgtccccagcagagtggacggaaacagtgcgaaagccagcttgaacgtcacccatgtggagcttagccatttcagcacgaatgtcttataatccatgatcgcgccggcaaatttctcataggaagttccggcacgtccgaaggccttgatgacctcgatcccctccacatactccacgatcgtgctgctcatccgggcatttgcctgattgtatttgtcgaagttttgcccactgatccgaaaagtcagtatcatgcagaccagagaaagcgggaccgtgaccagagatgccagagccactctgggatcgatcagcgccagtgcaatcaagcttaaaaccggaagagcgatgtgccctgccccttccgggatcatatgcgccagcggcggnnnnnnnnnnttcgatcttatccaccatcacattcttgatctccccgatggtatgcgccgttacttcacccagcggcgcgcgcaggaaacggtctgccacctgcagcctcagcttctcaagaatatggtacgccgcatagtgtgacagcccggttgaaagcccgaaaaatactacttttacaatgtaggatatcagcgccagtgagcaccagaaaacaatgacatgtactgtgactgtttccgaaataaacctttcaatcacccggtacatacagaaatagggcaaaagccccgctaagacgctgataacagataaacaagtggaacagaatagttttccccggttccctgcggcataatcgagcaggcaggagaaccagccctgtttcttctcatccatatcgtacactcctttccgtcagaggcggttttcctgcgtatagcagtttatagcctttgacgttcttagtgtacaatctttcgttggatacgtccgctccggtcagaccggactgctccatttggttcagaaaattttccgatactgcgcaggagacatccccattgccttccgaaatgcagcagaaaacttactgggactgtcataccccaccatcccggcgatctgtgccacgctgtagtccttttccgttttcaaaagcacggcggcgcggttcatccggtactgcgcaagccacattccgatggcggtcccgtatatggagcgaaagcattttttcaatgtggtcagtgagatcccgaaacgttccgccagttcctcctgggtatagctttctgctggatgttcttccagaaattttctgacagctttcgttttctccacatgggctttataaaaatacggtttctccccgatggattccggtagttccagagcatccagatacagcagaagttccatgatcttcactttaaaatagggaagcctgatcttctgcggcaccgcgtagagctcgctgaaaatatgttcaatggcgtccattccatggatgacaagagggtacttatcccggcagtatttctcctgcaatgcatatacatctaccggaaaatcccggatctcctgcggcagcgcgcggctggccgctgcaaggtcaaaggagatcatcgcgccatggtaatgggaaaggggaagcacaaaacgccctgtgtgggtaagccggcggtccagtttgagatcccccgcctccacataggagtatgcgtcactctttgccgcatactcaagcctcccctcacggcagtggtcaatacacaggatctctctgcccggatggaagtcagaatcataatactgcatatggaaatcattgtaagccagcgtgacaccggggaacacgtcatagatggtcatcctgccctccccggtctcgttacggaattcatatacactgcacccgctttttttcgtcaaaagggcggcatcatcacagtggctgaaaacatctgtcatgggtgtttcctcctttgacattcagcatagccttcctttggttagttgtcaataactgtactgggcaaagaataatcaaccctccggattgattttgtttattgtccatgcacagctatgctgctgtaattctacaaggtggcgatataatccatcttcctctatgagttcagaaggcgcgccctgctggacaacttttccctgttccagaacaaccaccttgtccgcaccggcaaccgtacgcatacgatgagcaactacaaggactgtctttccttttgtgagccgggtgatcgccttttgcacagaggtttcattttctgcatcaagggacgctgtggcctcatcaagaaggataacaggtgcatcttttagcaaagcccttgcaatcgagattcgctggcgttcaccgccagacagagtagaaccgttttctccgattactgtctgatatccctgtgggaaacgggatatgaattcatcgcagcatgcggcctttgaggctgcaatgacttcctcatcggtggcgcttcttcggccaatgcggatattctccatgatcgtatctccgaacaggactacatcctgaaagacaatcgagtaattggaaagcagcgtttccggatcaaccgtccggatattaatattgccaagtctgatctctccacttgctgcatcccaaaagcgggccgccagctttatggctgtacttttaccgcttccggacggaccgactaaggctgttacttctccctgttttgccgtaaaacttacattcttcaaaacagtttctccgcccttgtaggaaaaagaaacatggtcaaaagtgatgtcacatccgctatttgcacagctgtccgctccagataactctggctggttttccatttcttttatgcgtttgatctgcagattagcgttgaagatttcagataactgcatcattacgccgcttagtggttcatatacccttgatgccgccagcaggaaaagtaaataagtaaacaaatctgtatcgccgccaatcagcaatgtagttcccactaaaacaaccagggggaggccaagcctcaaaagcatttgagcggaagtcagcagcgtaccggaggtaagttctgccttggcggacgcattgaccacatcttgtaatttcctttcaagttcttttaaatatttatctgtttgattacaggttttaaggtctgcaatattgtccagaaattcctggataccatcggcggcagaaagcctcgcctccatccgtctggttcccattctgtcctgcagcttcttgctgcccactatcagcagtaaggctgcgggggcaacactaaaaagcgccagtgccatgcgccagtccatagcaaataacccgatcataatgaaaatgatgctgatgacggaaccgatcatctttggtatggcgccggaaaaagtacgttccaactcgttacagtcactcatcatggaggtagtcatttccgcaagatcatgttctccaaaataggccagagggagtttccgaagcttctctgccagagtaatacgccgtgcagcactttcttcatatgccgcaatgtaggtacagcggtattcaataaaattcgcaatgaaaatgacagttacgctggccagtgcaagaattgtatagagccaaatatcaagagttccagccgtttctcctaaaagaggcttacacacttcttgcaaaagcatgaggcacagtgccatcgggacaaacaagctcaaacttgaaaatgcagaggcgataccgcccttttttaaatctgccgcacctttatcgctaagggcaaacaaacgtttaagcatgaaccatcgcctcctttcctctgcttgccgcactggctgcggcatctggggacacccttgcggcatttcctaaattccatgcagcagagcgctgatactcccgccacatgtttgcataaatgccatccatcttcagcagttcttcgtgcgttcctgtttcaacgatttttccgtcagccatgacaaaaataaaatccgcattttgcactgtagtcagccggtgggcgatcatcagaaccgttttgccgcacagtaaatgctcaaaggccttttggatctggtactcattctcggcatccgcaaaggaagttgcctcgtctaaaatgatgatcggcgcatttttcaaaatagcccttgccaaagccagccgctggacttctccaccggaaagatagatcccttctgttccaatgaccgtatgaatgccttgtggaaatttatgaatgatatcatcgcatctggcctgatgcagtgctgccaggacctcatcctccgtcgcagcagggcaggacattcggacattttccaaaatgctggtcttaaacagttttgttgtttggagtacaaatgctgtcttctccgaaagggcttcatctgtaatatcccggacatctacgccgcctattttaatactgcctttatccacgtcataaaaccgtgggatcaggcttgcagctgtcgttttcccagatccggacgcacctacaagcgcataagtctttccggacggaagctcaaatgacaggtctcttaacgccggcgccggcgcccccggataggtaaaagtaacatgggaaaaagtgacggtattcccatccggcactgacggatgctttgttttaaccagcggtttttcttctaaaagtgtatcgatcctcctgaccgcttcctccgctgtaattttgtaagaggaaacgtacatgattttattgatcattcctgcacaagccggtgtgaacaggatataaaacagccagttgatcagaaatccccgataatccgcggttccggaaaggaacagcaggccaaaagggatcaaaagcaggaatgaagcattgaccagcgtataaaaaatactcataggccactggcagacaagagcaaaggccgtgatattttccttgtagctcagaatggaacggtaaaaacttttgaaagaataaatggtctgctgaaatacttttacaacaggaattcccctcacatactcaacagcttcgcggttcatggtctctccggcatcctgtacctgtttgatgtatttcggggcggtagttcccatgacagttccctgtacggcaaagcccagtgccagggggatgaggctgagcagccccaggcgccagtcaaagataaacaggaaagaaaaaataataaacggtgtgacaaacgcaccggctaaatccggtaactgatgtgcgataaatgtctctgtggaatcagcgttttcatcaatcactttgcggattttaccgcttccctgcataccgaaaaacccaagcggcaatgttgtcaaatgttttaaaacagccattttcatgttctttgcaatacaaaaagccgccaaatgagagcaaagcagcgagacgaagtagagcaaaaacccacctgccgcaaacgccacggcaaaccatgcataccgcagcaatgcagatgtggaaacctggccaagatcaggcagaaccataaatatttctctcgccgcgaaccagagccagatgaatgggcaaagtgaaaaaaacgtactgacagcagaaagcgcgcaggaaagaacaactaagtatttcctgttccctgcaaactgcaacaggcgcgatattccacttgcctgctttttttgtgtcatagctggacacccctttccaaatgtgatttgcatttttactataattatgttatcttttaagttagaaatagctaacttgtgtttacgatagcgtttatttttactctggtcaatgcaatcgacgatctttgtgccggcagccgaaaaggttgtgccagaagccgaaaaagaggtgtttcttgtgggaaatatattagatcagctatttgaacctcagtttaaacagatatctttataccctgcttcgggcagcgatcagctcaaaggaagtggcatcacttatcgccctgcgccggatgtgggggacggatactattgggtgcatcctatccgtgacttgtgtgtagtggctatagcagacctgacttttaagaaagagacagagttaaattatgaccacccctctttcctcacaataggaaattatgcatctccgctggtaccatattttcaggggaatacatctgacgtttactatgtccgatgtacgcggacagaagaccatctggcaggatatgtcaataatgcgtcaagatttcgggcaggtatatcatgtggggaaaccatacgtctggtctctgtcacaatgctgccggattactttcgctccttcctgcaaaaaaatttttcggtagaccagcagtcattgatccattccattgaggggctggcaggcagaacatctatgccggaactggagtatctgttcacacagatctgccgggctgaaccgactgtccagaatggaagcctttattttgagagtaaagtgctggaactgatttccttgctgcagatgcaacaagaacatcaaaaagcatttccagaagtgtcagcattggatgaagctacggttgccatggtacgccgtttagcagtttttttggagagccactgtgaccaacatcttacacttgagacattaggaaaaatattttataccaataaaaataagctttcctacctctttcgtctggtctataacgaaagcattcctgcatatattcagaaaatgcgtttagagaaggcacaaaagcaattggagcatccggggatcagtatttatgaaattgccagttctgtggggttcaaaaatcaggggagtttttcagagtggtttaaaaaagaaaccggccttacaccatccgaataccgctccggcgcgggatctggactggtctgaccatatccgggtaaccagcaagggatatatgctcggttatcatgatatgaggagcgacggcatccgtttcccgcaccggtttctggcaaagatcggcgacaaatggatgaagatggctgtacacaagatggactttggcgaataaggcttttttactttaattcccgggatgcgttccacattgccgcgtattttccgccctccccgatcagctcgtcatgggtannnnnnnnnnccgccgtccagcacgaggatccggtccgcgctgcgtatgatggggagtgtatgagcgatcatgaccaccgtcttatccgcgcttagaaggcgcgccaccgcctgcttgacaagaagctcattctcgatatcaagggaggctgttgcttcatcaagcaggagcaggggactgtttttcaggatggcccgcgccacagaaagacgctgtctctcgccgcctgaaagccgattcccgttctccccgaccatcgtgtcatatccgtgttccatctttcttataaaagtatcacagttcgccagccggcacgcttcttcaatctccgcatccgtggcgccgcgccttgcatatcggatattctcccgcacggtatcattgaacaaaaatacatcctgatccacaaggctgatccgggagagcacctgctccgccggatatccggcaatgtcctgtccgccgatggtgatctgcccgccctggggcgtataatacttgcagatcaggttcaggatggtagacttgcccgcgccggaatcgccgaccacggcggtcaggcttcgctccggtatggtaaaggaggcgtgtgtcagcacaggttctccctccttgtaagagaaatccacgtcctgaaaccggatctcggttcctgcagccgtcagatttcgtctggctgaagcgtgtacgatatctgtccgcgtctcttcctctgtcttctcctcttcctctgcgaagatcccgctgatcttcaccttcgacaggaggagattccggtatgctgtcagatcgataaaaagcgtcatattcaccttgcctgcaaacaggggcagcatgatgagcaggatgagcgctgccggctccagcgcgccggaaagccacgcccgcacagacaggacgatggcaagcgccagggcgatatagcttaaatagttgaacccaaagccgatagggagcactgctttttcataatcatagctgatattggaataagatttcatcgcctctgtcactgccctgtttttcgtccccaccagcccgtaggagcgcagtgtctggctcccggtcagatactccgtgatcgcgctgacattctcctccctcgcctggttcttcctcgtaccgtatttctgtacctgacggatggacagcgccatggcagggatgacaaacagcgtggacgccagcataatcagtccgatcggcacatacagagtacagccatagagtccgatcatcagcagaaggatgctgtatttggtgatgtccgccaccttatgggtgaggatctgttcataatccgctacctcactggtcgccgcattgatgtagaatccggtgcggtttttggtaaagagcgacaaggggatgcgtttcagcttatcgcccagggcgatgcgcacccggcggctcacatcagagcccccgatctggctgcctgtataggacgtagtatagagcgccagacgcaggacaaagatcagcgtgagcatcccggtggctgtcaggatatccccgaagtccactgtctgcccgaagatcaggtcaagcacccggaataatacgagaaagctgcatccactcagaagcccctcagccactacccctgccacagacaactttagttttctgcccatactgaaaatatctgttcccgatttcatgccaaagcgcctcctttctctgcctgccgcaccgtctgccgtgctgtttctccggcctttccatccctgcttttcagttcataccggatatttcttgccgcatgataatcctcccatgcttttctgaaatacacactattctcaatcatatcttcaaaacttcctgttctgctgatcccctggtcttccaccacggcgatgcggtcgcagttctttacgatacccagccggtgggcgacgataatgactgtcttgccccggcacaggttttcaatggcacggtcgatctccagctggttctccggatccgccgcgctggtcgcctcatcgagaatgaggatgggcgcgtttttcaggattgcccgggcaatacagatcctctgcttctgccctccggagaaacgggtcccatagctccccactttcgtctcatatccgtccggcaaggacataatgaactggtcgatctgcgcctcccttgcggcggcacgcactctctcaagggtggcggtccggtcgcccatagcgatattctcatacacgctgcctctggtaaggaagctctgctggaagacaacggatatattttttaataattcctcatagtcaatatccctcacatccactccgccgatcaggaccgcgccgtctgttacgtcgtagaaccgggaaataagctgcacaagggtggtctttcccgcaccggattcccccacaaacgccatacgttccccatgggcgatatggatgctgcagttttgcagcaccggattcccgtccgcataggcaaaggatacttctcgcacttcaatatcctgcttctccgggaacgccctgcctcctccgaacaccggcgtatccaggatctccttcacctgccccactccgtttagcacataggagaaattcgacgccagctcctgaagcggacggatgtcagtcaggtactgggttcctacaaatgcgaacaaaaggaatacgcccgcggtcacttggccatgcacatacatccatccgccgagaggcacaaggaacaggatgccgcattccaaaagcaccacatacgcggcatacagtggtcccgttgcccgggagatctctccccacatccggtgctgttcctccacagcctgggaatatttccggaacgaccgggatcccatctgaaacgccttgatcagccgcatgccattcacatattcatggatggaggaggaaagattcccactggctgtgtttacctgcggcatgaatttagaaaaccgcgtaaacatcacgatcatcacgatcacgacaatgacaagggggatcatgctgaccaatgccagcggcacgttcacagacagcagatacaggaacataaccaccgggccggacaggtacagcaccagttccggcagattgtgcgccagaaacagctccagcttctcgatgctctcattcatcacatatttgatctccccggtgttcctttcattcaatgctcccagaggcatctttgccatatgctccgtcaccatgcaccgcaccttgaacagcgtgttgtaagcgccccggtgggaagacagcgtcgctgccagcgcgaaaagacatctaagcgccattgatacaagcaggatcgctgcccacttcagggcataggacaggtcacagcctgcgcccgcaaccgcgtcgatgatcttgtaaaaggcaaagtaggggatgaccgaccccagacttgccagcagggagagccccacagaagcatagatataccacctgtcgcgtcccgcccattccatcagcagggaaaatccctttttctcagatttcaaaatatcttctcctttctgctataaaagtgttacagtgtgaatcctaaccaagagttcagttgtgttagcctcaacttactaaaaggattgtaaatcgtaatctgccctgttacaatagacacagagaagatacgtctgatacgcatgaaaaaacgtccgatacgcacagcggatcatttcagaaacaaaaatgggggatatttatgaaggctgctgatgattacagaaaattatttgaagaaatgcactttacgccctgcccggctccggatggatttccgaggatgggggaatgctggcgcttaaactctgcaggcggcgggggctattactggctctatgacgcaggcgggcgctatatcataaagatccatgatttctggttccgggaggataccatattagatatgcgtttccccgaagcgctgagtgttacatggtatgaatccatttccggtgaggaaatgatgccctaccggagcctgaactcccatgtggtcaaaagcttcctcggcggatacgagccgttccgcgcactgatccaccgcaacgtccccatccgctccatcggcatcgagtaccgcccttcctactatgatgcctatctgcgggaaaccttcgggccatcctatcagaatgccgcggaggcattccgcagtattgatgagacacgggatttcccgcagatggcggagcttctgaaacagctctggcactatcaggggcaggggcttcccgccaccttgtactacgatgccaaggcggcgtaagtcctctcccttgtatttgagcggcacaggaaccttaacaaaaagaaggcggcgccgctgccggaaacagaccgggcagtccttgacagccttgctgcctatatcggggatcactatgcggacgaccttaccattgaaaagctctcccgcatcgcctgcatggggaccaccaagctgaagcggtgctttaagatttattttgagtgcacggtcaccgaatatatccagcaagtgcgtattgatcaggcagagcacctgcttgcctatacagacctccctgtaaaagatgtggcagaagctgtgggatactctgccgccgggcgttttgccgagctgttctgccggataaaaggaacgcttcccgccgaataccgaaggattgcgaaaagccggacagcggtttgagattgctcttcaaaccgctgtctcctcaatttacagcgaccagcccactgcctcgctcctctgttgccagaaccttcggtaaattccctcttcacccagaagttccccatgttttcccttctgcacgatcttgccctgatcgatgaccacgatctggtctgcttcccgcacggtagtgagccggtgggcgatagtgatcaatgtcttgccctctgtcagctcccggatcgcgcccatgagcgcctgctcgttctctgggtccacgctgctggtggcctcatcgaggatgatgaccggcgcgtcctttaagatcgcccgcgcgatggagatgcgctgcttttccccgccggacagggtggaaccgccctctccgatgaccgtgtcatagccgtcggggaattccatgataaactcatggcatctggcgcgcttcgccgccttgatgatctgctcccgcgtggcggcggggttgccgaagcggatgttattctcgatggtatcatggaagagatagacattctggaataccatggagatatttctgagcaggctgtcggccgtgtagccctttacatcctgccctccgatgagcacctgcccttcctgcacatcccagaaacgggcgatcaggttgcacagtgtcgtcttgcccgagccggagggcccgaccacggcgcatgtcgtgccctgtgggatggtgacagacacatgctcgatgaccttccgcgccccgtcataggaaaaggaaatgtcccgcagctcaatgtcaaatctctctgcctccagttctctgtcagaccggtccatgccggggatattggtgactgcctccagacggtccagctctgtggtgattttcttggataagaaagcgccgtcccccattgtctccatctctgaataaatgataaatgcagccacaaggaacataaagcagtaggacagggagatcgtcccctgtaaatagagcgccgccgcaaggaacaaaagcccgcagccggtcagcttatacaccagggtatacagtctcagcagaggcagggacgccttttcctgatccagtgccgcctgctgtctctcccggaacgcttcgtacaccgcgccgtccctgccctcattgcggcagaaggcacgcatgaccgcgattccccggatatattccagagactgggtgaccagatgctcctgggcttcctgcactttcacggtgtgggtcgcggcggcatggatcaggcnnnnnnnnnnggttcatgaccagaagccctgccagaagccccacaagggacagcagcgacatcaacgggctgtaaaacgccatgcacacgatgatgatcaccgccatggagatgccccctgtcatgtctgtgataaagagcatggaatactgctccagttccacgaccgtggaggtcagcgttgtctggatcgtgccaaggcgctgctcggaaaaatagcccatgggcgcgctcttcatcttctccccgatagcaagccggtagtcgcggaacatatcgaagcctttggcgctcatggagatatcgccgagccactggaagaggaaacgccccgcgatgctcccgatcaggatatacagtgcctgcaggatcacgcccctgctcaggtgctccagattctccaccaccacgaacactgccagaagcatgactgccatggacatggatttcaggaaattgcataaaatacccagatagatgcggggcttttccttccccgcgatcgccaggatccgccgtatggtctttatcatctcacttcgcctccttttcgtccgccctgtcagcggcgctgatgtgctgttcccacatggtcttataaagcgggcaccgtttcagaagttcctcctgcgtcccggcgtcaataagcctcccgtggtcgattaccaggatctggtcggcgtttcgtatggtggagaggcggtgggcgacaacgatcagcgtcttcccttttaccagacgccccagcgcctgctggatctgcgcctcactctccgggtccgcgtacgccgttgcctcgtccaggatgacgaccgacgccggctttagcatggcgcgtgcgatcgtgatgcgctggcgctcccctccggagagccggtcgcccgcgtcccccgccaatgtgtcgtacccttccggcagagacgagataaagccgtggcagttggctgcttttgccgcttcctccacctcccggtcggacgccttcggattgcccatgcggatattctcacggatagacatgtcaaacaggaaattatcctgtgccacatagctgatctcgctcatcagctggtcaaaaggaatcttacggatagggacgccgccgaaagaaacacatccgctggtggcatcccagaaccctgccatcagcttggcgatggtagattttccggaaccagacgggcccacgatagccgtcattttccccggcccggcagtaaaggtcacatcatggaggacttcggatttcccgtcataggtaaatcccacgtggtcgaattcaaaggcgcgatctctcagttctgccggctctgccggcctctcctgctccggcgtggctaaaaattcctcgatcgggcttaaattcgctgccatgtaagtaagctgctccagcccaaatccgaacttgatcagccctgcgatgaaaccgatggggatgatgatgcaggcgaggaagataggaagctcgatgctgtccttcatatacagccatgccccgatgggcagcgtccccagcagggtggacggcagcactgccttgaatcctgccatccagaaccagctctgtctccaccagtccaacgtgctgtcatggaagaagttcacagattcggcgaaatgtccgaagctcttgtttccctgtccaaatgccttgatgacctggatgccgcccacatactccacaagcgccgcgttcatctcatttccggcgcgcaggtacgtctccatcttctcgctgtagccccgcatcatccccaccatgaagacgaggctcagcggcactgtgacaaaggacgcaagccccatgcgccagtccatgacgaagacaagcgcgatggcaaggaggggcgccgacagattggaggggaactccggcaccatgtgcgcgatgatgtcctccagcctccctacattgtccaccataagcgtcttaaaagtccccgacggcgtctccagcatcacgcccatgggtacccgcgccatcttatccgcgatggcgcagcggatatttttcaggatcgtaaatgagatcccatggctgcgcatggacgacagcccggtcagaagcgcccgcaggcacatgcacaccgccgcggtacccgcgatcagggctgctttttgtacggtcgctgtcccctcatacagctgcttcgccagcagcgccaccgcaaaatagggcgccatgccgacgatctccccgataacggcgaggatcaccgacagggtcatcctcccctttgcctcacccgcaaaagaaaacaatgtcttcagcggattcgatttcttttccttcatacaaaacctcctcatgccttgctcagtgaaatcaggatgccaatctgttctcttatcttacagaaacctttttgaggatcacgctttagattagttttaactaacttttctatgtaaaaaatgggactgcttacagtcccagaatatttctccagcccggaacaaagaactggtgcagggtatccagatagtggatcgcctcttcttttgtaaaatcgtggatcaccacctcaaagagcgcgttcgtataggcggtcatcaaaaggtgaagttccttcgcatcgatctccttgaccggcacgccccgcttcttcgccgcttccagatacgcaagcgtttctttctgctccagcatcaccatatcgtgcaggaaccaggcgtatttcgtgcctgccgagcagcacaaaagcagcttgaactcctcgaagtgctcatagactaagtctaccatcagccgcagttcattgcctgccgcccacatgccgtccagattctcctgatccagatagtcatagtcaatctgctttgtcgcggaataccattgctccagctcctccagtaccggatctaccagtgcgcagaacatggcttccttgtctgcgaaatgccggtagagccctgccgccgtgagccctgcctcgctggcaatgtcccgcatgctcgctttctcaaatcccttctccagaaaaatcttccgggcaacgggaaggatccgttcatgagtttctgtcttgccttttgacatcttactgtctccttatgtaaacgatgttagctaacactgtttacagtatagcatgagatgaaaaaggtgtcaatggcctgaaaaaagcagtcggccgctacactttcaatcatgtagcttcagctcaactgctttataaatggcataaagttatctcctatttatacccttttccctgtttaaataccggcggccaagccttcatgaccggcgctcccggtttcaaattaaagtcgcagtaatccccatcctccgcgcaggtgtgttcccggtagagtgggacgcccaacgcgccgaacatcgcataatccagattacacagatacggcatataggcgtcatatccgtgtttcttcgcgaaatcagccagcgggcataccagattgtgatagctgaacacatatcccacctctggcgggtctaaggtctttgtctcaaaactccccggatactttctggcattttccgcgttcgtcttatccttctttttatacattatccgcagaagtctgccgtttgagaacactttgcccgcgatctttctggcaatccccggcatggaacggaatttctgttcatagcagatgaccatcaggcgtcctgcctcctccagcgataccccgtatcttttcaggacttcccccattgcaacaaacatatatgccccagtcaggtttcctgtaccgctgactttgtcccctccgatatagggaaaatgctccagaagctccttttcgtagcaatcccagatttcctgcagaagctggccataggatttgcccgcagctttttctaactctttatcgattagtttcaggtaaccgtccatggtcttcttcagctttgggatggattttctgtaatattcatgcattgcataccactccttacttcctgaggatatcaatatcctgcatgccggagcacaaaagctccgtgcgcttctcgcagtctgcaaagcccgccctttttgccgcctctgccacctcgtcttttctgaccgccatgtccatgccctggaaataatagggcagataccccatcatcatatcccatggaccggtgagatccttttcaatcccttcgctgatcgccagaagaacgccgccggggttcagggcatcatagcactttttcaggaacgggtcataattccctcttgcaaagagcatgaccgcgctggcaatgatcaggtcataaccggttccgatgccatctgccaggaaatctccgctgatgatctgcacacgatccagaagccccgcgctttctacggattcccggatcacctgctccggcatccggtccatcagcgtgccggtgcgctccggttggtcggcgatgaccgccaatcccagaagccctgtgccgcagcccagatcaaggatattcccgatcttttcattttccggcagtgtgcgcacgatgcgcaggacctcctcctgccggtaccctgtctgcgcctgccgcatcatcgctcccatagccgcgaaatccaaactctgctcatttgcctgctgctgcatgggctgggggccctctgtcaccagcttcaccacatccatggggatcatgccctcgctcatcacataatactggatgaatccgcccagatattccggttttccctggacgagataccgctcggcctcctcactgttctgataggtatccccctccttgactacgaacccgatggaggtcaggccgtccagaagatatccggtattcgcctcgttccagcccatttcctccgccagttctttcgccgttgtcttttcactcagatgggaataaatatccaactgaagggatcctgtcactaccttcgtgtaaagcggcagaaatgctacctgcgtcaattgctcccaaacacttttcctgtccatgataattctcctttcaacctttaaattagtttcaactaacccatgtttatataataaggcagccgatatcccgcgctgcctgtattataactgattaaccctggacggcggctctttgccctccatcaatgccagtatccctttctcaaatacttttgccacttccgtcatgcaccgtatgatcttatcccggtctgtctcttccaggatcagcttcgcgagcatggagaaataaccgctcatcagcagccgcaccgtatccttcgacaatggctgtatctgtgcatttgctgcctgtgcgctgctctggatattttcgctgttgcattcctgcaggctctcccagaaatgttcatattttgtgccttgggagccggtaaggatcaggcggatctctttcggattcgccagaaggaagtccacgatctccggaatccgacggatatagaccccgcacatttcaaacaggcgtctgtccggcggcagggctctcatctcctgcctgacaccatccagcagtgcggtaaattgtgatactgtctcatccgtgagggcatagaacagctcctctttattggcaaagtacccgtagaaagccccggtcgtcacacctgcctctgccacaatcttacggagcggtgcccctttaaaaccatgttttaaaaaactgtccatcccgtactgcaggatccgctcccttgtattttgaagttccatgctttctccttataactaagttatataacttagttacattttacacagaggtctcctttttgtcaacaggataaaaaaggacgtctgctaagcgggttcaattgctatgctcactgttccacgctcttgttatcatatttttggtaacgataatgccctgcaattcccgcagcaaaggtcagcactgctgccagaaaagtcatgacaatcttaaaatcacctgtgcctttggcaaaatcagcataaaaatctatcgaccaaagtaccatagcaacaaaccacaacagataccatctttttttcttcttcatcgcaatcacctccatatatccccggtcacttactgtgatcatagtggcagtcgcagtagggaccgccagaagccagggtaaactttcttgtaaatttcgtattgttcatttccgccatatcataatcaaaggcgcacatggcgggaatgtacttggaaagtcccagctgattcatcatcgtacagatgccgcaagtatagaaagtagcggtgtattgattgatcgtttcgccgtcctccaccgtaaatttccagtcataaggattggtaatactttggcttttttcggcaaaggcctttaaccttgcccgtcctttttccgtgtaatttctttcactgacaaccgtctttcgcatgatcttattatccatcgctgttttgtaatagatacggacggtttccgtatcataactcttctcggcggaaagcagcacagcacacagcattgcacagcttaggatattggtaaggaaacggctccccttgtcaaactcgtctacgccgcttaagatttccctgtattttttctttgcacgcttcatcacgctgtccgcgtccttttcgtcgaacactgtccgaaccgcctccttaaaggagccgcgaaacatcagccacattgcgcgctgtatcaacccgtaccgcatcattttctccttttctttattcgtcagccaatcagataaatgcagttatcactcccaccgcaaggcaggcgggcagaccgagaagcataccaatacaggactgcctgatatgaaaacggtagtccttatattcttccatagcttccgtacccggtatcctgacctttttggaatggcagaaccagatacagtcaaggatgagcgcgtcataccagtcaatgatcagccagatcagataagaatcccagaaccctttccagaacgtatccgctccattcagccatttcaagatgaaagcaaagatgaatacaaaaacaacaagggcaatgcctttcctgaggatgtccacccttgtgaagcgctgctgtctgtcctcaatcagccccagttcgatacacttattccggatagccggaggataatcgcccactgaggcaagaggatttttcagtgtcagcgacacaatcaaaaccgtgaatagtacaatccctatcaggctttccaccataactgccatgtccttcacacctcctgaccaatctgagaaagcaagtattcatagacaatggatttgtgatcagatccatccccaaaaggcttttccgccgcctttttaaagccgcgtttctcataaaactcccaggacacaagcgtatttgtaaaaagccggacacaatcagcgccatcgttttttgcccgcttcatgaattgctcgactaatgcggtccccaagccttttcggtaatcctttctggatgatagggcgacaagctccagatcgcatttcccaaaggtttccttatccctttcctgtgactgacggacaaaagcatcaaactgtttccggaatggcgctgacagtttatatcttttcagatagaacttgaggaactttttacaccaaaaccaatagtgcctttttgtttcgtgctgagctgccagtgtcttgctgaaattcttattatattctccacagataaatcctacgacctgatgatcctctgtttccgcaacataggtaaaattacatttttcaaccagaatttgcgcgtaatcacgcagcagcatcctgtcgttctgatccacaggacatgtgaaaaatccctcgtagaaacaatccccgcaggctgcggcatcttcttccttatatggacggacaataaacatggcgtatcctccaatctgctttatttggttaactatataattatatcgtgtctatcctgctttcctgcaatggaatacgccttctgacctaaccgctttcactgacaccttttcatacagctttctaagccgttgttccaaggagtctctcgtatcaaaaggcggtgtgaaataccccatttttacataaagcccttgcacgaaccagtccgtccgtttcccttctccgctgatgtaaaaagctccgcagaacagtccgcccggcttcaagaccctaaatgtttccgaaaatgccgcacccttatctggaaaagcatggaagccattcaatgataaaacaatatcaaaactttcatcagcaaagggcagttttcctacatctccctgcctgaaacagatattattaagattcatctgttttgcccgattctccgcccgtttcatcatatcttccgaataatccagacaggtaatctgcgctttcggcaaagtctgatagaggggcatcgttaaaatccccgtacctacaggcacctccagcagactgcccgaaaaattctccggaatctttgacagcgccaatgcaagataatggtcgttgatcttctggtccatatcccacaccaatttgcacactgcctttccggggatcgtagagcaggtaatcatcccatcgtagaaatccccctcttttccgagcttgtgataagctgttctaatttgttttgctctttttatctcctccatataagataaccctcctcgactaaccgttcctttttcccctattctttaagcaaagaaagcacttgtttccggcatcatgagtaaacagacgctttaaaaatcatgttcagtttggtgttttgtaaatgagagactttaggaagtttcagggtttccaacagtatccatgtgcctgcggagcagccatacatcacatcgatttttccatcaaaatgctccttgatataggctgccgcacagtttccctcatgctcgtaggagttttcaaggacggcataaggaactacggcatctttttcttccccattgaaggcgtcataagcaacgatgatcagatgaaaatgcttacccgctgtctcaacaaagggcatcgcagccggattccaatagacgcctccacctggaaatatcataagtgttttatcgttcccaattccaaattcagtgtacttcatgttgattcaatcaccccggaaagtttcattagatttctttgccagaacacacagccaatgcttcttttcatcggaaaagcttttcgtttctgaaaaacccacggatttcagcgcggcgcagatttgttccttatcatagattttcatcccgctgattttctccgtccatttttcatcggcagtattcattccgtcactctcattgcatatcataaagataccgccgctcttcaaaatacgatatacttccccaaagcatgcctccaaacccggccagaaataaatcgtctcaaaggcggatatacaatcaaatgtgctgtctgcaaacggcatatccgccacattgccctgaacaatttcacagcggtgctgcttgatcgcggcgctgtttcgctttttggattcttccacactgacttttgaatagtcgattcctgttatatgaccgtttttacatttctccagccaaagcgcgatattagctccgccgccgcagcctgcgtccaatatttttgcatcttcctttacggaaattttggaaaatccccagtgtgccagtttgctgtgcccactgttcatcatttttaccatgatttttccgctgaagcctttcggcctgcgcgtattttcaaaaaatcccattgtattacgctccttctatcaatctgccccactgaaataccgcaagacgattattgatcttggcagtgaggactcccacaatcctgctcaccagtgtggatttcttcatctgctccgaaaaactgtgttcgctgacaaggcgcagctttggctccagtgcctcaaattctttccccgattttgttccccagccgaattttgcacctgtatgctttaccgtatcatgctttttctcgtccatcatggaagggcgcatcatttccacaagcagatacccactgccaaattcagaaaccagattgcgaagtattgtgtgctgctcctccttactgaaatacataaataagccttccgcaataaacacaaccgttttttctccggcaacatttttcacggtgggaatccagcccgtttccgtcacacttcctgccagcatcctgcggcggtctatttcttcatatacctttttcctcacagcaatgctgtccggcaaatccacatcaaaccatctgatttttccgttgtcaacccgctcaaaacggttgtccaagccgcagcccatatttacgcataccgcgtccgggtattctttaacaagccgctttactatctcgtcaaacataatcgtccgcgcaatcacgcactcgtgagtaaccagcttatcataattctttgtgtccacgccaagggtctcaatgatttctaccgccttttggtcccgcactctcggatttttccgctttgtttcgcttgcgcggttcgacagcggaatcagagcggtggtctccacatctcctaatttcagtttcattgtctgtttcctttttattttctctttatccatggaatgcagcggttcccccttttgcagtattcctcatgcagactgtatttttctaccatgacatatcatcgcccaaaccatcataatcccaaaccagacaatcatgctttcactcataagcccgtttgtaaatccgagccggaaggcacagtcaggcataaaagattttaccaggtataaaatcccgtatatgaccagaacattcgtaaacgccatacctttaggaaacattgtcctgccagatatctgaagataaaaccaataaagaaaaggtggcagcatgatgatttcgctaagtatcacaagccatgataagtgggaaaataatgcctccgacgcagggattgccgcatcctcatatccgtttctgttcagccatgcaaaaacatataagatcataatataaaacaaatgcaggcacagccatggagtaagtccatatgtagtaagcgtccggtaaattttcctgtgtttttcttcttttataaaactgcacactgaaaacagccctatgccgtaaaacacgattcctggaaaagcaagaaacattgccagcgaatttctccatggtgcaatcccggctactccctcagtaagccagtaaagtgcgcctctgtgggcagtatccccgtacagcatcagccaatcgcctgcgccaaaacagacacagcccatcattccgaatatcaatgggataattcttttcattttattgtccatcttccctcatctcacaattgctttatttttaacctctttttattatagttagcatcagctaacctgtcaattccaaaacgaggtctgttaattgcgctgcttgtaaatttgatatccgctatccatgccagcagccgatgagtaggcttcaccgctgggtcatccagtctctgataccccagcatatatccccggcagtgatctgaaaccggtctgaccacaatcctagttctgccttagcatcacgctcagaaaaaacatctatctccatgaggcgcgtcatgcctttcttggtcttgcatggagaatatatttgagaatgaatctcattaaacaccttgaatctttccccgaggtttggtaaaatatatttggttagttatttctaaccgcatgtgaataaatcatggaaactccttttgcctcttatgcctgaacaggggtaaaaggggatccgtgggaaaggatgaaatggatgatggattatttagagattgaaaaggttctcggacgggaaatcattgactcaagaggcaacccgacggtggaggcagaagtttacctcgcggacgggacagtcggaagaggcgcagctcccagcggcgcatctaccggggaatttgaagcgttggagttaagagacggggatgaagacagattcgggggcaagggggtttccaaagctgtagaaaatatcaacaccgtgatcaacagtacgcttcagggaatggacgcaagcaatatttacgcggtagatcaggcgatgataaaagcagacggcacaaaagataaatccagcctcggcgccaatgccattctcgcagtatcgattgcctgcgcaaaggctgctgctgcttcccttgatatcccgttataccgttttctgggcggagtgaacggcaaccgcctgcctgtgccgatgatgaatatattaaacggcggagcgcatgcggcgaatacggtagatgttcaggaattcatgatcatgccggcaggcgcaaaaagtttcaaagaaggcttaagatggtgtacggaagtgttccatgcattagcggctcttctgaaatcaaagggacttgccacatccgttggtgatgagggcggcttcgcaccggaccttggaagcgatgaggaggccatcgaatacattctggaagcagtaaagaaagcgggttatgaaccgggcaaagactttgtgcttgccatggatgccgcttccagtgaatggaagagcggcacaaaaggagaatatctgctcccgaaatgcggaaagaaatttacctccgccgaattggtggcacactggaaagccctgtgcgagaaatatccgatctactccattgaggacggccttgatgaagaagactgggagggctggcagatgatgacaaaagaactcggcaataaagtccagcttgtgggagacgacctgttcgtcacaaatacagagcgtcttcagaagggcatctctatgggatgcgggaattccatcctgatcaagctgaaccagatcggatccgtgtccgagacactggaggcgatcaagatggcacataaagcgggatatacagcggtgacttcccaccggtctggggagacagaggatacgaccatcgcagatctggcagtggcgctcaatacctgccagatcaagacaggcgcgccgagccgcagtgaacgtgtggcgaagtacaaccagctcctgaggatcgaggaggaactgggggaggcagccgtttatccgggattcggggcatttaacatcagtgagtagttccggcccgccagatactggcggaaaagaacaaaaagttccagccatttatagattccacaaagaaagcaggcatcggcagaatttctccctttgcctgctttccttttttaagaacatccacggtctccggcgctcattcctgtgactgctataattcttaaagcagctccaacacttcttctatcccctttttcccaaaatacacctgctccccatctatgaccatgcaggggacgctcatgatctggtagcgttcttttaactccgggaaatgtgccatatcataaatatccgctgtgacaccggctgattccagcgcggtgcgctgtaccgccatgaccagctccgggcacatggtacacgacagggaaaccaccacccggattcggtgttccgctctcagggaacggatcttctccagtgtttccggtgcgatgggctgtcccggtccggccgcgttgtagagggcgattacaaaggaattgaattcatgcccgcccggcacaccgtggaaggaggttcccagatagttcccatccccgtcgcagatgcggatcgccggatattcgatccccactttttcgtccccatctgcctttttagcaaaacggcaccggatcttcggggagagtgtctccatctccctgccgaagccctctacttctcttgagatggcgctgtcgtcggtacagaactccagagtgatgtccttttccagacgttccagcaccggggcgagctgccgtttcacctcgccgcttaagaagccttcagtatcatctccgtctttgtctttgctggattcttcttccagcgcgccttccctcctgctgactttttgtttttcaagacccagcttttcatacatggaggaaatatgcttctccatagacgtcgctgcaaccgcgccgtcggagaccgccgtgacgacctggcggagatttttcacacagatatcccccgcgccgtatacgccgtccacgctggtcttctgattgatatccgtgacaagatagccgttctctgtcatctccactttatctttaaagagcgcgtttgcaggtgcatagcctgcgaagacaaaaataccgaagccttttcccgcttccggctcataccgccacgtctttcccttttcctcaaataccgcgtactccagcttcccgtttccgccggcctccctgatctccgtttcaaaatgcacttcaatatcgggatgggcaagcacctcctctgcaacggaatccgcgcagctgaaacttttcccacggaccataaggtggatttttctggcgtattttgtgaggaagatggattcctccgccgcggcgaaaccgccaccgatcacaaacacatccattcctgtaaagaactcgccgtcgcaggtcgcgcagtaagccactcccctgccccggaactccatttctcccctaaaaccgatcttcctcgggctggcgccggtggcaaggatgatgccaagcccctgaaaggtccctttatccgtgacaacggacttcatatcagcgtccagatccagttctttcacctcagccatctgaaactccgccccgaaatactccgcctgcctgcgcatattctcagtcaggtgtgtgccgtccgtcttaagtacgcccggataattgacgacctctgaagtgatggtgatctgaccgcctattttttccttttcgatcacaagcacgcggtattttgccctcgccagatagatagcggcggtcagccccgcagggccgccgccgatcacaatcccgtcgtagaactcttccgcgcgctgatctacatatcgttctcccttgcgctgttcttccatacgtgatcctcccat

SEQ ID NO: 503 - DNA, 13948 bp, unidentified
  source 1..13948: mol_type = unassigned DNA
  misc_difference 561: note = a, c, g, or t
  misc_difference 562: note = a, c, g, or t
  misc_difference 563: note = a, c, g, or t
  misc_difference 564: note = a, c, g, or t
  misc_difference 565: note = a, c, g, or t
  misc_difference 566: note = a, c, g, or t
  misc_difference 567: note = a, c, g, or t
  misc_difference 568: note = a, c, g, or t
  misc_difference 569: note = a, c, g, or t
  misc_difference 570: note = a, c, g, or t
  misc_difference 3154: note = a, c, g, or t
  misc_difference 3155: note = a, c, g, or t
  misc_difference 3156: note = a, c, g, or t
  misc_difference 3157: note = a, c, g, or t
  misc_difference 3158: note = a, c, g, or t
  misc_difference 3159: note = a, c, g, or t
  misc_difference 3160: note = a, c, g, or t
  misc_difference 3161: note = a, c, g, or t
  misc_difference 3162: note = a, c, g, or t
  misc_difference 3163: note = a, c, g, or t
  misc_difference 3164: note = a, c, g, or t
  misc_difference 3165: note = a, c, g, or t
  misc_difference 3166: note = a, c, g, or t
  misc_difference 3167: note = a, c, g, or t
  misc_difference 3168: note = a, c, g, or t
  misc_difference 3169: note = a, c, g, or t
  misc_difference 3170: note = a, c, g, or t
  misc_difference 3171: note = a, c, g, or t
  misc_difference 3172: note = a, c, g, or t
  misc_difference 3173: note = a, c, g, or t
  misc_difference 3174: note = a, c, g, or t
  misc_difference 3175: note = a, c, g, or t
  misc_difference 3176: note = a, c, g, or t
  misc_difference 3177: note = a, c, g, or t
  misc_difference 3178: note = a, c, g, or t
  misc_difference 3179: note = a, c, g, or t
  misc_difference 3180: note = a, c, g, or t
  misc_difference 3181: note = a, c, g, or t
  misc_difference 3182: note = a, c, g, or t
  misc_difference 3183: note = a, c, g, or t
  misc_difference 3184: note = a, c, g, or t
  misc_difference 3185: note = a, c, g, or t
  misc_difference 3186: note = a, c, g, or t
  misc_difference 3187: note = a, c, g, or t
  misc_difference 3188: note = a, c, g, or t
  misc_difference 3189: note = a, c, g, or t
  misc_difference 3190: note = a, c, g, or t
  misc_difference 3191: note = a, c, g, or t
  misc_difference 3192: note = a, c, g, or t
  misc_difference 3193: note = a, c, g, or t
  misc_difference 3194: note = a, c, g, or t
  misc_difference 3195: note = a, c, g, or t
  misc_difference 3196: note = a, c, g, or t
  misc_difference 3197: note = a, c, g, or t
  misc_difference 3198: note = a, c, g, or t
  misc_difference 3199: note = a, c, g, or t
  misc_difference 3200: note = a, c, g, or t
  misc_difference 3201: note = a, c, g, or t
  misc_difference 3202: note = a, c, g, or t
  misc_difference 3203: note = a, c, g, or t
  misc_difference 3204: note = a, c, g, or t
  misc_difference 3205: note = a, c, g, or t
  misc_difference 3206: note = a, c, g, or t
  misc_difference 3207: note = a, c, g, or t
  misc_difference 3208: note = a, c, g, or t
  misc_difference 3209: note = a, c, g, or t
  misc_difference 3210: note = a, c, g, or t
  misc_difference 3211: note = a, c, g, or t
  misc_difference 3212: note = a, c, g, or t
  misc_difference 3213: note = a, c, g, or t
  misc_difference 3214: note = a, c, g, or t
  misc_difference 3215: note = a, c, g, or t
  misc_difference 3216: note = a, c, g, or t
  misc_difference 3217: note = a, c, g, or t
  misc_difference 3218: note = a, c, g, or t
  misc_difference 3219: note = a, c, g, or t
  misc_difference 3220: note = a, c, g, or t
  misc_difference 3221: note = a, c, g, or t
  misc_difference 3222: note = a, c, g, or t
  misc_difference 3223: note = a, c, g, or t
  misc_difference 3224: note = a, c, g, or t
  misc_difference 3225: note = a, c, g, or t
  misc_difference 3226: note = a, c, g, or t
  misc_difference 3227: note = a, c, g, or t
  misc_difference 3228: note = a, c, g, or t
  misc_difference 3229: note = a, c, g, or t
  misc_difference 3230: note = a, c, g, or t
  misc_difference 3231: note = a, c, g, or t
  misc_difference 3232: note = a, c, g, or t
  misc_difference 3233: note = a, c, g, or t
  misc_difference 3234: note = a, c, g, or t
  misc_difference 3235: note = a, c, g, or t
  misc_difference 3236: note = a, c, g, or t
  misc_difference 3237: note = a, c, g, or t
  misc_difference 3238: note = a, c, g, or t
  misc_difference 3239: note = a, c, g, or t
  misc_difference 3240: note = a, c, g, or t
  misc_difference 3241: note = a, c, g, or t
  misc_difference 3242: note = a, c, g, or t
  misc_difference 3243: note = a, c, g, or t
  misc_difference 3244: note = a, c, g, or t
  misc_difference 3245: note = a, c, g, or t
  misc_difference 3246: note = a, c, g, or t
  misc_difference 3247: note = a, c, g, or t
  misc_difference 3248: note = a, c, g, or t
  misc_difference 3249: note = a, c, g, or t
  misc_difference 3250: note = a, c, g, or t
  misc_difference 3251: note = a, c, g, or t
  misc_difference 3252: note = a, c, g, or t
  misc_difference 3253: note = a, c, g, or t
atgaagaaaaggacaaaaaatgaaattaagcggtgtcttacgggtattgtgacagcatcgcttataatctcaagtgtgcatattggcacatttgcacttgcggcaaaaaaaacaagtattgcaaaaagtgcaaaagttacggtgggaaagaccgtaagggtaaaacttaaaaacaacaaaaagagtgttaaatggaaagtttcaaaaggaaaaaaatatgtaaagataactaaaaagagtaagacaggctgcaccgtaaaaggtttaaaaaagggttcggcaaaggtacaggcagttatcggaaagaaaaagtacagttgtaaaataaccgttgcggcaaagaaaacgacaaagaagccggcaacaacgaaaaaaccggtaacaacaaagaagcctgttgcaacggcaaaacctacggcgacaacaaagccgacagcttcctcagatgttacggtaaaaccgtccgtgactgaaacaccaaaggtgacaaacacaccgacagctacgagtgcacctacggttacggaaacaccgacagtggcacctgtagttacggctgcnnnnnnnnnngatgatgacgattgggacgagccaaaaccgacaccaaaaccgacacgcaaaccaggtgagattgagacattctattatgatggtgataatttaaatgattttaagaattataatgaaccatacaatgttgtcgttgaggacgatataaaaaagcttagttatggagcactcgaggattgcacaaatatggtaagtgtaacaattccaaaaagtgttgaaagcattggaaatagagtgcttgccggatgcactaatctgagtaagataacggtagatgccgataatccatactatgacagcagggataactgtaatgcgatagtagaaaccgaaagtaatactattgtggcaggatgcaagaacacggtatttaaagactctatgaattctgtttcaaaagatgcattctatggagcggatattgaaaaagtgatattgccagatagtattacaagtattggagactatgctttctttggatgtaataagttgacaaaaatttcaattcccggaaatactgaaataggatatagtacattttccggctgcaagaaactaaaagatgttgaacttaaagagggaacaggttttttaggggattatacatttgaaaattgtgagagtcttgaaaaaataaatattcctaaaggaaaaaaagctattggcgatggcgtttttggaggctgttcatcattaaaagaagttacgataggtgaagatgtagaaagtataggtgaagaagcctttttggagaccggattaacggagataaatattccggacacgctcactaaaattcaaagttacgcatttcagggttgtgcaagcttgacaaaaattaatttatcgtcaagtgtcaaatttgataaatatactacagacatattttccggatgtacaagcttggaagaagttacgattccgaccggaataacttatattgcacctggtatgtttagtggatgtgagaaactaaaaaatataatgatagaagcagaggaatatactataggtggatctgctttttccggttgtgtaagtttaaaagagtttaatttccctaaaggtaaattaggagcctatatattttcgggctgcacgggattagaaaagatagatttgacaggagttaccagcattggtgagggctgtttcagttattgttcaaatcttagtgaagtaacactttcaggtgatttaaaaaccataggtaaggaagccttctttaaatgtggaaagttagctgagattactattcctgagggagtagaaagtattaatattgctgcatttgaggagtgtacacttttaaaagaaataaatatacctgcgagtgttaagcagattggaacaggtgcatttatagaagactctcttgaaaaaataacagttgatgaaaataatgaatatttttattgtggtgatggtgtaaatgcaataataactaaacaaaagattagtagcagtgaagaaatggaaagacatgacgcaaatgaacttattgcaggttgtaaaaatactgtcattcctgatagtgttaaaaagatagctgattacgcattttatggaatggatgttgaaaagataaatattccgtcaggagttacaagaataggagatatggcatttgaggaatgtacggcattaaaagaaataaacatatctgatactgtttcaaaaataggtatcagaacatttgcaggctgtgatgctttagaaaagataacggttgatgcggcaaatgaatactattacagtgatggcagtaatgcgataataacaaagcaggaaataccatttgacagtctttatgattttgctaattatggtgaggctagtcagccgtatgaacttgtatatggatgcaagacaaccgttatacctgacagtgcaaagataataggatttatggcatttactgatttaaagacacttacaaagctcaatatcccagatgatgtaaaggtaaatgatgctgctttcaatgaatgtgacaatctgacaagtattacatggaaaggaacagaatataaatccgtaaaggagttttttaaagcatacaatcccagtatgtatgatgacgatgatgatgacgatgttgagtaggattgtaaaacaagcataaataagaagtaaatcaaacaacgataaaatcggcatttacagtagttaagtgccgatttttttgtcatatttctacaaaaaaatcagagaaaataatgcatattgcataagaaaacataaaatttattattatacaattatatgtattgcaataaaacctatacaatattttttgcaaaatgcacatattaaaaaattaaattgtctgatatgattaaaccagtttagaaagtaactttaaatattgcctttttaaaataaacaaaatataatgaaaggaagaataatgtatggggaaaattgatatagcaacaaaacaatatatgtcgcacaaaaacataatagcagatgcttttaatttttatgtgtatggcggagcacagataataaaacctgagaaacttcaaaagatagatacggcagagtttatgatgccgtatggaaatgatgctaaagctgnnnnnnnnnnnnnnnnnnnnnnnnnnnnnnnnnnnnnnnnnnnnnnnnnnnnnnnnnnnnnnnnnnnnnnnnnnnnnnnnnnnnnnnnnnnnnnnnnnnntgatgtgtgcagagcatgggaaaattcaatgaaaaatgcaaaagatgagggacagcgagaaggcaggattgccgggcagattgaagcgtatatagattgtaatatgacgataccagagattgcaaagaaagtgtcgaagccggaagaatatgtaagagaagttgtaaaaaagttatcagcagtatctcaatgaacagataatatataagggtgggcgtcacagattataatatgagataaaaattgaaaataattatacattgatatttttacacaaaaggtaagttgcatatagattataaaatgaataaaaactgaaagtaatagtacttaattttaataaaattcccgacagcacgaatataaaaagttcacactatcgggagtttttattttattattttgatgcagtcaagtggatatttgcaatccatactgatattttttagtagtgtttaataatagattatctcttattactctgtctccagatatgcatcttttctgcttctgagataagctgatccctgaaatcaggatgtgcaactgagataagagcctcagctctctgccaagaagaaagtcccttgaggtttacgatgccgtactcagttacaaagtaattgatgtttgcacgcgtatcagtaacgatagaaccatttgaaagagtaggtttgattcttgactgaacagtgccgtctttggttgtgaaagtagaagacatacagataaagctctttccaccgtttgagaggtaagcaccgagtacgaagtcaagctgtccgcctgcaccgcttatgtgttttgttccggcactctctgcatttatctgtccgaataaatcaatatctaccgcattgtttattgaaataaaattgtcaatagaagcgataactgacatatcgtttgtgtagtttacaggagcactcatgcactcaggattttcatttaagtagtcgtaaagtttctttgttcctgaaccgaaagcatatacctggcgacccttgtctcttgactttttaagacctgttatcttgccggcttttgcaatgtcaacaaatgcatcaacatacatttcagtatgtacaccgaggtctttaaggtctgactgtgcaataagtgaacctacggcatttggcataccaccgataccaagctgcaggcaggcaccgtcaggaatttcatctacgatatattttgcaacagcttcatcaacttcagttgtaggagccggagcacctgtctcaagaattgcaggattgtcaccctcgactatcatgtcaacattgctgatgtggatgccgttttcaaatccgccgagacagcgaggcatatttttattaacttcaacgataattatatctgcaacttcacagcaggcagccatatgtgatgcgtttggtccgaagttaaaatatccgtgtgcatccataggagcagcctggaacattgctacacgaggaggggtctgactgtttctgtaatatcccggaagttcagaatatttgataggagagtagaaacaaaagccttttgctactgcttttctctcgatgccgctgctatgccaagagttccatgtaaaatgagaagctgcatcttcaagtttgaagatttcaggctctttcataagaataccgccgcggatgttgatgtctgaaagttcaggcatacgctttgcaagtgccttgtcgagtgcatcaacagtgccggtgcaccatccataatcgatccagtcgccggatcttataactttgactgcttcatcagcagtagtaagtttctgcttgtaaatttcattaaaatccataatcttcctcttttctgtgccacaagattgtagttgtcctaattgcatcattaacatatgaaatgattgttatctgccattatagaaagtataggcagtaacagtagtccgcatcgtgacactgatgcgggcattatattatgcaggaatagaaataagatttgttccttacacaaattacagtataaattaaattgagaaaaattatactgtaatgtctaaaattttgccaacaatagaataacactaataaaaaaaattatcaacaaatgaattgagggacaggcagccagaattgtaagaaaatgtaattaggctgtagtataaagtgtaacagttcggtcattcattccttagtttcataaccctgccagcaagctgtcagtcgctgctacgcagcttatgtttatttcatttggaaaatgaaaggctattcagctataaaaaataaattaaaaataaagtaccttgaaaaaacttgcttaatttgtcgttttgttatatgattatcaatgatagaaccgattgtatgtgagagttacataatatgaaaattgagtgcatacttgattttctgctgtataggatatatgtgatagtaggtcggtttctaaataaagctgatattgcatcagtgaaaaacggacaaggaggaacttatttttatggcaaagaaagtagttttagcaggcgcttgtcgtactgcaatcggaaaaatgggtggaggattaagtactactccggcacctgtattaggttcaatcgttattaaggaagctcttaagagagcaaatgtacctgcagatcaggtagatcatgtatatatgggatgtgttatccaggcaggtttaggtcagaatgttgcacgtcaggcttcaatcaaagcaggacttcctgttgagacaccggctgttacagtaaatgtagtttgtggttcaggtcttaactgtgtaaatatggcagctcagatgattcaggcaggagatgctgacatcgttgttgcaggtggtatggaaaatatgtctatggcaccttatgctatgatgcagggtcgtttcggataccgcatgaacaacggaaaacttgttgatacaatggtaaacgatgccctttgggatgcattcaatcagtatcatatgatgattacggcagagaatgttgcagatcagtggggacttactcgtgaagaactcgatgagtttgcagcaaacagccagcagaaatgtgaaaaggctatcgcagcaggtgcattcgatgacgagatcgttccagttgagattaagacaagaaaaggtgttacagtattcgataaagatgagggaccacgtcctggaacaactgctgagagcctttcaaaacttaaatgctgttcaggaaaagaaggcggcgtagttacagcaggtaacgcatcaggaatcaatgatggtgctgctgcaatcgttgttatgagtgaggaaaaagctaaagaactcggtgttacaccaatggctacatttgttgccggagcacttggcggagttgatccttcaatcatgggtgttggacctgttgcatctacaaagaaagttcttgcaaagactggtcttacaattgatgactttgatgtatatgaagcaaacgaagctttcgctgcacagtcagtagcagttggaaaggatcttaactttgatctttctaaacttaatccaaacggtggtgctattgcacttggacatccggttggagcttcaggatgccgtatcctcgttacacttcttcatgagatgcagaagatggatgctaagagaggtcttgcaacactttgtatcggtggtggaatgggctgctcaacagttgttgagagagactaatccattcgcctgtacgggtgtcacggatgcctaaaaagcattaaaaataaatattgccggatatcctgaattttcgggatattcggattaatatgtatcttaaaaaggagaaaatatcatggattttattttatatgaagtaaaagatgcagttgcaactattactatcaatcgtccaaaggcattaaatgctttaaacagccaggttcttgatgaacttgatgcaacacttgatgccattgaccttaatacagttagagccgttatccttacgggagcaggcgacaagtctttcgttgccggtgctgacatcggagagatgagcacacttacaaaggctgagggcgaagcattcggtaaaaaaggaaatgatgtattccgcaaacttgagacattaccaattcctgttattgcagcagtaaacggttttgcactcggtggaggatgcgagatttctatgagctgtgatattcgtatctgctcagagaatgcaatgttcggacagcctgaggctggtcttggaattacacctggatttggtggaacacagagacttgccagaacagttggtgttggtatggctaaacagcttatctacacagcaagaaacatcaaggctgacgaagcttacagaataggtcttgtaaatgcaatatatcctgctgaggagcttatcccggcagcagagaaacttgcagctacaattgcgaagaatgcacctattgcagtccgcaattgtaagaaggctatcaacgatggtcttcaggttgatatggacaaggctatcgttatcgaagaaaaactctttggtgactgctttgagacagaagaccagaaagcaggaatgggaaacttccttgcacctaaggatcagaaagttaaggttgttccatttaagaactgctaatttaaagtattaaaaagaaacatgaatatgtaagaatatgtttgcgtttctgaaaaatgatttttaaccggctgcaaagtggtagtgtcatatagcagccggaatatctgacaaacagataaatataatattatggaggttatatcatgaaagtaggcgttattggtgctggtactatgggacagggcattgctaaggcatttgctcagacagaaggttttgaagtagctctttgcgatatcaagcaggagtgggctgaaggcggaaaagaaaaaatcgctaaaggctatgacagacttgttcagaaaggaaagaagactcaggaagaagttgatgctatcctttcaagaatcacaccgggcttaaaagagaacctttgttcagactgtgatcttatcgtagaagctgcatttgaagatatgcaggttaaaaagactacatttgctgagttagataagattgctaaaccagagtgcatttttgcatcaaacacatcaagcctttctatcacagagatcggcaacggacttacacgtccaatggttggtatgcatttcttcaatcctgctgaccgtatgaaacttatcgaagttatcgctggtgtaaatacacctgctgagactgttgactctatcaagaagattgcagagcagattggaaagactcctgttcaggtaaatgaagcagcaggattcgtagtaaaccgtatccttatcccaatgatcaacgaagcagcattcatcaagatggaaggtgtttctgacatcgccggaatcgatgcagctatgaaacttggtgcaaatcatccaatgggacctttagagttaggtgacttcatcggtcttgatatctgccttgctatcatggatgttctttacaatgagactggtgacagcaagtatcgtgcttgcccacttctccgtaagatggttcgtggtggaaatctcggtgttaagagtggaaaaggtttctatgtatataatgctgatcgtacaaagacagcagttgatgcacagtaattgattatataaattatgaaaggtggtaaagaaaggcatggattttacattaagtaaaaagcatgagatggcgagacagcttttcaaagatttcgctgaaaatgaagttaaacctgttgctcaggagactgatgagacagaacattttccaatggaaactgttaaaaaaatggcaaagagtggtttcatgggtattcctattccaaaggagtatggtggacagggttgtgatattttaacatatattatgtgtgtagaggagctcgcaaaagtttgtggtacaacaagcgttattgtttcagctcatacatcactttgtgcagatcctattcttacttatggtacagaagagcagaaaaagaaataccttccaaagcttgcaagtggagagtatatcggagcatttggtcttacagagccaggtgcaggtacagatgctcagggtgttcagactaaagctgtacttgacggagatgagtgggtacttaatggttctaagtgcttcatcacaaacggtgaggttgctgatgtttatatcattattgcttatacagacatcatcgaaggaaagaaaggcagaaagattaagaaattctcagcattcatcgtagaaaaaggaacaccgggattcacattcggaacaaaagagaagaagatgggtatccgtggttcttcaacatatgagcttattttccaggattgccgtatccctaaggatgcacttttaggacctcagggcaaaggtttccctatcgctatgcacactcttgatggtggacgtatcggtatcgcagctcaggcacttggtcttgcagaaggtgcacttgacagaacaatcgagtacacaaaagagagaaaacagtttggccgtactatcgcacagcagcagaatacacagttccagcttgctgatatggctacaaaggttgaagctgcaaagaatttagtttacagagcagcacttaagaaacaggaatttgctgacggtgcaaaggtatcttactcagtagaagctgctatggctaaactttgtgcagcagaagttgcaatggaagttacaacaaaagcagttcagttacatggtggttatggttacatcagagagtacgatgttgagcgtatgatgcgtgatgctaagattactgagatctatgaaggaacaagtgaagttcagagaatggttatctcaggtgcattacttaaataatatcgtaaataaaaacataaaccaaaaaataagacaaggagtgacaaagctgtgaaaatagtagtatgtgtaaaacaggttccagatactaaaggcggagttaaatttaacccggacggtactttggatagaggtgctatgcttgcaatcatgaaccctgacgacaaagcaggtttggaagcagcacttagaataaaagatgaatatggtgcagaggtaactgtacttacaatgggtcttccaaaagcagaggaagtacttcgtgaagcaatcgcaatgggtgcagacaagggtatccttgtaactgacagagttttaggtggtgctgatacttgggcaacatctacaacaattgccggagcacttagaaatattgattatgatcttatcatcacaggtcgtcaggctatcgacggtgatacagcacaggttggtcctcagatttctgagcaccttgacatccctgtaatctcttatgctaaagacattaagatcgagggagacagtgttgtagtagagcgtcagtatgatgacagatatcatgtattaaaagctaagatgccttgcttagttacagctctttcagaattaaatgagcctcgttatatgactccaggcggaatctttgatgcttacgatgctgagattacagtatggggcagaaaagaccttaaagatgttgatgattctaatatcggtcttgcaggatcacctacaaagatcgctaaagcttctgacaaagttagaaagggagcaggcgagaaggttactcctgaagatgcagatcaggcagtttcatacatcatggacaaattaaaagagaaacatgtaatctaaaatttataaggaagtggtgactaaaatgggtttagaagaatataagggtgtctatgtctttgcacagcaggtagacaacgaattaagcggaatcgcttttgaattgcttggaaaagcaaaagaacttgcaagtgaccttggtacagatgtaacagccgttcttatcggttctgatgttaaaggtcttacagatgaattagcagagtatggtgcagacaaggttatcgttgtagatgatcctgagttaaaagagtacagaacagagccatatgctcatgcattatcttcagtaatcaacgagtacaagcctgaaatcgtattagttggtgcaacagctatcggtcgtgatttaggacctcgtgtatcagctcgtgttcagacaggtcttacagcagactgtactgtacttgagattggtgatttcccaatcaatgcaattcctggacaggaagataaacagaagcacaatcagcttctcatgactcgtcctgcattcggtggtaacactatcgctactatcgcttgccctgacaatcgtccacagatggcaacagttcgtcctggtgttatgcagaaaatcgagcctgtaaagggtgcaaaagcagaagttatcgagtacaatcctggatttactccaaacaacaaatatgttgagatccttgacatcgttaaagatctttcagatacagttgatatcatggatgcaaaaatccttgtatcaggtggtcgtggagttggaagcaaagagaactttgcaatgcttcaggatctcgctgatgtaatcggcggaacagttagctgctcacgtgcagtagtagataacggatggatgccaaaagagttacaggttggacagacaggaaagacagttcgtcctaatgtttactttgcaatcggtatttcaggtgctatccagcacacagcaggtatggaagagtcagacatcatcgttgcaatcaacaaagatgagacagctcctatcttcgatgtagctgattatggtatcgtaggcgacctcaacaagatcgtaccaaagcttacagaagctttaaaagaggttgtaaaatagaccgagcttgttaaagcgagggatgcttcttgactttcaatcaagaagagacaatttataattatattttggtagttctttaattcatatataaaggcggcatatccggttttgggtatgccgcctttttaattgttgcatgatttttatatttgaaaacttattttttattccatatccgttaggtataatgatatttgttgtaataatgtcaaaaactcaatagaatttgtttataataaatttaaaaaattctattgagattttttatctattatagtataatatgttaggtttgtgcggaaaaaatatggaaaatgataacaaattcagtatatctgcattagcttagtttttacagtgaaaatgttgtggctgagatttttagaaattaataatatacaggggagttatgtatattatgtttgtcagactgcaacttaaaataaataggttactattggtattatacaaatataataggaggattgccatgcgtggaattgacacacagacaaagaaaatcagggaacaggtatttgaggaagtagcacgtgctgcttatagtacaggagatgtaagccacgagttagaggaaataccatacaagataacaccatcagatgttccgctttaccgtgagagcatttggagagaaagagctattgcatcagaaagagttcgtcttgcaatgggactttcactcagaccattagacagaccggtacatataacagagggatttgcagagagtaatatttctgaaaaatattatgagccgcctcttatgcaggttattccatcggcttgtgatatgtgtgaggacaacaagattgaagtcagcaatatgtgtcacggttgtgtagcacatccatgtatggaagtctgtccaaaagaagctatctcaatggttgacggacacgcatttgtagatcaggacaaatgtatcaaatgtggcaaatgtatagctatatgcccataccatgcgattatcaagaaaatcagaccttgtgccgaagcttgtggaattaatgctatcgagagtgatgagcatggtcgtgcaaagataaatgatgagaagtgtgtatcatgtggtcagtgtatggcgagctgtccgtttggagctattgctgataaatcacagatattccagatgatcagagctatccagcacggtgatgaagttatcgcagagattgccccggcatttgagggtcagtttggagctgatgttacacctgcacaggttatagctgcattaaaagaatgtggatttaaggatgttcatgaggttgctctcggagcagatatcggtgcagtatcagaagcacatcattatgtaaaggaagtagtaaatggagatcttccgtttcttcttacatcatgctgtcctgcatggtcaatgcttgctaagaagtatttccctgatattatcgacagtgtatctcaggagcttactcctatggttgcaactgcgagaagtatcaagaagaaatatccaaactcaaaggtagtatttataggaccttgtgcagctaagaagcttgaggcatcaagaagaactgtgcgaagtgatgttgattttgttattacatttgaagaattaaatgcaatatttaaagcaaagaatattgattttagcaaatatgataagggtcgttcaatgcatgaagcaacaggagcagggcgtggatatgctgttgcaggtggagttatcagtgcaattgagcagtgtatcgaagaatactatcctggaacagaagtccagacggagcattgtgagggtcttgcagactgtaagaagatgcttcttcttgcaaaagccggaaagaaagacggctgcatgatcgagggaatgggctgcccaggcggatgtgtagcaggtgttggaactattcttccaatcaacaaggctaaacttgccgttgctaagactgttaaagagtctacaactaaacttccggcaaaagatttgcttgaaattgaattaccttaa

SEQ ID NO: 504 - DNA, 10532 bp, unidentified
  source 1..10532: mol_type = unassigned DNA
tcagaaaatacttgtatcagtgatctgaccgtttgacaagctgttgacgagaccacgcatttcctctttggagcgaatacagtgtgccgagtcgattatctgctgtctttgaagcggatccagcttagcaaagtaagcatatgccgcaggcacctgagcaagagccatagacagccccagcggcaattcctgcccgtgagcaaaagagttgtttttcatttttatcacctccgcatatattatttcccaggcaataaaaataataaatccttacgatcttatatgtgatactgcacaatttatcacatcgtaatttgtgcaaacaaatgatttattttttaatttggcaacatttctgcaattgttgcatttttcatgcaacaaaagtggtgattttcgggataagtataaggatattatcccaaatcgaatatcctgcaaggtagcagtgtatgaggacacattctgagggcgtgagttaggtgaacacgatgagaggttctgatcgcacagaaaagcacttcctgcaccttgtttgaagcttgaaaatcgaatataaacggctgaaacacgaaccccacggcaacaaatctgtaggggcgaacagcgttcgcccgtcttggtcgcccgtcaaaccctgcgttatccgcacaatttactgcatttcacaaaccatgtaggggacggcgccctcgacgtcccaccaccacaacgttttgcattattgtttattccacaaaccatgacaaccacacaacgcatggtaggggcgaacagcgttcgcccgtttcgttccccccactcaacttcatgaaaaatccaaacctcgcaactcccccgaaacgggctgtcgtatttctgtgagcttgcgaacagaaatttcgccaatcccctacagatattcgtgcaagttctaccaccacaaaatcgctccgctgggtcattccttacttcataggaatattattcttttccaaatcagttgacaatcttttgttaatatgatataattattttgttaattttttgtcgatttatcagttaatctgaggtgtattaataaatggataatctttctaatataagtgtgataaaagatgttctcgcaagacataatttcactttctccaaggctctcggtcagaacttcctggtgaatccctccgtttgccccaagatagccgaaatgggcaatgcaaaaaaaggcttcggcataatcgagataggcacaggcataggcgttctcacaaacgagcttgccaagcgtgccgacaaggtggtggctatcgaaattgacgacaggcttatgccggtccttgcagaaactcttgcagaatatgacaatgtgaagataataaacgccgacgtcatggaaactgacctccataagcttattgccgaggaatttcagggcatggacgttgccgtttgtgcaaatctgccttactatataacctcgcccatattaatgatgctccttgaagaacgtctgcccataaagtctgttactgtcatggtgcagaaagaagcaggcacacgtctttgtgcccctatgggtacaagagatatgggagcagtcacagtggcaataaattatttttctgtaccgaaactgcttttcaacgtatcacgaggaagcttcatgccctcgcctaacgttgacagctgcgtggtgaggtttgatatccgtgataagacccccgagggcgtgacggacgaaaagttcttttttaaagtcgctaggggagcattttcacagcgaagaaagactctctcaaattccgtatcatcatcaatgggtatagataaatctatagtaaatcaggcgatagagcaaagcggcctgcctgcctccgtccgtcctgaagctctttccatggaacaattcataaccttttccgaagcccttagaaagcttatctaattgtaggggagtcgcacagtttctgcaagacgtcccgttcttcggatatctcaaattaaaaattattacgcaaacattgattgtgttttttcaaaagatgtatgggagtggctttgagatctgtccgtaaatttggtcagtatttcaatttcaagcccatattgcgacacctttcgcttgatagtcctgctaaaatgtaattattacattttggaaacataggacgtgataagcaatggaaaaaatacggcatacggcaaaatttcatacctcaggtaaaacgaatgtacttatggctgttttatcggcggcagcagcgtttgcggcaagcttcggaaagatcttaggcttcccatcgtcaatgaacgtggcggtggcagtgctttcgggaactaatgtgatacctgcttttttaggctctgcacttgcatattttgtaagcggaacattctcagagggtatcgttcagctttgtgcgatacttgttataggggcggtaaggcttgtgatgccctctgctgaccataaggacgaccccgtttttgtgtcgctcctcacaacaggagcaatgcttcttttcagctgtgtaatgtcggtggcaatgccgtcggatacatatacggcttcactgcgaatgataagctcgctcatgtgtggctgtgttgtttttattgcactgaccgtaaaacgtcaaagaaaccgaagcggtgtttttgaccttacaggaataaacggagttttcacagctatactttatattatgtttatctcgaccatcactgccgcaccgctccatgtggtgaatctgggcaggatagcaggcactttgtttatgcttatggcagtgcgaaagtatagaaatataggcggtgcagtcgttggtgcattgaccacctgcggtgtactcctttgtgctccgtcacttgcgagaaatacacttttgcttgccacgtcaggacttatctgcggagcttttctgcaattcggctctcttgtgatagtgtttgttttccttgcagtttcacttgtgagccttgtggcaatgggcgtgaacggtgatacattttcaatgtttgctgatttgcttataggctctgtgctttttatcgccctgcctgttcctgtgataaaaagggtggcaaaaaaagtggtgggagtgaaaaattccgttgaccttgtagggcagaccacttcttcaaagctcaacatggcttcgagaactctgggcggtatcagaggtcagcttacaatggtcactgcggcgatagataaacgctcaaaggaagctacactgtcaaagcgtgtacgatctgttgtttgtaccgattgcgatatgtactcagtgtgcagtaagcgttgtgtacagcttgatgacagcttttcaaagcttgaaagcatagtttgtacatataataacctcagccttgacgacgttgaaaagcatttgggtggctgtgtgagaaagtcccttctttgcaaaagcttcaatgaattgtataccgactttgtggcagaacgtgccgacagcatgagagttcgtgaaatgcgtgagtttttaagcgaacagctttcctccatggaggatatcttatccgacctttcttttagggcaggtcaggtgagaagcgttgatcctcagctttcagcaagagtaagggagcatttctcaaaccttggctatccaaatgtgaaagcctgcgtttacatagacgaaaatctttgccagcgtgtggacgttttcataactgcgcagttcaggggtgatcttgtaaggctgacggctacgctttcagaaatgatagattatgaccttgatatgcctgtgatagtcaaggtggataatataaccagaatgtcctttgcggaaataccgaaattcacagttgatataaaaagcttttcggcttcgtcaagcggagaatattcgggggacagctttgaagtcttcgattcaagcgtcaacgaaaagtatatcgtcctttcagacggcatgggaacaggaaaaagagcaagactggattcattgttttccgtaagtcttgttacaaggctcatacgatcgggaatgtctatgcagacagcccataggcttataaattccatgctgagagttaagggctgggaggaatcttttgcgacccttgatataatgcggctggagcttaatggcggaacggtgcagtttctaaaatcgggtgcggcgcaaagctttcttttccgtgacggcggtcttaaagctatcggcggacaggcttttcctgctgggatacttgcggagtgtacacctgatgtgagcgagcttaagctctttgacggggacgttctgcttatgacctcagacggtgtcgaggacgctacagcacgagagatactccgctgtaacggaatgaacgctcaggagatagtcacggcgcttggcgcaaaggcgcttgctcagcgaacaggaggcaggcgtgacgatataactattattgccgcaaaaattttccttcgtgacgagaatgaaaaatgaatgtaaatgactttgccgacttttgcctgcaattttttacttttgtatactttgactttactttttctatgttattatataaaatctattgtgcaaaatatataaaactatctgttgaaatatgtgcgaatacgagaataactactaaaactattgcaaaattgttcaaaaaagattaaaatgtaagtatgaaacaccgaaattattcagcggttttcacaaaaagacaagggaggctgaattgtgatagatattattccaaaggattatgaactgccgctctatcttttccacaatggcacaaactgcgaaacatataagtttcttggctgccataagggagagaaagacggcatagaaggatattattttagagtctgggcagcacacgctgagggcatttctgttgtgggagatttcaatgactgggacgaaaatgccactccaatggagaagatagacgactcagaggtgtgggaggcttttgttacagggcttaagacttatgatacatataaatactgtatccacggctgtgacggcaagacccattataaggctgatccgtacggcacacacatggaggtcgctccgaacaccggctcaaaggttttcgatatagacgattatctttggagcgataaaaagtggatgaccgagaagaagtctaaggatatctacaattgtcctatgaatatctatgaggtacatctcaattcatggaaggcttgtcctgacggaaaatatttctcatatgttagatttgcagatactataatcccttatataaaggaaatgggctatactcatatcgagcttatgccgctggcggaatatccttttgacggctcttggggctatcagggtatcggctattttgcgccgacttcacgtttcggaacgccttatgacttcatgaaaatgatagaccttttccatttggcaggaataggcgttatccttgattgggtgcctgcgcattttccaagagatgaggcaggactgttcgagtttgacggaggtccgtcatatgaatactctgacccgaaaaaggcagatcacctcacttggggaacgagagttttcgattattcaaagggcgaggtaaagtcattccttatctcgaacgctctttactggatagaaaaatatcacgttgacggtctgagagttgacgctgttgcgtctatgctttatcttgactatgacagacgtgacggagagtggacgcctaacaagttcggtggcaaggaaaatcttgaagctgttcagttcttcaaggatctcaataccgctgtgttcggaagaaaccctaatacccttatgatagccgaagagtcaacttcatggcctatggtaacaaagcctgcgagcgacggcggtcttggcttcaatttcaagtggaacatgggctggatgaacgatatgctcaaatatatggctcttgaccctattgacagagcttttcatcatgatatgctcacgttctcattcttctatgctttctctgaaaactttattttgcctatctctcatgacgaggtggtgcatggtaaggcttcattggtaaataaaatgtatggtggagatatcgacaataagttcaagcagtgcaagctgttcatggcttatatgatggctcacccaggtaagaagcttctgttcatgggtgctgattttgctcagttcagagagtgggattacgagaatggtctggaatggttcatggtggacgaatatgagaaccaccgcaattatctgaactactccaagaacctcaatcatttctatcttgaccaccctcagttctgggagagagatttttcttgggagggctttagctggatatcaaatgacgatttcaagcagagcatcatcatcttcagacgtttcgacaaaaacggcggagaggtcatcgttgtgtgcaacttcgttcctgtggaaagaaagtcatactgctttggcgttccttactggggcagctatacagaggtgttcaactcgtcttctgttgacggatccccttgcacgaacggcactgttaaggcggtagatgttaagatgcacggctttgaccagtcagtttgcatcgatattcctgcgttctcttgtatgtatttcacggtgaagaaagaggaaagacctgtgcctgagaaaaaggcagagggaaagaaaaaaacaaagacagcggctaagaaaactgctgtcaagaaagccgctaaggcgaaaacaactaagaagtccacagctaaaaaggctgagtaatatagacttaataaaaattggtgggtgaattaattatgttcaacaaaaaagaatgtgttgcaatgctgctggcaggcggtcagggaagcagattgtatgccctgacacagagcgttgcaaaaccggcagtacctttcggtgctaagtatcgtatcattgattttcctctctcgaactgtatcaattcaggtatcgacacagtgggcgtgctgacacagtatcagccattggtactcaatgagtacattggaaacggtcagccttgggatcttgacagaatacacggaggcgttcatgtgcttcctccttatcagacagcttcaggcgctgattggtattcgggtactgcaaacgctatttatcagaatatcgcttttgtagacagatatgaccctgagtatgttgttgttctttcaggcgaccatatctataaaatggattacaacaagatgcttgaatatcacaaagctaagaacgctgacgctactatcgctgttctggacgttccaaaggaagaggcgtcacgtttcggtatcatgataaccgacgaggacgacaacatcatagacttcgaggagaagccaaagaaccctcgttcaactcttgcttcaatgggtatctacatattcacttggaagaagctgaaagcttatcttatcgctaatgagaacgacaaggaagcttcaaaggacttcggcaagaacattattcctgacatgagagaagcaggcgagaagcttgtggcttatcgttttgacggctactggaaggacgttggaactatcgactctctttgggaagctaatatggaccttatcaatcctaacattcctatcgatctttatgacacaagctggaagatatactcaagaaaccctgttatgccacctcagagcataggcaagaacgctcaggtacagaactctatggtaacagagggctgcgttatcgacggctctgtcgagttctcaatgatctctgacggcgttactgttgaggaaggcgctgagatactggattctatccttatgcctggcgcagttgtcaagaagggtgcaaaggtcgagtatgctatcgttggcgagaacactgttatcggtgagaacgctcagatcggtgcaagacctgaaactatcgaggacaaggactcatggggcgttgctgtagtgggcaataatctgaccgtttctgacggcagtgttgttgcaccaaaggcaataatttacgagaatatctaagaaaggaccgagtaaatatggatgtaaatatgggtaacgtactgggtcttgttttcgctaatatgcacgacacgactcttggcgacatgacaaagaacagaactatgggttctgtaatgttcggcggaagataccgccttatcgacttcccactgtctaacatggtaaacagcggcataagcgaggtcggagttataacaaaatctaactatcagtcacttctggatcacctcggctctgcaagagagtgggatctggcaagaaaaaagggtggactttacattctgcctccattcggcaacgttgaaagcactctttacagaggcaggatcgaggctctttatggtgcgatgagctttatcaagcattcaagagctaaatatgttatcctttcagactgcgacgttgtcacaaacattgactacaagcctatcgttgcggctcacatcgagagcggtgctgatattactgctgttgcacacactggcgtttacagctctgatgatataaagacttcaactgtattcaacgttgacgctgacaagaacgtaacctctgttcttatcaatcctgacatcagcggcacttgcacaacgagccttaatgtgttcgttatgtcaatggatttccttattgaaactgttaatgacgcaatggccagaggaaatgtaagctttgagagaaatattcttcaggagaagtgcagagagcttaagataaagatctacgagtacgataactatttcagcaagctcaacagccctgaaagctactttaagtcaaacatggctctgcttgaacctgagaatgcacgcaagctgttcgttccaaagcgttctatctacacaaaggtaagcgacaatgctcctgttaagtacgatctggacagcaaggtatcaaattctcttattgctgacggctgtatcatagagggcgaggtagagaactctgtactgttcagaggcgttaaggtaggcaagggtgcaaaggtcaagaactgtatccttatgcagggcactgttgttggtgacaatgctgagcttaactatcttatcacagacaagaacgtttctatctgtgaaaaccatatccttacaagctcgccacagtatcctatgtatgtaggaaagggagcttctgtataaaaaggtcgcaatgacttaggaaagagggttcggatatgaacatactttatactgcaagtgaggctttgccttttattgcttcaggtggattggctgatgttgcaggctcactgcctgcggctatcaatgccgagggtcacgattgcagagtcgtgataccttattacagctctatcaggcaggagcttaaggacaagctgacatatgttacgaatttcactgtgccggtggcatggagaaatcaatactgcggcgtttttacaggcgttgtgaacggagtgacttattatcttttggataatgagtattacttccagagaaacggtctgtatggcttttatgatgatgctgagagatttatattcttctcaagggcagttctcgaactgctgagatacatcgactttaagccaaatgttataaacgccaatgactggcagacggcacttgttcctgtttattatgatattttctaccgctatcagcaggggtatgaggatatcaagacggtatttactatacacaatattcagtatcagggacaatatggcttagaacttatcaacgatattatgggcattccgctttatcatacggatctgctttcatatgacggtgatgtgaactttatgaaggctgctattgaaacggctgacaaggtgacgacagtttcgccaagctatgcttgggagatacttgatccatggtattcacatggtcttgacagggagcttgtgaacaagcaatacaagctttgcggaatactcaacggaatagatcagaagatctatgatcctgcaactgatcctgttattgctaagaattatagtttgaatgacaagacgggcaaggctgtttgcaagcacgctttgctcagcgagcttggcatggcacatggaaaagagcctgttatcggtatcgtaacgagatttgtttcacacaagggtcttgaccttatcaagtatgtgtttgaggacatcatcaggcttggctgcaagtttgctatacttggttcgggcgagaagatatacgaggactttttcagcgaaatgcattatcgttatcctgacagagttggtctgaccattggttttgtgcctgagctgtcaaagaagatatacgctggtgcggatatgttccttatgccgtcgcagagcgagccttgcggtttggctcagatgatcgctctgagatatggtactatacctatcgtaagagagacaggcggtttgagagacagtatccatgacgcaggcgacaagggcggcaacggatttacgttcaagtcctacaacgcacatgatatgcttgacgctgttgttagagccagggcgtactatgatgacaagatgaagtggggcaggcttgtgaacactgcgctcaagcagaatttcagttggacaaagtccgccaaggattacattgcactttacaacgacattcactaa

SEQ ID NO: 505 - DNA, 6328 bp, unidentified
  source 1..6328: mol_type = unassigned DNA
atggacgtattaaatagagtaccggttcgcgagcaggaaccacaggttcgtgcggctaactttgaagaggtatgtttaggatataacgaggaagaggcaaaagctgaggcagcacgctgcttaaactgtaaaaatgcgcagtgtatgaagggatgtccggtatctatcaatatcccggcatttatcgcacaggtaaaggaaggaaactttgaggaggcatatcacattatcagtcagtcttccgcacttccggcagtctgcggacgtgtctgcccgcaggagagccagtgtgaaggaaaatgtatccgcggaatcaagggtgaaccggttgcaatcggtaaattagagcgttttgttgccgactgggcaagagaaaatgatattaaaccgaaaaaagcagagaaattaaacggacataaggttgcagtcatcggttctggccctgcaggtttaacctgtgccggagatctggcaaaacttggctatgatgtgacaatctttgaggcacttcatgaggcaggcggcgtactgatttacggtatcccggagttccgtcttccgaaacagaaggttgttgctgctgaggtggaaaatgtaaaagcactcggtgttaagatcgagacaaacgttgttatcggaaaatctgttacaatcgatgaattaatggaaaacgagggatttgaggccgtatttatcggttccggtgccggacttccaagatttatgggtattcctggcgagcaggcaatgggtgtattttctgcaaatgagttcctgaccagaaacaacctgatgaaggcatttaaagatgagtatgatacaccgatcaaagcaggcaagaaagttatcgttgtcggcggcggtaacgttgctatggatgctgcgagaactgcaaagagacttggcgcggaggtacatatcgtataccgccgtggcgaggaagagcttccggcgcgtgtggaggaagtacatcatgcaaaagaagagggcgtgatctttgatctgctccagaacccgacagaaattcttgtagatgagaatggctgggtaaaaggcgcgaaagtcattaagatggaactcggtgaaccggatgcatccggaagaagaagcccggtagagattccgggatctgagtatgagatcgaggcagataccgtgatcatgtcacttggaacttcaccgaacccgctgatctcttccactacaaagggacttgagatcaaccgcagaaaatgtatcatcgcagaggaagaaaacggtgctacctcaaaagccggtgtatttgccggtggtgatgccgtaaccggagctgcaactgtaattcttgccatgggtgcaggaaaagctgccgcaaagggaatcgatgaatatctgagcaataaataatagaccagtgatggtaaaaatgccggagtcagtggaaactgctgatgtccggcattttttcttaaaaactttttttataaaaatttcttaacacatctaaaatattccttaaatcttatccaaaacctactttttttcaaaaatattggttatacttgtaagcaaacttatgatgaattgtaaatgagtcagagtgacagtgatgaatactaagaggtatagctatatggaggaaaatgtgaaccagacagagaaagaaatggcagaaaacgaaaaacagaatcagacgggaaaagaagtggcagaaaatgcagaccgggaacagacagaaacgatccggggactgaccgcacagcaggtggcagagcggaaagaaaagggtctctggaataaaaaagcggagtcggcgacaaagacgacgaaagagatcgtaaaatcaaacgtatttacatattttaacctgatatttttagtgatcgcgttattgttaatcggcgttggtgctttccgtgacctgacttttcttccgatcatcattgcaaatacattgatcggtattgtgcaggaaatccgttctaaaaaagtactggatgatctttctattttaaacagtcctaaaacaagggtgatccgggatggcagtaaaaaggagattcccgcggatgaactggtactggatgatattgtggagctttctgcgggtggacagataccagcggatgcggttgtgttaaacggacagttaaatgtcaatgaatcacttcttaccggtgagtcagatgagatcgtaaagaaaagcggggacgaacttctgtctggcagttttgtggtgtcaggaagctgtcttgcacgactgacaaaggttggagaagagtcttacatatcgaaattgacccatcgggcaacccagacaaaagaaggggaacagtcagagatgatccgttctttaaaccgtctggtacaggcagttggtattgtaatcattccgatcggtgtggttctttttgtgcagcagtttgtgtatgcaggtactcctttgcgggacagtgtaacaagcatggtggctgcgatccttggtatgataccggagggactttatctgttagcaagcgttgctatggcggtaagtgccatgcgtctggcaaaacagcaggttttaatccacgacatgaaatgtattgagacgctagcgagagtggatgtactctgtgtggacaagacgggaacgatcacagttcctgacatggaggtagatacttttgttctcacagaagatctgatgaaaacggttccggatggagatgatggtaccagggtttatgtcgatgcaggagacagggaagaacaggaacagaaatatcgacaggtcagagaaaaaatcgctgaatttgctgtaaacatgaatgcagataatgcaacgatggaggcggtcaaagcatactttaagacagggaataccgtgaatataaaaaaagcagacaaagtgtttgcattttcatccaaaacaaagtacagcggaatcatttcagagggaaaaagttatgtgatcggggcacctgaatttgtgcttcgggaggattatgcagagtacaaagaccgaatagaagcgtatagtgagaaagggtatcgtgtccttgtgtatggcagatatgagggaattttagacggacagcagcttacggaaaaagtattgccgatcgcgtttatcatgctgacaaatgcgatccgggaaggagcaaaggaaaccttttcctattttacagagcgtggtgtggagatcaaggttatctccggggataaccctaagactgttgctgaaattgcggaaaaagcgggaatctgcggcgcagataattatgtggatgcatccacgttgacaacagatgagagtatcgcacaggctgtagcaaaatatcagatttttggcagggtgacacctgatcagaagttaaagtttgtggaagcgctgaaagcacagggaagaacggttgccatgacgggtgacggtgtcaatgatgtgctggcattaaaagatgcggactgcagtatcgcaatggcatcgggaagcgaggctgcatcgcaggtggcacagcttgttcttttggacaatgatttttcaaggatgccctctgtagtgatggaagggcggagagtggtaaataatatccagcgctcggcaagcttatacctggttaaaaatattttttccatgctgcttgcagtattttccatgatctctatgatcaattatccactggaaccgtcacagatttcgctgatcagtatgtttacgattggaattccgtcttttgtgcttgcattagagccaaacaaagaccgtatacagggacattttatgacaaatgtattgttgaaggcattgcctgccggacttaccgatttttttgctgtcagcagtctggtattgttttgtcaggtatttggtgtgaacgaagaggacatttcgacatcctgtacgatacttgttgctattgttggatttatgatcttatatcagatcgcaaaaccgatgacggccggacaccgggtactgatggttggaatggtcgccggctggctgttctgcatgatatttgtcagccacttatttgcaatcagggatatctcagggcagtgtatgatgctgactgcggtatttacggttgcagcggagtccattctgcggtatctgtcgaaatttgtggagtggatgcgggaaagtcttttagtgttaaaaaagaaaatacatcaggcaacagcatgaaagaggacaggtattcggtaaggataaaaaccggataaaaaacagccgctccgtttttaaagcagagcggctgtttagcaatcaatttttgtgaaaatgaaatgttgcagttattccagattaaggtgttttttgatgataaccatgcacacgatatagaaaacaacacattcgatgatcgaaaagagcgatccggaaaacagcatagaggaaacagttgtgctgaatgtaacgttttcagtggcattataagttacaacattgacgttgttcatgacaccaaaatatccggtaagtaccaggatgatcgaggatacaatctgacctgacatgtaaaagacgattccggcaccgatggaagctcctactttatgttttgtaaagagctgaccgatagaaccgcttgcaaataccatcaaaaggtactgtaggcaggataagatcatggcaaaaatcatataaatgctaaacgtatggagagacatgccaaacagattctggaaatctaccatgagcatatcaaaatctgcatcaaaggaaaatcctctgtttgccgcacagcccagggcgaagatcgatacaaacataatgatcagggagagcatcagccagcatagggaaacgagcagttttacattaaaaattgacatctggccaaccggcagtgtgtgtgtcaggtatccctgatcagaatacattgtcttataaaaatgtacacacatatatacatagcttaccacgaaaagtgcaaatacgccgagtacataaaataccatagctgctgtaaagaagatctcctgtaactggttttctgtgccggcaggatcactgtcaccgtacatggcaatacagccaaggatggtaacaaacgccataacgccatagatgatgaacattaacttgtatgtgtttttaaattcgtatttaaataattttcctaacatctgaatacctcccggaacagtgcatcgacggatttcccctcctcggcgcggatatcgtccacagaggatgagagacggatctgtccgttctgaataaaaataacctggtctaaaatgttttcgatatctgcaatcaggtgcgttgaaatcaggatggaagcggacggatcgtaattggttaagatcacgtctaaaatgtaatctctcgcagcgggatcgacacctgcgatcggctcatctaaaatatataattctgctttgcggctcatgacgaggataagctgcactttttctttcgttccctttgacatgctttttagagaatcatttggattgatatttagtttttgcagcatatcataggcgcgttcgctgtcgaaatcttcataaaagtcctgaaagaaggcgatgatctctttcacacgctggttcatattcagataactatgatccggcagataggaaatgtggcgtttgctctcgacaccgatcggattttctttgtaataaagggtgccggaggtcggggttaaaagtccgttgatcattttgatcagtgttgtctttccgctgccgtttggaccgagcagaccaatgatatgtccgctctcaatcgaaagatcaatgtggtcgatcgctgtttttccactgaaacttttggtgagatctttgcattcaagtaatgtgcccatcatttttctcctttcatggtctgaccgatcatagccagaatctcattttcctgaaagccgagctgctgcataaatgagagcagttctgtaattttatcttttgcaagtgttgattttaattcatcgatcatggaagtgtcctccgtaataaatcgtccggttgtccgctgtgagaaaacaagaccggttcgttcaagttctgtgaaagctttctgcatcgtgtttggatttaccgctgcctcggcggcaaggtcacggacagaaggcagtttgtctccgggtttatatttgcccgaaatgatatccatttcgatccgttcgacgatctgtataaaaataggacggtcggaattaaggttccatgccattgtatcacctcgtttctttgtactagtgaaataatacaataatacaagaaaagtgtcaagagatttttttgtaaagtattctgattttatgacgatataaattacataacaggagaaagctaaggatggcgtctgattttcaaggaatgaaatacccggaaaaacaggcgccat

SEQ ID NO: 506 - DNA, 11709 bp, unidentified
  source 1..11709: mol_type = unassigned DNA
  misc_difference 10017: note = a, c, g, or t
  misc_difference 10018: note = a, c, g, or t
  misc_difference 10019: note = a, c, g, or t
  misc_difference 10020: note = a, c, g, or t
  misc_difference 10021: note = a, c, g, or t
  misc_difference 10022: note = a, c, g, or t
  misc_difference 10023: note = a, c, g, or t
  misc_difference 10024: note = a, c, g, or t
  misc_difference 10025: note = a, c, g, or t
  misc_difference 10026: note = a, c, g, or t
ctatttgatatgtttttcttccagtttcaataataattctctcagtaccttcaaggctaccgctgtagacgctccactggcatccagaagcggtgacagttcattgatgtcgcatcctacaatatttaactctcctacctttaaaatcgcatccaaaagctgaaggaaggtcacgccgcctgcctccggtgttcctgttcccggaaatacggaagggtccaatacgtccaagtctaatgtgaaatacaccggcttgccttttaacttccggattacctcttccagtccttcaaaatcaaacttatgggtaatcacatgttccttaccccactgaaactctgaccggtctccactgcggataccgaactgatagattctgtcatcacccacaatatcccatacgcggtgaagcactgtggcatgtgacagggtagcacccagatattcttctctcaggtcagcatgcgcatcaaaatgaatcacatgcagttcaggataatgtgctgccacacttctgactgcaccgagagtcaccagatgctccccgccaatcattaatggcagcttgccagcctgcattacctcttctgtaaaagctgtaatatccgccaatgccttattggtatcgccaaaacacagctccagatcgccaccgtcaaatacagccgcatcttccagatcaagatcctgataagggctgtaagtctccagtccataagattctgctctcatggttctgctggcgaaacgtgttcccggtctgtaagatgtcgttgaatcaaaaggcgctccaaagattacaatacgggcttcgtcaaattccttatcgcatccaagaaaagtctctacatttctctccattttctccacatcctgtttaattaaaatttttattttccacatcctcaagcatttcttccacataatttggaagtgcaaatgctcctgcgtggatttcttcattataatatctggtctttagaccatatgctttccagtcttctttcctctgatccttgattggatgatacttctttgaggcgaatccaaaaagccagtgaccggatggatacgttggaatatgcgcctgatataccttggcaatcggaaaagactctatgattctcttatgtgccctctgcatcgcataggcatcatcaggataaaaaggactctcatgctggtttaccataatgccatcggcttttaatgctttattacagctgccatagaattccttggtaaaaagtccttcacccggtccaaaaggatctgtagaatccacaaggatcagatcataggtatccacatacttcctgataaagcgaagcccatcctcataataaagcttcacccttgggtcctggaatccacaggctgtctgcggcaggaactccttacacgcctttaccacttcttcgtcaatctctaccagatcgatctcttctatctgcgggtatcttaccagctccctgactgtgccgccatcaccgcctccgattaccagtactttacgaacactaggatgtactgccatcggcacatgtaccatcatttcatgataaataaattcatccttttctgtcagcatcatatagccatccagtgtcaggaatctgccaaattccttagattcaaaaatatcaatcctctgaaactctgactgactcgtatagagctgcttatctacctgtattgagaacttcacatgttctgtatgattctccgtaaaccacaattccatatttatctactcctcactaccatatatttttagatatttttgaaacgcaacattacatatacagaattgtaaagctttaataaatgcataaacaggcactgtatagccgtcacatttcacaattacctaatatatgtttttttcacatttatcttgcagcggaacgaataccttccattacattgagtcgatttacttccatatcttccggtcctgtcatggaacagcctttttccttggcatatacgatataatccagaatatcctgtgtgatcaactcgcccggtgcaagaatggggattcctggtggatagcacatgacgaattctgcacataccatgtccttacagtctgcaagaggcagagactgcttgggtgcatagaacgcttcctgtggagagtaaataacccttggattgatatattctgcggtcatctgtcctgccctgtcttttttatacaatcgcctgatctctgccagcgcacttaccagcctctctatatcccttggtctgtcacccacagatacatacgccagaatattaccgatatcaccaaattctgtctgaatatcatactcatcacgcagaagatcataaacctctattcctgcaagtcctaccgccagtgtatttacagaaagcttcgttacatcaaaatcatatacagaatcgccatttaccagttcacgggaatatgcataataatcaccgatctgattgatttccttacgggcatattctaccatctctgttactttatcaaaaatcccctgtccatgcagcgcaagattccttctggaaatatccagactggacatcagcagataggaaccactggtggtctgtgtcagattgatgacctgccgcacataatcctcattgatatccggtcccattaacaggaaagaagactgggtcagggatccaccagacttatgcatgctgaccgctgccatatctgcccctgcctccatagccgtcattggtaaattcttatcaaagtaaaaatgcgttccatgggcttcatctaccagtactttcatgccatgggcatgggcaagctgtgtaatgccttttaaattagagcatatgccataataagtcggattgttgaccaatacagcctttgcgtcaggattctcctcgattgccttttgcaggtcagatatcctcatgccaagggcgattccaagctcgtggtccatatcagggttcacatacaccggaaccgcaccgcacagaatcataatattaatcacacttctatgtacatttctaggcagaatgatcttctcaccacgcttgcagacagacaagaccatactctgtaccgcagatgtagttcctcccaccatgaaaaaggcatgggctgcgccaaaggcatctgctgccagctcctctgcttctttgatcacagaaacaggatggcagagattatccagcatcttcatggaattgacatctacactcaggcatttctcacctaagaatgcagtaagatccggattgccttttcccctcttatgccctggcacatcaaaaggcaccagtctctgtgtcttcattctctctaatgcttctaatacaggagccttactctggtctaacttcattttcacattatctccattcgttaaaagatattggtaccgctgaatatttcaatcatttcctgcctcagattgttgctgatctgcagacgggtcttaggtggaatctcataaatatcagagttgaacagataattctgtaaatccagctccttgatgagcatcttggtatggaacatattcgcctgatatacattgatatctaccgcatcatatctatccaaggtattcttatcaatgtaatcctggatagatgtcatatgatgatccatgaatatcttcttaccttctacatttctggtaaagccacgcaccctgtaatccatcgtgataatgtcggagtcaaagctgccgattaggaagtccagtgtactaaggggtgtgatttcgccacaggttgccacatcaatatctacacggaaagtcgcaatattcgtttcaggatgatattctggataagtatggactgtaatatggcttttgtccagatgtgccacaatctcatcattatgattagatagatgcagcgtatcttcaaaagccattgctgcactggctgcgctgtcacagcctgacggtatcatattatcctctgctatgagaaaggtcacgctcgctccctgtggctcataatcctgcttggatacattgagcacatgggctcctatcatttctgtcacatggaacaagatcttagtaagacgctctgaattgtactgctcatcaatgtaagcaatataatccttctgctctcttgcgctttttgcataacagacatcgtagatgttaaagctcagagattttgttaaattattaaatccatataatttcaatttgccttccatgaatcttacccttcctcatatatgttttatacttttcaaagcctcatttacaaaataagacaagtgagtaccgcaccgatactcacttgtcaatcttttcacatattatatacagtatgcacaggaaaaatcctatgcgccttatgatacagtgattagagtctatatagcaaaattcgtttacttttactactcttattgattttcacaagtgggtcgtgcgtatagcacatggtttatagtaaccaacttataaaatacacatagccaatcagatttagctacaaatacggacataagtccaatcaataaggctccaatcgccttaatacttgttgttatattaaatattctcaacgagttttattatagggtataacatactggaatgcaatcccttttttgcaaaattcatgcaaaatctggaaattaccattacagggtcatcagatagtaattaggcaacacaccccatttcaggtaaacgctagttcaatactccacaacagagcacaacatacaaattctgtacaaaaaaaccggggaagcataaacttctccggttttctatccgtttgagcactataaaaataaatttactgattagttagcctttgcagccttagcagcttttaactgctctgtcagcataggaacgatcttgtttaagtcgcctacgataccgtaatcagctacatcgaagataggagctgtctcatctttgttaattgcaatgatgatatcagattcttccatacctgctaaatgctgaatagcaccagaaataccgattgcaaagtatacgttaggacgtacagtcttacctgtctgacctacctgcaggtctttgctcttccagccagcatctacaactgcacgagagcagcttactgtaccgccgatagcttctgcaaggtcatcaagaagcttgaagttctcagcgcttcctactccacgaccaccagatacaaggatcttagcatccatgatatctactgtctcagataagttcttaactactttcaggatctctacatacttgttatcaggtgtgaatccaggattgaactcttcgataacagccttagcaccatcgttcttagaaagcttctgcataacgccaggacgtacagtagccatctgaggacggaactctgggcaagcgattgtagcgattgtgttaccaccgaaagcaggacgagtcatcagtaactgattatgcttctgctctcttccaggaatcgggttgatagggaaatcaccgatctcaagggatgtacagtctgctgtcagacctgtatggattcttgcagatacacgaggaccaaggtcacgtccgattgctgtagcacctactaataaaatttcaggtttatatttctcaacaacagatgctaatgcatgtgcataaggctctgttctgtattcctttaattcaggatcatctaccaggataactctgtctgcaccatatgcagcaagttcatctgcaagattcttaacaccactacctactaatactgctgttacttctgttgataatttctcagccagtcttttgccttcgccgattaattcaagtgcgataccgcttaccttgttatctacctgctgagcaaagacaaacacgcctttatattcttctaaattcatgttgaacctccatatttaatagcacttcgtatgttctaaattaatgcattattaaatcacatgcttctcttttaacttgtccatgatataagttacagattcggaaggatctaaagtaaccttctcaccctgtccttttcttaccttatcagatgctctagcgatctgtgtaggtgaacccttcagaccaaggttagaatcttcaacatcctttaagtctgctctgccccatacggtaatgtcagccttgaatgcatcgaaaattccgcctggtgtcatataacgaggctcgtttaattcagcaagtgctgtgattaagcaaggcattttagcttttaatacatgatatctgtcatcatactgacgctcaacgattacgctgtcgccttctacttcgatcttctgtgcataggagattacaggaattccaagatgctcggaaatctgagggccaacctgtgctgtatcaccatcaatagcctgacggcctgtgatgatcagatcatagtcaaggttacggatagcgcctgcaagtgtctgggaagtagcccatgtgtctgcaccaccaagtactctgtctgttacaaggattcccttgtcagcgcccatagcaagtgcttcacgaagtacttcttctgccttaggaagacccattgtgataacggtaacttctgcaccgtactgatcctttaatcttaatgctgcttcaagacctgctttgtcatcaggattcatgattgtaagcatagctgctctatcaagtgtaccatcaggattgaacttaacgccaccctttgtatcaggtacctgtttaacacatactacaattttcattgttattctccttatcaaacttaatttagggttagttacatcttactttaacagatttgcagagataaccattctctgaacttcgctggttccttcgtagatctctgtgatcttagcatctctcatcatacgctctacttcgtattctcttgtataaccataaccaccatgtaactgtacagccttagttgttacttccatagccatctctgctgcgtataacttagccatagctgcttctacgttgtaagatgtcttatgatcctttgtatactgatcctttgtgcaagctgccttgtataccatgaactgagctgcctgagcctttgtagccatatcagcaagctggaactgtgtattctggaactgtccgatagcacgtccgaactgttttctttcttttacatatgcgattgttctctctaatgcaccttcgccaagaccaagtgcctgagcagcgataccgatacgtccaccatccagtgtatgcattgcgataccaaagcccttgccctgagcacctaacatattttccttagggatacggcaatctgtgaagatcagttcgtatgtggatgaaccacgaatacccatcttcttctcctttgtaccaaagctgaatccaggtgtgcccttctcaacgatgaatgcggagatttcctttgtcattctgccacgcttctcaaccatacctgtgatagcgaagattacatatacgtcagcttctttaccgtttgtaatgaagatcttggaaccgttaagtacccattcgtcaccatctaatacagcctttgtctgctgtccctgagcgtctgtaccagcgccaggctcagttaaaccgaaagcaccgatcttcttgccgcttgcaaggtctggtaaatacttcttcttctgatcttctgtaccgaatgtaagaataggatcacagcacagagatgtatgtgcagatacgataactgctgtagtaccgcataccttagctaattcttctacgcacatagcatatgttaaaatatcgcagccctgtccgccgtattcctttggtacaggaatacccatgaagcctgcttttgccattttctctacagtctctctagggaaaacttctgtctcatccacttcaattgcaagaggcttaacctctttttcagcgaactctctgaacagagctctcgccatctcatgctctttacttaatgtaaaatccatgttaaaaatcctccattatctataatctcataaatccgaccaagggagctgtcctaccagctccctccgccggtcttatattaactcttatttactgtaatcgtagaagccaacgcctgtcttcttaccaagcttacctgcacgaaccatctttctaagaagtggtgaaggagcatacttggaatcgcctgtctcagcatagattacttccatgatagcaagtacgatatcaagtccgatgtaatcgccaagtgctaaaggtcccataggatgatttgcaccgagctgcatagcaacatcaatatccttaacgcttgcaacacctgctgcatatacgttgattgcttcattgatcatagggatcaggattctgtttactacgaaacctgctgcctcgttaacctctacaggtgtcttaccgatctctgtggcgattgccttgatcttctcaactaattccttaggtgtattagcacctgcgataacttctactaacttcattctgtcagcagggttaaagaaatgcatacctactaaaggacggtcaagacctgcacccatctctgtgatagacagagaagatgtatttgtagcgaagatacaatcaggttttacaatgtcctgtaattccttgaatgttgtcttcttgatttccattttctcaggagcaacttcgattaccatatcacaatctgtacagatatcctttaagccagttgtgatcttggcagcgattgcgtctgccttttcctgtgtgatcttttccttgcctacgaggaagttaagattctttaagatcttagccttaccgccatcagcaaattcctgcttaatatcacataagcatacttcatagccatcggtcattgcaaaagcctgtgcaataccggagcccattgtaccagcaccaataatacctactttcattgaaagttcctccttgtattatgaatcatatattttaatttagttgaattagcaattcttgaatggctcttttaccttttccttattcttgtcaaggaagaaagccataccatacttctgatcttctgtctcgaagcagtcaccgaagagcttctcttcgattacgattgcttcatccatatctgcgtctaagccttcgttaatagccttcttgcagttacggacagcgataggagcattctttgcaatagtagctgccatcttctctgctgcaggcattaactcttctgcaggatatacagcatttacaagaccgattctgtatgcttcgtctgccttgatatttcttgctgtgtagatcatctgcttagccataccagcacctacgagacgggcaagtctctgtgttccaccaaatccaggtgtgataccaagacctacttcaggctgaccaaatactgcattctcagaacagattctgatgtcacagctcatggaaatctcacatccgccgccaagtgcaaagccgttaactgctgcgataacagggatagggaatgtttccagcttgcggaacacatcgttacccttcttaccgaaagcttcgccttcagccttggttaatgtgctcatttctccgatatctgcacctgcaacgaatgacttagcacctgctcctgtgaggataaggcatcttacttcgtcaaggtttacagcatccagagttgcgtttaattcatcaagtacctgagaatttaatgcattcaaagccttttcgcggctgatggtgatcttaccaactgcgccgttctgctcatatactatatattccatgttcgaatctccttaatattagtctctctcaacgattgtggagcagcccataccgccaccgatacaaagtgttgcaagacccttcttagcatctctcttctgcatctcatgaagcagtgtaacaaggatacggcatccggaagctccaacagggtgtccaagtgcgatagcaccaccgtttacattcaatacatcattggagaatttcagatcagcctgtactgctaatgactgtgctgcgaatgcttcgttagcttcgatcaggtcgaaatcattgatatccataccagtcttggcaagaaccttctttgtagaagctacaggaccaacacccatgatagaaggatctacaccgccannnnnnnnnncaagagcaccagctacccatgtagccataggcttaacacctaattccttagctttctcttcgctcataacaacgattgctgctgcaccgtcattgatacctgatgagttagctgctgttacgattccgtctggcttgaatgcaggacgtaacttagcgataccttcctttgttgtgccaggacgaggaccttcatctgtatctacaatgattgtttctttcttcttcttaacttctacaggaacgatttcatccttgaacttgccttcagccatagccttctcgcatttctgctgtgaccatgctgcgaactcgtcaagctgttctcttgtaagaccatacttctctgctacgttctctgctgtgatacccatatgatagttgttgaatgcatcccataatgcatcgtttaccatggtatctactaatgtagcattgttcattctatatccataacgtccctgcatagcagcgtaaggagccatagacatgttctccataccacctgcaacaacgatatcagcatctcctgccttgatcatctgtgcagccatgtttacacagttcagaccagaaccacatacaacgtttactgtaactgctggtgtttcgataggaagtccagcctttaaagctgcctgacgtgctacgttctgtcctaaaccagcctggataacacatcccatatatacatgatcaacctgctcaggagctacgcctgctcttttaagagcttccttaataacgatagaaccaagtactggtgctggagttgtgcttaatgcaccgcccattgtaccgattgctgtacgacatgcgcctgctaatacgattttctttgacattgccaattcctccatttgttttaaaagagtttctgtttttcgcttgattgttatttttatcacaatcattgttattattttatcacattgttaaaaaaaaagcaatctatttatccctgatattcgatattttattaacaaatttttatcatattttttgtggattattcagggtgctctgaaatgctgttactcatgcttttttcataggcttctacctcaggatcgcgcattttgtactgtcttttccattcctttgtcgcatcatcacgcacgactttacttctgtgtgcgtgcaaaaaacgtgcaagctggtagaaatctatccatatctcattatcgcactctttctgcgactcatcaaaaataagctgtaagcctgcgtgcagatgtactgtcttgatattattcacattctccgtatcactgtaaccggtatgccccatatatccgatcacatcacctgctgccactacatctccttcctccagaccttctgcataaggtctgttctgacgcagatgggcataatagtaatatcttttcttatcaaaactgcgtataccaatacgccagccgccataccggttccatccaagtgcctctacataacctgactcggttgctatgatcggcgttcccacaagccccatcatatcatgtcccagatgcggtctgcgatatccgaagcttctggctgcgccaaaatcatcataatcctgataatcaaagcccgccgctatgggagaataggccttgagaccatattgacgattccattttacgacaccttctttagtctcttcctctatttcatattcccccagcatgccactcaa

SEQ ID NO: 507 - DNA, 20619 bp, unidentified
  source 1..20619: mol_type = unassigned DNA
ttattcccccgcgtgcgcagccagatagtcggccagatcgctgacggtgacgaagttgcgcagctccttttcggggatacgcaggccgaaggtctcctcaaggtcagccacgacggtcaggatctccatcgaagacaggtcgaggtcatccatgaggacgctgttctcgttcacatcatcgggggaaatttctgcaacatcttccagaattgcaaggatctgggacacgatctcggttctttccatagtttgaatcttcctttcgtagttccattaaaggcggctgcggctcttttccagtattccgcagcctgcccggtttattcttacttgcgcagcagcttgccggtgccggtgcggggcagaggctcagtgctgaactccacggcgctcatccgcttgtagagcggcagggtgcggttggtctcggtgatgaagtcgcggacggtctgctggtcggcctcgccgcagtagatgacggcacagatcttcttgcccttctccctgacgatgcattccttgacggcctcgcacttggacagcagattttccagttcttcggggctgacgttctcaccgttgtcgaggatgatgatattcttcttgcggccggtgatgtaatagaagccgtcctcatccacacgggccaggtctccggtgtggaaccagccgtcggcgtcgagaacttctgcggtggcctcggggtccttgtaataacccagcatgacgcagccgccgcggatgcaaatttcgcccgtctcgtccagcttgtactcggcgtggtcgtcgggcttgcccacggcgcggatgtgcttttcgtcctgctcgtagttgatgatgccgtcgccgcaggtctcagtcatgccgtacacctgagtgatcatcatgccctgctgtgccagctcggccagcatggcgccgtcaaacatggcagaggagccgcaggggttccagatgccgttcaggcgggcgcggcggccccgcttgacgtctttgtagatggcctccatcagcatgggagccacagcgatggcatcgctgtgcatcaggccgaggtcgcgatagaagtcgcggatgtcggcggagaggttcagcgcccagcccttgcaggcccaaacgaagaggcagatgaacgtacccagatggaacaggggcaggatggcgaagttgctcaggacgtcgtttttgtcctcgggcatatgctcgtgcttatagtccagcatggcgtcgccgaatttgacctggcactccacagtggtaaaaaagttgcgctccgagagcatgacggccttgctgcggccggtggtgccggaagtgaacatcagcaccatcaaatcatcatggcccacgcagtcaacaagctctgcaggcgcgctgtccttgaaggcgtccatcgggcggagtttatcgccgtaggcggcctcgatgtcagggcggcagccatagtcgatgccgtcgttgacgatgagggaaggctcgacaaggcccagctcatattccagctcgggccaggtctttttctggttgatggtcacgacgacggccccggcgaggatagcgccgaagctgttgacaccgtactcatagcagttgcggctcatgatgccgacacgcttgcccttgatgtcggggatattctccttaaaataagtaacggccctgcggatgtcctgcacatactgggcgtaggtcttttccaccacagtcttgccatcagcggccacatagcggaaagccacccggtcggggtactgcttcgccatgacgtccgtgatgagctcatatacagtatttatcatttttgtcgctccttgctgtttttctttattgcagcgaaacgccggcagctgacattttctgcctcaacgtaataatacctgtttcggcagagaaatgcaactacgcggcgtgtcctttttcgctgttttattgtttacttgcgcagcagcttgcccagagcgttgcggggcaggggctcagcggtgaactccacagcactgatgcgcttatacagcggcaagctgcggttcacctcggtgacgaaggctctgacctcttcctgcttatcctcagggcagtagacgacggcacagatcttctggcccttctccttcacgatgcactcggtgacagccgggcagagggccagcttcttttccatctcttcggggctgacgttctcgccgctggcgaggatgatgaggttcttcttgcggccggtgatgtagtagtagccctcctcatccatccgggcaaggtcgccggtgtggaaccagccgtcggcgtcgatgacctctgccgtggcctcggggtccttgtagtagcccagcatgacgcagtcgcccttgatgcagatctcgccggtctcgtccagcttatactgaacgtggtcgtcgggcttgcccacggcactcatgtgcttttcggcctgcgtaaagttcaggatgccgtcaccgaaggtctcggtcatgccgtagcactggttgatgacgaagccgttctgggccagctccagcagcatcttggggtcgagggccgcagaggagcagcacaggtcccacaggccgttgaggcggctgacgcggccccgcttgaagtcgttgtaaaccgtctccaccagcatgggggccgaggccatgatgtcgctgtgcatcaggccgaggtcgcggtagaagtcgcggatgtcgctgcagagattcagtgcccagccggcaggcgggtaggacatgacgcagacgaagcaggccatgtggaagaggggcagcagggtcatgtggctcagcggcagcttctgaccctccggcaggcgggacgtgatccagttctcagcccgggcaccgtaggtgcagaggctggcgcacatattccgctccgagagcatgacgcccttgctgcggccggtggtgccggaggtgaacatcagcatcatcaggtcgtcgtggccgatgcagttggtcagctccccgggggcggtgtcccgatagcagtccatcggacggagcttcggaccataggcggcctccagctcggcacggcagccgtagtcgatgccgtcgttcaggatgagggccggttccacaagacccagctcatattccagctcctcccacatttttttctggttgagggtcacgaggacgccccctgcaaggatgatgccgaaggatgccacacagtactcgtagctgttccggctcagcagcgcaacacgctggcccttgatgccgggcacttctgccttgaggtaggcagtcatccggcggatgtcctgcgcgtactcgcggtacttcttttccacgacggtcttgccgtcggcggccacatagcggatggccacattgtcggggaattcctgctccatgcagcgggtcaccatatcatatacgcctgcagggactttgatctcttcagccattggtcttactccttttttgttcgcaagaaaaataaacagcaccatttcgttccagactctccgcatttctggcagacagaggaaatttctggttcgattcctcttggcaacagtataccgcatatgcgccgtaaacgcaagatttcattgcacaaatatgcaatttaaacttgcgctcaacttgtgcaaccggatgtaaatccttccttttgttgcgacgggacaaaagctgtgatacacttttttcgtcaggacgaaactttgcccggaagcttcgtcccctgcaaattgacagaagacccaaaaagcattatactgtttatatcatttggcaaaaaagctccccatcgggcttcatatttttatctatcgcgcccaaaacacggcctttcagggcctccgggacaggcggcgcactacaaggaggaccccctttatggaaggcaccaagccccgcaccgtaagcagccttggcatgttcgacctgctgaaaggcatcggaatgctggccatcgtctttgcccacacggcagagctttaccccctcggcaccgacgacgtcaccccctttgcctttgcactctttgcctaccgcgaagcgctgatggccgccttcttcatcgccagcggctacggcttccgcaagcgctccatccacaaatgcatcgagcagcaggtcaagaccctgctcaagccttacctttatacggcagcggccaccaccgtgctccactgcctcatccaccacgcagccttcggctcgtggcccaacgccatcacccagtcgggcaaggtgctgggcggcttcctgctggggctgccccacacggcctcttacttcgggcaggagttcttctcctgcgggccgatgtggtatctggtggccctgatgctggcgtggatccttctcgatgtccttctcgacatcttccccgagcggtacataaccccggccgtcatcggcgtcaccctgctgggctggggcatcacgctggtgtgggaggcccccttctgcatcgcgcagggcatggtatcgctgccctacctctacatcggctatctggccaagaagcgccgcctgtttgagacgcccctttccggccgggccagagccgggctgatcgcggcggcgctgggcgtcgtggcgggcgttctgctgacccagagcaccgactgcgtctcgctgggcgagtggacgatggggcctgtgagcatctttctggacggcgcagtgggctacggcatcatccggctcttcctgaaattgcagcgccgggtggacggccccatctcccacgccatcgagtgggtggggcggcgctcgctcttcatcttctgcatccacaccgtggagctgacggctatcccgtggtatctgatggcggcgaaatacgccgaccgtccggtgcaggggatgcttttgcagttcgtgttctcgctggcgtccatcttcgccatcactgagcttctgatgcggcggaaagagctgggccggaagctccggggcggcaagactgcggacaagccccggcgacgggacaagagccgccattatgcggcaaagcactaacgatacagcgctttggtatccggccctttttcagggcagactatattagttcgatgcatgggcttgcagcgagggttgtacgccttgcgataaatttgaggaggccccggtaatgatgaacgatactcctgaagcggctctgcgcagccgcattgcggatctggaacagcagctcaggcttgcggatgagggtacctcgcggctggcccagcgctgccttgagctggaaaagcagctgcagaccttctacgccacccacccccagaaagagatgcaggccgactcacctgcgctggtgcagccgctgctctacttcgatgccggcttcggcttttcccagagggacaccgtcaaagccccggactacgaatacgacgagatgaacgggatggtgacggccaccttcgagctgcccgaggccgccgtcaatctccgcttcgacccgggcgagctgccctgctgcatcaccaatttcgtcttttcggatgaccgcatcctctgccgcccggtgaacggcgtaccgctccacggcgacggcatccttttcctgaacgacgaccccaacctcatgctggaagggatgaaccgcttccccgccgggatgaagctgggcgtgagctacggctatttcccgctggaggcgctggcaggcgacccgctcttcgccgcagtgctggagggcgtgcagtatttccagaagacccgcgtctgtgagcagaagcatctggaccagctggaaaagacctcttccgaccagaagcagaccatcgacgccttgcagaagaacatctccgagctgcatcaggccaacgccgagctgaccgcccggagccgggcctacgaaaactcgctggaaaatgtcctttcgtccagcagctggaagctcacactgcccctccgccgtctggtgagcctgttccatcgtggcagctgagaggaggatcgggatgtacagccgttatacctccctgcagcgggcacagctcgccaagcaggaatatcttgatacacaggacgtctttctcgccgtctacgcaccggggcggagggcctcgctggaagcctccctgcgcgaccagctccaccgcaagttcctgctggcggaggacctttccagcgggagtctgggcagcgtccgcggcgtgctgctggcgaaagaagacctgagcctgatgcccacggccctgtcctgctttgcggatgcgctgcgcagcggcgcagactacgtcaccagtgacgccgtcttcggctatgcaggtgccaccgccctctatcacagccccagctttgcggcctgccccggctgcgccctcgtctcccgggagctgctgctgcgctgtctggccgaggcccgtgaccccgggaaccccgccgagctgctgacgctggcggcaaagctcagccggaaccacgtctgtctcccgctggcgctggcccactacgagcgggacatctgtgccgaggatgtctggtcgatgaaggggaagcgggtgttcatcatgagccacctgctggacatgaccggcgcacccatcgtgctggtcagcgctgtgccggtgctgcgcagcatgggctacgaggtggtcgtcctcggcccggaggacagcggctcgatgccgctcttcctcgaagccggggctgtcgtcatcacccggcgcggctgcgtccagtcgcccctgctgtgggggctggccctctgcgccgacttcgtcctcgccaacactgtcgtcgaggcccgggctgtccgtgccttgagcggggcacgggtgccggtgctctggtggctccacgacgctttcgcgggctacccccatatcgcccaccagatccccaaagagctgggagagaacatccgggtctattccgtcggcagccacgccgccaacgccatgcactcggtgcggccggagttcaacatccggcctctcatctacggcctgccggactatgcctccgagaaattcgcccactacgacctgagctatgcgggcggacgtccccttttcgccaccgtcggctccttcgagaaccggaagggacaggacatcttctgcaaggccatccggctgctgccgccggagacgatgaaaaaagcctccttcctctttgtgggcaaggccgccgagccggagatgatggacgccgtgcgcagcctgacggcagactgccccgacaacgtcttctacgtcaagcggttgacccgggacgagatcaagagcctgatggcccagtgcacctgcctcgtctgcgcctcccgcgacgaccccatgcccaccttcgtcaccgagggcctcatcttcggcaaacccgccatcgtgtcggagcacaccggcaccgccggactcatcaccgagggggtggacggcttcgtctacgaggacgacgaccccgaaaagctggcggagcgtctggcatgggccatcgaccacccggaaaaactggccgccatgcggcaggcctgccgcgacctgtatgaacgccactactcgaagcaggcctttgccgatggcctgaagcaggcggtccgggagcttaccggcgaatccactttatcactctgccaaaattgaggcaaaaaatttggtatatcttcacaaacgcatctccggactgtggtatactcttcccagagtttatcccagtccgtttttgttgaaaggagtttcccccatgagttcgtccgcctcccctgccccctcccgccggaagaccctgctctcgctgggcgttctggccctgctgaccggcatcgtggtgttcattttccgggagcactgggtcgagatctccgccgcactgggccagctcaccttctggcaggggtttctggcgctgaccgtgggcctgagctatccgctgctggagggcgtcgtcagctggctcatcgtccgcagccgcctgccccggttctctctgcgccacggcatcgacaacgcatggatgggcaccttcggcaatgtggtgggcctcggcgcggggtctgtccccttccagacgtggtatctccaccgccggggtctggacgtcggcccgggcgtgggcctcatgaccctgcaatatgtctttcacaaaacggccgttctgctttacaccaccctgctgcttctggcaggccgcccttggctggcggcccactcgggcggcgtgctgcggtatctgcctgcagcctacgccgtggtggcaggggtcatcgtggggctgatcgccctctgcgccctgccggtggtgcagcgtctggcccggtggctgctgcatttcctgcccgacacaggccgctgggccgagcgccgggccgactggctccggcagctggacaccctgagcaccgagagccgccatctgctggcggacaaagcccgctgcgccgccattctgggcgtccatctgctcaaactctttctgctcttctgcctgccgtggatggggctgcgctttatggggctggacgccgggctgcgcttctggcaggtgcagctcctcgccgcgctgaccctcttcgtctccaacgccctgcccaacgtggcgggcatggggtcggtggaggcggcctttctgctggtgtacggcagcttcctccccgatgctgcctccatgagcctgctgatgttctaccggctggccagctattacgccaccttcgccgccagcgccgtcggcttcggactggcgcagcggaggctgaaccgcagctgacggtgtgaaggttttatttcattttggtaacagttatcaccttgttgtacattctgcgcataaatctcttgattttttcagcgaaatgaggacggcagcacccagagcttcgagaccctgcactacgagaccactcccatctccctgaagagcgtggacgcagccgcaggcgctacccccatcgcattcgctgctcctgagcagtaaagatcatcccacaacaaagaaaacggcaggtgcgacgcacctgccgttttcttattttatcaaatatcagcccttcagggggacgaagcccacgaggtccttcacgacctcgccgccgatgatgaggcccgcgaccgacggcacaaaggcgttggagccggggacggagcggcggatggtacacttgcgctgggtgcccggagggcagatgcagtgttgcttgcagctgatggaatcgtcctcgatgggggtcatggcaggctctttggagtagacgaccttcaggtgcttgatgcgccgcttgcggcactcggtgcgcatgaccttggccagcggacagacggaggtcttgtagatgtccgtgacctcgaagcgggtggggtccatcttgttgcctgcacccatggagcagatgatgggcacaccagcctccttgcacttcatgaccagagcgagcttgccggtgacggtgtcgatggcgtccacaacgtagtcgaactgggtaaagtcgaagctgtcctgcgtctcagggccgaagaaggtcttgtaggtcgtgaccttgatgtcggggtcgatgtcgtggacccgctcttccgccacatccaccttatatttgcccacggtcttgcgggtggcgatgatctggcggttcaggttggtcagacagaccttgtcgtcgtcgatgaggtcgagggcacccacgccgctgcgggccagcgcctccacggtatagccgcccacgccgcccacgccgaacacggccacacgggagttgtgcagcttggtcattgcctccgcgcccagcagcatctgggtgcgggaatactggtcttgcatattgtttctccttacttttccactctcatgatcgtccctccgccgaggacggtatcctcctgatacagcacgacggcctgcccgggggtgggggcgcgctggggctggtcaaattccagccggaagccgtccggccccgccgggtagacggtggcgggctgctcgacctgatggtagcgggtgcgggccgtcacccgcagcggcccggtcagctccgggatggcgatccagttcacctcgtcggcgtagacgatggtatcgaacagctccgcctccgggccgacggtgacggtgttggcctgcatatccttggcgcagacgtagaccggcgcgcccatggcaaggcccagccccttccgctggccgatggtgtaccgcaccgcgccgctgtgggttcccaccttttttccgctgacgtcgaggaaatcgcccgccggatagtgtttgccggtgaagtcctccatgaagcgggcgtagtcgccatcgggcacgaagcagatgtcctgactgtcgtgcttgcgggcgttgacgaatccctgctcctcggcgatggcgcgcacctcgctcttgtgcagcccgcccagcggcagacggacgtgagccagctgcgcctgcgtgaggttgtagagcacatagctctggtccttgccctcgtccagcccctttttcagcagccagcggccggtggcctcgtcctgctccacccgggcgtagtggcccgtgaccacatagtccagcccgtgggcctcggcccagcggagcaggtggtcgaacttcatatacttgttgcagtcgatgcagggattgggcgtgccgccggcctcgtagacccggatgaacttgtcgatgatcttttcctgaaaatcggcggtgaagtccagcacctcgtaggggatgtccatcgcataggccacctcggcggcgtcctcgatgtcccgctcggagcagcaggtgtgcagcccctcggtgtccacggcctcgttgcgggtgaggcgcatggtgatgccggtgcagtcgaagccgtcccgctgcatgagccatgccgccaccgagctgtccacaccgccgctcatggcgatgagggcaccggggcggcgggaagtgttctctgtctctgtcattctgttcctctttttgttataacacactaaaacagtagatatatactaccgcagcttctttctcttgtcaagacgcagaaaatccggccgcgaaggccagaagctccgtcttctcgttgggcagacgacccgtgatgacctcctccagcagcgcttccagcacccgccgcaggcccggcccgggcgcagcgcccgcctccatcaggtcgcggccattcacggccagctgagagatgcggcagcaggccccctgcgccgtcagcgcttcggcctcggcccgcagggcatcgaacgacgctttttcttccgacgcaagggccgtccagagggccgtcagctgctgcacggtatggaggtcatattttcctagcagccgtttggcttgcaagcacagatcacacttatccagcgtgtcgggagttttctctccacactcacgcaccagaaccgccgctccgtctatcctagcgttcgagcacttcaggcgtttgagcgctttcctcgctcccgtctcacccagcggcagcagcagcgccgcccagcgggcagacacctgctccgtccccgccggaagggcatcgatccgcctccgggcttttgtcagttcctccggcggcagctcgggcaggacgaaagccagcacctccggctcaaggtatgcccccggctgtggtgcggccagaagcttgttcagttcctcctcgatgcgctctgccgatacacagtcgaggtgggaggccagctgctttgccgccgcctcggtggcttcgtcgatggcaaagccgaaccgggccgcaaagcggtagagccgcaggatgcgcagggcgtcctccccgaagcggcgcagcggctcaccgaccgcccgcaccacgccccgggcaaggtcttcccgcccgccgaaggggtcacacaagccctcctcggcgctgtaggccatcgcgttgatggtgaagtcccgccgggccagatcctcccggaggtcgggcacaaaggccacgctgtcggggtggcggccatcggaatagcggccatcggtgcgaaaggtggtgatctcatacagctttccatcccgcttgacggtgacggtgccgtgctgcaagccggtggggatgcaccggtcttctccgaacagctccatcacctgcccggggcaggcagcggtgcagagatcccagtcgtggggcgcaaggcccagcaggctgtcccggacacagccgcccacgacgtaggccccaaagcctgcccggtgcagctcatccagaagggcggcggcaccgggttccagaacgatgttcattcgccttcctcctcatactgaagcgcaatgctcttgccgtcgaagccgcactccgccgccgggaagaggctctgggcctgcgcaagctcctcctccgggtcggtgatcatgggagaatagtggacgagccagagccgttttgcaccggcctttgcagcgagggccgcgctctggccgaaggtgctgtggccgtactgcttcgcctgtgcagcctgctcgggcagggcgtaggtggcgtcgcagagcagaagatccacccccgctgcggcctgttccagtgcggcgcagggagccgtgtcccccgaaaagaggaagctcagaccctgccgggccgggccgaggaccgattccggcgctgctctgctgccgtcggccagcgcaacgctctggccctgctgaagcatcttccactgctgcaccggcacccccagcgcccgggccttctcgggcgaaaagcgcccggcccggggcagatcgaggcggtagccctgactcgtgacccggtggcgggtggggacaggtgtcagctttgccccctgcggccagccgccgaagcgctcccggagcgccgccggggcgtccagcacctcggggcagaccggatagggcagcggcccggtcagcgcccgcagcgcggcccagacctcgccgaggcctttcgggccgtacagcgccagcgggcgggtacgaccctgacagcccagcgtctgcagaagccccggcaggccgaagatgtggtcgccgtggtagtgggtcaggcagatggcgtccagcttcatcaggttgacccccgcccggcgggcggcggtctgggtgccctcgccgcagtcgagcaaaaggctgtgccccccgcattcggccgccgccgccgtaagtgcgcggtcgggcaggggcatggtggccgccgtgcccagcagtgtaatggtcagcataagtctctccgtatcacaaaaatcttgatggctatagtgtaccacactcttcgtcccggcacaatcgcacaccgccgctccagcgggcataggatgggccaaacgagaaagggaggggtcttgtatgcggcgtcagcggcccgggcatcgtgttctatcgttccaccatcgggggcttctgctccttctggcagcagccgcggcggccctctttctgttctacagctgctctcccggagtggtgtacagccccccggggcggctggtgttcatccccctcgcgcaggtttcaggtagtagtacgacttcgctttccgcctctcaaaattttttcagaaaaggtattgacttcactttcgtgaggtgataaaatcccaccaaaccagtgagaaagcataagtaccaccgcaaaactcaccagtacagagagcaccggggcagctgagaccgggcagtgtgggcgcggatgagaatgggcttttgagggcaaaccgaaccgcatttttatgcgcagtaggggcgacggagagcgtctccgtgaacaaagccggtatgtgttggcatatcacgagtgggcagggtcattcctgtcaagattgggtggcaccgcaggagtattttatccgctcttgtcccaattcacgcaatgtgttttgggacaggagcggtttttatttttccctcttgtcccgcaagcaagggccggcatatgcatccggcccggaaaggacaagccttatgaagaccgaagcgaacatcccgtacaagttttatctggaagaatcggagctgcccaccgcatggtacaatgtgcgggccgatatgaaaaacaagcccgctcccctgctgaaccccggcaccctcaagcccatgacggccaaggagctggacggcgttttctgcgatgagctggtacagcaggaactggacgacaccacggcctacatccccatcccggacgagatccgggaatactaccggatgtaccgtccgagtcctctgtgccgcgcctaccgactggaagaggccctcggcaccccggcgaagatctactataaattcgaaggcaacaacaccagcggcagccacaagctgaacagcgccatcgcgcaggcttactacgccaagaaacagggcctcaagggcgtgaccaccgaaacgggcgcgggccagtggggtaccgccctctccatggcctgcagctacttcgggctggactgcaaggtctacatggtcaaggtgagctatgagcagaaacccttccgccgcgaggtcatgcgcacctacggcgcatcggtcactcccagccccagcatgaccaccaatgtgggccgcaagatccttgccgagcaccccgacaccaccggcagtctcggctgtgccatcagcgaggccgtggaagtcgccacctccacccccggctaccgctatgtgctgggcagtgtactgaatcaggtactgctccaccagagcgtcatcggcctcgagaccaagaccgccctcgacaagctgggcgtcaagcctgacatcatcatcggctgcgccggcggcggcagcaacctcggcggcctcatcagccctttcatgggcgagaatctgcggggcgaggccgactaccgcttcatcgccgtcgagccggccagctgtcccagcttcacccgcggcaaatttgtctacgacttctgcgataccggcatggtctgcccgctggccaagatgtacaccctcggctccggcttcatccccagccccaaccacgcgggcggcctgcgctaccacggcatgagcagcatcctcagccagctctaccacgacggcctgatggaggccaccagcgtggagcagaccagcgtctttgaggcagcagagcagtttgcccgcatcgagggcatcctgcccgccccggagagcagccacgccatccgcgtcgccatcgacgaagctctcaagttcaaggagacgggcgaggcaaaaactatcgtcttcggcctcaccggcaccggctacttcgacatggtggcctacgagaagttccacgacggcaagatgaccgactgcatccccaccgacgccgacctgcagaagggctttgacggcatcccccacttccccggcaacgaataatccctgaaacatcctctcccctcacacccccgcgcggcgcaagctgtgcgggggtggttttatataaaacggaatgactgcctgcacactgagccagacggtcattccgcaaacagcaggccagccgccctgcaagacacaggacggctggctgcttttattatgcaattcaggagaatggaggagaaaatagcgttttcagggtgcttgcttccgggggacggaagaaacgccggagttattcgccgcggacggctgcgaagcctgcctcgaggtcagcgatgatgtcgtcgatatgctcggtgccgatggacaggcggatggtgttctggtagatctgctgctcggccagctccgcatcggtcagctggctgtgggtggtggaggccgggtggatgacgaggctcttgacgtccgccacgtttgccagcagggagaagatcttcaggttgtcgatgaacttgaaggcttcctcacggccgcccttgatattgaaggtgaagatggaagcgccgccgttggggaagtacttctcatacagggcgtggtcggggtgatccggcagcgaggggtggttgaccttctcgacctgcggatggttggcaaggaattccacgaccttcttggtgttctccacatggcgctcaatgcgcaggctcagggtctcggtgccctgcagcagcaggaaggcgttgaagggagagatggtagcgccggtatcacgcagcaggatggcgcggatgtaggtaacaaaggcggcagggccggcggcgtccgcgaaggacacgccgtggtagctggggttgggggcagcgatgttgccgtacttgccgctggccttccagtcaaacttgccgctgtccacgatgatgccgcccagcgtggtgccgtggccgccgatgaacttggtggccgagtggacgacgatgtccgcgccgtgctcgatgggacggatgaggtacggggtgccgaaggtgttatcaatgaccagcggcaggccgtgcttgtgggcgatggccgcgatggcgtcgatgtcggggatgtcactgttggggttgcccagagtctcgaggtagacagccttggtgttgggctggatcgcgttctcgacctctttcaggtcatgtgcatccacgaaggtggtggtgacgccgaactgggtcagggtgtgctccagcaggttgtagctgccgccgtagatggtcttctgggccacgatgtggtcgccggcctgcgccagcgcctcgatggtgtaggtgatggccgccgcgccggaagcggtggccagagcagcgacgccgccctcgagcgccgcgatgcgcttctcgaacacgtcctgcgtggagttggtcagacggccatagatgtttccagcatcggccagaccgaagcggtcagcggcgtgctggctgttgcggaagacgtaggaggtggtctggtagatggggacggcgcgggaatcggtggcggggtcggcctgctcctgaccaacatggagctgcagagtctcaaacttataatcagacatagtattttccctctctatttgtacttaaagtattatttttactcataaaaatacccggcagcgtaggagttctcacctttcgtctgccgggcaaagaaatcgttctccactcagaaccttttgtctgtcttgggcgtcacattcgctcgcgcattcgcggcatagagggcaccgtacagctttggctcagagtttctttctcagcccgggcgctgtacattcgcccacagcggaagttggcgtgcagaagatttttccaaatcagcgtcatttgagtaccctcctttctgaatcccattcaacctacaaggcgtgtagtcttgttgtttgcattatatcttcctatacccacattgtcaataggttttatccgatttcctttcaaaaagttttaaaaagtcattctttttcgaaaaatgcaaaaagattgcattttggtcttgcatttcacccagaatgcgtgtatactcttccctgcgcctaaaatgcaatcaggttgcaatttaggcaactgaagcaaatttttggcggaacacaccttccctatactttatcatcaatcacgaggtatcacgatggaactttttctggatgtactggccgagtctctggtggacaccgccaagatgctccccttcctgtttttagcctatctctttattgaatatgtggagacccgccacggcgagcgcatcgaggccctgctggccggcggcggacgctggggcgctgtcccgggggccgttctgggctgcgtgccccagtgcggcttctcggccatcgcatccaacttctacgcctcccgcgtcatcacgctgggcacgctgatggccgtctatcttgctaccagcgacgaggccatccccctgctggtgtccatgcccgcctactgggacaagctggctctgctgatggtcattaaggtcgtctacgccatctttgtgggctttatgctggacttcgtcctccgcaaggccctgccccgcagcctgcggggcggctacaccggccacgccgatgaggtggactgccacgaggagcacagcgatgagcagggccagccccagcccatctggaaggccgcactccgccacaccctcgagatcttcgtctttatcttcgcgttcagccttgtgttcggcctcatcgtcgagggcgtgggcgaggacgtctttgccgccgtgctgggccggatgggcttcttccagccggtgatggccgcgctggtgggtctcgtgcccaactgcgccgccagtgtcctcctgacccagctctatgtcgagggtgcactccgcttctcgagcctcgtggccggtctgtgcaccggcgcaggcgtgggcctcgctgtgctgtggcgggcgaacccctcgtggaagcagaacctcttcatcaccggtctgacgtgggcctgcggcgcagctgtgggcgtgggcatccagatcgtggtcgcgtttatcgtctgagctttctatttttcagcatccgcatttcttctctgaacgggggagtgcggatgttttcttttatcgtgaaaaaaagcctttctcttcacagccttaccctctctgtctttgcttcgcattgccacagcccgggttgcggcacccagcatccgcttcgtgctctgaaaggcacttgcgtcttgctggccgcggccccaacagctctttcctgtttccgccactggcggcggtcagagctgttgctcccaaagggagaggcttttaacggcatattcttgagacaaatcccccattttgtgatatactcagctcatacagaagtatagtaaggagaacaccatgcaatataagatcctcgcaagcgattatgacaacaccctcgtccccttcggtgagagccagccccgcccggcggtagtcaaggccgtgaagaagcttcaggcctccgggggaaagttcgtgctgagcaccggccgggcgtggtctgccatcaaccggaaaggccagctgggcggcatccggttcgactacgccatcacctgcaacggtgcctgtgtcgtggaccgaaacggcaccatcgtcgccgagcatcccatgaccaacgaggagatgtacgcgctggtggatttctgcgaggattacaactacccgctgcaattcaatttccgggacgcatactatgcttactgcgagtatgagacgctccgcagctgctacacccagatgaacagcgtcgggctggactgtgtggacggcgaagaccaggaccgccacctcatcgatatgccccacgcggcgttctgcctcttccccgagggggcgctggagcggttccacgaaaagtacggccacctcggccttcacttcatgcagacgggcgggcagctgcccgacggctcccacttctatgacatcgtgcggggcgggatcgacaagggcgcgggcctcgcagacctctgcgagaagatgggcctctccctcgccgaggccgtggcggcgggcgactccgccaatgacgtggagatgctgaaagccgccggcctcggctgctgtatgtccaacggcaccgacgacgccaaagccgccgccgaccgcatcatcggcgacgtgcgggaggacggtctttctgccctcatcgaagagctgtggttcgacggcccgagggcagagccgtcccgccgcgacctcggctctgcgtgggagacgatggaacgatgagcttcgcaccggtctattccgagagcagccgcgccctcatcctcggcacatggcccagccccaaaagccgggagatggccttctattacggccacccacagaaccgcttctggcccatgatggccgccctcaccggcgagcctgtccccgcccgggaggacatcgaggccaaaaagggcctcatcctccgccacggcctcgccctctgggacacgctggaaagctgcaccatcaccggcgcgtcggacgcctccatccgggatgtcgtgcccaacgacattgcctctctcttagccaaagcgcccatcgaggcggtgttctgcaacggggccacggcccaccgcatctatacaaagtatctgctgccggtgtccggcatcccggcagtcaagctgcccagcaccagccccgccaacgccgcctgccgccccgaaaagctgcgggaggtctggggcgcggccctcaaagattatataaccgtttcgaacctgtaaattattcatgaaacgcttgcgttttatggagaaaaggatttattatggaagagtacaaggggcagccggccccttcgggaaaggagaacccccatgagcaaagtgatccgcaccacaaaacccagcgtcctgccgtggtatgcggcggcgctggtgttcgcggtgctgtgtgccgtgctgccggtctataagctgtgggcactgctggtggcgctgggctgcgctggcgcggcctttggtgcggctcagaaaatctgcccgccccgggtggtggagcacgaagtgcccttccacaccggcagcggcgatgtggacgagatgctggccgacatccagcagaagctggacgccctccacgcactgaacgaggctctgcccgacccggagctttccgccgccatgacccggatggaaaaagcgggccgctccatcgtggagacggtggaggccagccccgccaaggccaagcaggtgcgtcgctttgcgaactactacctgcccgacgcggtgaacatcctcgagcagtacgccagactcgcccgtcagggcgtgcggggcgaaaacgccgccgccatccggtcggaggtggagcacaacgcggcctccatcgccaccgcattcgagaaccagctggatgcgctgtatgccgccgagagcatggatctctcggcagacctgacagtattgcagaatatgcttaaaggacaagggctgagttga

SEQ ID NO: 508 - DNA, 6246 bp, unidentified
  source 1..6246: mol_type = unassigned DNA
atgaatatgacaacaaatgtaattaacaagggttggttcaatcccatatccctttccgtattgctgatactagttatcgtatcagccgttttgtatgtttcgaagattataaacataccgatattcatcctcttgcttcttctttccgggttggtgacttctgcaatccgcatagccgaccaatgggaacgagcggtagtccttcgtatggggaaatacaacggtttgaaaggtcccggcccctttatgattatcccggttatagacagtgtatcgacttatattgaccagcgtgtacgggtaagtgcatttaaggccgaacaaactctaaccaaagatacggttccggtaaatgtggatgcagtcgtatattggaccgtctgggacgtggaaaaagctgcattggaagtacaggagtaccaaaaagcgatcgaacatatcacacagactggtctaagagataccatcggtaagcacgaactgtcggatctcttgcaggaacgcgataagatagctgaggatttgcaacaggtcttagacagaaatacgaatccgtggggcatcacatgccagactgtcggtatcaaagatatcgccattccgcaagacctggccgaagcaatgagcaaagaggcccaggccgaacgtgaaagaagagctcgcgtcatcttgggaacagcagaaacggaaatcgcagaaaagttcgaacaagccagtaagaaatataccgacaatcctgtggcattgcatcttagagggatgaatatgctgttcgaaggcttaaaagaaaaaggatcgatggttatcgtaccgagttcggcactcgacaccatgaacttaggggctatgggaggcttggtttcattggctaagaacaacgagacaccgaaataaactattttctaacaacaaaaaatcaccatttatggaaatacacaaacaagggattacttttgtactccttctattaatctttacaaattgttcacgaaaaccatcgctgcaatggattcccttcagttgggaaggtgatacaatttcggggatatacattgaaaaagcttttctaaatgttccggtaaaaatagagaatttaccctacgaattcacaatgcagtttgatttaggagcatataattctgtcttttacgggaatacttttgctccttatctcaaagaagccccatctttaatgaacaaaaaagattcaaccgggatgtataagaatgtcaacctgcaaatagggacagtggagtttagcaatgccaatatcggattcatgcagaatttcggaaataaaatccctaaagattcacttcattcaaatacccccaagcatattggaacgatcgcatccgacatggtgcaagataaagtcttaatcattgattacaaatcaaacaggcttgtaatcacagactttttaccggctgaatacgaaaatctgctggctgaagaatttgaatcagaatatggggaaataaaattgcctttacggattaatggaaaaacatgtaaagtattgttcgatacaggttcaagccctttccagttaataacgacacaagaaagagcttggagcgtatcagaccttactattgtcgactctctaagcggtcctttatggtggggacaagaaataacattttatggctttaatgtaaccaaaccgatcgagttcggcggaaaagccttgaacaattcgaaagtctactacgccaaagacggcctttgggatagtatttatagtaccctcgatgtctggggaataaccggaaatgcttatttctttgaaaacaccgtgattatcgattacaaaaacaaactattcaggataaaataaaaattcgaacccatacttcttcattcagatgcaagcgtaagttgttttctacattgccgtatatattcccgacaacgtcaaatatattctcgacaacgtcgaaaacaacttacacttgcatcaaaacaaaaacacattgccatcttacatcaaacctttgccagagcttggtctaggtcatcaatgatatcatcgatatattcagtacctatactcaggcgcacaatggaaggcgtgatatgctgtccggccaactcttccggagtcatttgagaatgggtagtcgtatacggatggatcaccaggctcttcacatcagccacattggcaagaagggagaatatttccagcgaatcgataaacttccaggccgcttcctgcccgccttcgatctcgaaagtgaaaatacttccggcacctttcgggaaatactttttataaagttcatggtctggatggtctggaagagccggatggttcactttggttactttcgggtgtttggataaatactcgacgactttcagagcattggcaacatgacgctccacgcggagagacaatgtttccagaccttgcagcaggataaaagcattgaaaggcgagatcgtagctcctgtatcacgcagaatgacagcccggatacgagtgacgaaagctgtcggacccgccacatcggcaaagaccgccccatgataacttgggtccggtttgcccaaggtcgggaacttatcggcatttgctttccaatcgaaattgccactgtccacaatcactcctcccaagctcgatccatgtccgccgataaatttggtggcggaatgaacaacaatatcggccccgtgctcgatcggacggatcaggtacggtgtaccgaacgtattatccactatcaacggaatattatgacgatgggccacctccgccacagcatcgatattgataacatcagaattaggattaccgaacgtttcgacatacaccgctttcgtattctcccggatagcaacctccaacgcctgcaagtcattgacatttacaatcgtgtgggtaataccctgagccgctaacgtatgcgtaatcagattgaaggaaccgccatagagattgtcggcagccacaatatgatcgcccactccaagtatattctgcaaggcatacgtcacggccgccgccccggaagccaccgccagaccagccactcccccttcgagagcggcaacacgcgcttcgaaaactccctgtgtcgaattggtcagacgaccataaatattcccggcatcacgaaggccgaaacggtctgccgcatgttgtgaatcatgaaatacataagatgttgtctgataaatagggacggcacgagcatctgttgcgggatcggcctgttcttgccctacatgaatctgtaatgtctcgaaatgtaatttctttgttgccatagtcgtattattttaaattgttcttcttgctcattttccagcaaaactatagcagacagagatatcagacaagatatatggaaaatacagaaaataacgctatttttacggtcgtcaacagaacgcataaactgtatcaggatcgaaaaaaggattctgatagaattttattcttatgaacacacttgagaaattagacaaagtagacttgcagatcctccgtaccctgcaatcgaatgcccggctcaccacaaaagagctcgccgcgagtgtcagcctctcgtcgacacccgtattcgaacgcctgaaacgcctcgaaaacggaggatatataaagaagtacattgccgtgctggacgccgaaaagctaaaccagggcttcgtggtcttttgcagtgtcaagttgaggagactgaacaaagagattgcggcggagttcacaagaatcatacaggaaattccgcaagtcacagaatgctacaatatatcgggaagttacgactacctgctgaagatccatgcaccgaatatgaagtattaccaggagtttatcttgaacgtgttaggcacgatcgacagcctcggatcgctcgaaagcacctttgtgatgaacgaggtaaagcatgaatacggaatccatatttaaacgccaccccgtccctatcttacatttattacttcagtgcataaatccgctggatgatgtccacaaccttcatgccttccagtacgttggtcgtaatgcattccgaacttgcaccggaaaggacacggaccacattgcggatcacgaaattatggttctgggcggaacctttataagggccgtagtcatttcccggattcgtcggcgccagttccggcatttcataatctttaatatgacagtattcgacttcgttcatatactgtccgccgattttcacgcttccgttctccgcaacaatcagcatactgctttccatgttcctgttccagacagaagtggaatagctcaggctccccatcccgccgttcacgaagttgaaattcacaaagcccgaatcttcaaaagccgtaagtccggcatggttgaaatcggcaaagcgagcctggatattgcagatatccccgaaaagccagtacataatgtcgatgaaatgggagaactgggtaaaaagcgtccctccgtccaaaacggcatcgccatgccagccaccgggtttataatagcgctcgtcacggttccaataacaattcaactggaccatatagatcttgcctaacctacccgaatccaccatctccttgatccagacggaaggaggagaataacggttttgcatgacgcagaacacctgtttacggtatttcagcgaagcatagaccaccttctcggcatcggcaagcgtcagtgccatcggcttctcgatcacgacgttgcaaccggtttcgacagcctgaatggccattgctgcatgcaagccgttcggggtacaaacatttacgacatctatggaaattccgctctgcaatagctccgtcagggaagagaaaaacgggacatcgtatgcctcaatacccaattcctcacgaggacgaatatcacaaagggccaccaattcggctcccggatcgcgtgtcaccatctcggcatgacgtttgccgatatggccacaaccgataactgcaaattttatctttttatccataagcattcgatgggggtgtgtcaaaatctccttgtccccgcgcttgacgcggagccgcaaaaggacagaccttatcaatcagatttttatagggtcggttttaatgctatcccgcgtcaagtgcgggaacaggatagtttcgacacacccccttttttagagtttctgttatatattgctgttgtccgagggacatttccgtatgaataggcagggaaaggacggattcgcacaaacgggtggagacgtccaaattaccagatacacgggagatatgccggtaagcttcctgatgatgcactggtacaggataatagatcatggaagggattccctgttctttcaacaggcattgaaggacattccgcctgccatcttttacctggaccgtatattggtgatagacatgagtcgaaaatatcgatctcgcagggagaaccaacgaatcgcaggaggacaaagcttcatcgtaccgagaggcaacttgccgacgggtttccgtgaactcctccagatgcttcaacttcacatccagcacagcagcttgcaacgtgtccagacgggagttgcatccgatccgcctatggtggtatttgcattcctggccatgattggcaatcatgcggatacgggtagccaacgcctcgtcggaagtcatcaacgcccccccatcgccatagcaggctaacggcttggatggaaaaaaagatgtcgtcccgatatgtccgatcgtcccggcctttcgtacccgcccgtcggaaaagatataatcggcaccaacggattgggcgttatcttccactacatacagatgatagacatctgccaaagtcataatcggctccatatcgcaggcttgtccgaacaggtggacggccacgaccgcctttgtccgttccgaaacagccgcttctattttccggggatcgatattaaaggtacagggatcgacatccaccaacacgggcgtcaatcctaacaaagcgacaacctcggctgccgctatataagtaaatgccggtagaatcacctcatcgccaggctgaagctccaatgccatcagagcaatctgcaaagcgtccgtcccgttagcacaaggaatcacgtatggaacctgaagataatcagccaaatgcccggcaaaggttttcacctgcggaccattgataaaagcacaactgtcgatcaccacctgcatggcctcatcaatctcctctttgaaccggagatattgtccatgcaagtcgaccatctgtatctgttcttccaacat

SEQ ID NO: 509 - DNA, 9377 bp, unidentified
  source 1..9377: mol_type = unassigned DNA
ctatttcaacagtgccgacgaaatcaccatccgctgtacttcggaagtaccttcgtaaatctcggtgatcttggcatcgcgcatcatgcgctcaacggggtattcgcgcgtgtagccgtatccgccgtggaattgcacggccttggtcgtcacttccattgcggtttccgctgcaaagagcttggcccgggcggcatcgaccgagaacgggagcttctggtctttcttgaaggctgcggcacgtaccagcaggcgggcagcttcgattttggtatccaggtctgccagttggaactgggtgttctggaactgtccgatcgtccgtccgaactgtttgcgctccttgacgtatttcacggtttcgtccatcgccccctgtgcgatgccgagggcttgcgaagcgataccgacacggccgccatcgagggtcttcatagcgatgttgaagcccttgccgaccttgccgagcagattctccttgggaacgatgcagttctcgaaaatcaactcgcaggtcgccgaaccgcggatacccatcttcttctctttcttgccgatcgagaaaccggggaagtcgcgctcgacgatgaatgctgagataccgcgcgtaccctgcgacttgtcggtcatcgccatcacgatataaacgtgtgcgtaagcggcgttggtgatgaagattttgttgccgttcaggatatagtggtcgcctgcatcgactgccgtggtctgctgtgctgcagcatccgtaccggcgttgggctccgtaaggccgaaagcgccgagccattcgcccgagcagagcttgggcaggtatttcattttctgttcttcggtaccgtgctcataaatcggagcggcgcagagcgacgtgtgtgccgatacgaccacgcccgtagtggcgcatacgcgcgacagctcttcgacggccatcgaataaaggatgttgttgccgcctgcaccgccgtagttgacggggaagggaataccgaagattcccagttttgccattttctctacggtttccacagggaaacgctcctcttcgtcgatttcggcagccagaggtttcacctcgttttcggcaaattcgcggatcatttgccggaacagctgctcggttttggtcaattcgaaattcattttataagtatggttttttaatgattttaaacagtcataccgccatctacgctcaaaacggcaccattgacgtaggccgcttcgtcggatgcgaggtagagataggcggcggcgatctcctcgggacgacccaggcgacctacgggaactttggcccgcatgccgtcgagtacattctcaggcatcttggcaaccatttcggtttcgatgaagcccggggctacggcattgaccgtgatacccttacgtcccagttcgcgggccatcgttttggtcataccgatcaggccggctttcgtggccacgtagttggtctggccgaagttgccgtaaagccctactaccgacgaggcattgacgatgcgtccgtagccggcttcgagcatgtagttcaacacggccttgcagcagtagaacgtgcccgaaagattgacgtcgatcacgttctgccactgttcgacggtcattttcttgagcgtgctgtcgttggtgatgccggcattgttgatcaggatgtcgatcttgccgaacttgtcggcgacgcgcttggccgcagcggttaccgcctcgaaatcgctcgtatcgaccttgtcgaaggtgatggcgagcccttcggctgcggcttttttctccatttccttaccgcgggcttcgttacgtgcccatacgactacctgtgcgccttcgcgtgcgaaacgcagtgccgttgcttcgccgataccggccgtgccgcccgtgacgatggcgactctgttctcaagtcttttcatggttatctctttttagatgaattctttgttgtgtttgagtttggcggtgcccgtgatgcactctttgccggcagcatcgagcagcaggcatttgatcgtaccgatgtgtttttcggtgtttacgtcgattacttcgaattcggccgtatatttctccccggcgaagacgggtgcacggaacgacatctcctgcgagagatagatggtgccctgtcccgggaagagcattccgaagaccttcgagaatacggaggccgaaaggaatccgtgcacgatgggacggccgaacggggttttggctgcgaattccggatcgaggtggatcgggtttttgtcgcccgtgatttcggcgaaagcgatcacgccttcctgcgtataggtcacttcgtgacggtatttatctcctgttttgatcatggcgggcctattttttcatgggtttaagatccttggacacgatcaggtgcgcttcggtagcggcctgaacctgttcgacggtgaattcgggattgatttccgtcagcacgatgccttccggggtaatctccatgacgcccatttcggttacgatcatgttcacggagcctttggccgtcagcggcagcgtacatttcttgaggattttgggtgcgcctttggccgtgtgttccatggccaggatcaccttgtcggcacccgtgagcaggtccatcgcaccgcccatgccgggggctttcttgcccgggatgatccagttggccaggtcgcctttttcatcgacctgcaaggctcccagtaccgaagcgttcacatgaccgccgcggatgatgccgaacgaggtggcgctgtcgaagcacgaggcgccctcgagggccgtgacgaatccgccgccggcattgataaattcggggtcttcctcgcccggtgcgggggtcgggcccataccgagcaggccgttttcgctctgcaggaagatttgaacgccttccggcaggtaatcggggacggccgtcggcagtccgataccgaggttcaccacgtcgccgtctttgagttccatcgccacgcgtttggcgatgatttctctgatctgttccttttccatagatttatgtcgtttttgtctgttcgtcgtactgtcttgaaacggggcggttctggaatccgggaccgtttcctatttgcggtgcattctgcgggccatctcctgggcgatgaacgacgccacgtcgtcggcgtaggtgttcatgccgaagccggcgtcatagcccagctctttggccagttcgtgcgagatgcgcgggccgccgcacgccagaatcactttgtcgcgcagcccttcggcttcgagcatttcgaccagctccgtgaggttcttgatatgaatgtccttctgggtcaccgtctgcgaaaccagcagggcgtcggccttgagttcgatcgctttggcgatgaactcttcgttggttacctggctgcccatgttgagggcttcgaacatctcgtagcgctccagtccgtagtgacctgcgaagcctttcatgttcataatggcgtcgatacctaccgtatgggcgtccgtgccggtgctggcgccgatcaccacgatcgggcggccgatctgctcgcggatgaagctgtccgtttcggccatgtcccatttggtcgattcgactttcgggacatggatattcgaataatcgaccgtatgggtacagcttccgtagcagttgaagaacgtgtaaccggccgtcagctcccggtggaataccacctgcgggttctcgaagcccatctttttcatcaactgtttggccgcttcgatggcttcgtcgccggcgggcacgggcagtgtgaaactcaactgcgttttgccgtcgttcatcgtgtcgccgtagggctttatctttttcaggtcgagggtctggtcgaaatccctgccttcggttgaatataatcctccactcatagaatcaatatgctaatatagttaaaataaggcgtttggtcgtgcttgcagcatcggaatatcattttttcgctgcggcgcgactgccgtttttcataatctccacgaaggggttgtagtagttgcggcccttgctgctcacgccctccagacccttgccgccgttcatggggcgtttgatgtcggcgaagattcccttctcgagcgccgagaagagtccctctttttcgaggcgttcgagaagtgcggtagctttgtccaaaacctccttggcacgtttgcggatcagtccgccttccttgaactccacttcgtcgccgatgttcttcatgttgttgaagatgtagcgggcgttctcgatggaaaggtagcggtccgacatgaacggggtgtggatggcttcggtcggcatacctaacaactggatgccctgcgaagtccagatgcccaccatgttgaacagtgcgtcctggatatgtccccggaagatgttgccggtcatgaacttcgtcggcggcatgtatttcagcggagccttggggaagatctcgcgggtcatctgcgcctgcgccagctcgtagaggaagccgttttcgagcatcggatccatctcgaaggcgtgtcccagacccatttgctcctcgggcaggccggccagcagggccagttgttcgttgatcaggtcggaagccagcaccgtgtgggcttcctcgaccgcgtcggccgtggtgaggtagttgtcctcgcccgtgttgatgattacgccggcgaagccgttgattacgcgcgacatatattgatcgaccagcgtgcgctgcatgttgatgtcgcggaacagaatgccgtacagggcgtcgttgagcatcacatccagaccttcgagtgcacccattacggcgatctcgggcatgcagagtcccgagcagtagttgcaaaggcggatgtagcggccgacctcttcgcctacttcgtccagagccttgcgcatgatccggaagttctcctgcgtggcgaacgtgccgccgaatccctcggtcgtcgcgccgtagggcacgtagtcgagcagactttggcccgtagtgcggattacggcgatgatgtcggcgccctgtcgggctgcggcctgcgcctgtacgacatcttcgtagatgttacccgtcgctacgattacgtagaggtaggggcgcggcccttcgccgatggtggcgatgtagttttctcgacgctggcggttggctgcgattttggcgatgctggcgtcgatatacggtttcagcgccgcttcgcgctcggctgccgtacatacggccgagcgggtgatgtcgagtttgccggcagcgatctcttcggcgatttgctggggtgtgagtcccgtttcgacgatcgcgttgccgaggaagaacagggcgccttcgcccagtacgtttttctcccgcagctcttccaccaccacgttcggcagcggtaccgcgttggcatccacgccgtcgatgccgatcagacggcacagcgtccgctcgacggctaccgtcgtataaccttccacaaaatcctgcaccccgttggcgatcttgcgcgctacgtcccgggcgtgttccacctggttaaagtctattcctaatttgcttttcatatcgttcatgtaggctgtgccgtacggctgccgtcattggttgtttttgagttcttcgttgcgttcgattcgccggaggatttccgggtcgatgcccagaatacgggcgatccggatcgcttcgtgcggaacttcgtccgtcgtgacctcctcgagcgagtagtctatgaaatcgttgatgtttttcagcgtgatcctctcctccgcgttcgtttccgagaagccttttaccttctgcttgcggtacggagccgcgatgccgttgtagtgggtggttacgagcgaagggacttcgtagtcggccagaaattcgaggacgccgttcacgatcgcccttccttcgaccggattggtcgtgcgggccggttcgtcgatgagagccagcacccgcctgcctgcccggacgcttttggccagttcgtccatccgcatcatctcggccgcgaacgacgagagtccgctgagctggtcctgtccgtcgccgatggagcagtgtacttcgtccacaagggccatttccgccctttcggccgcaatgtaaaatccgaattgcagcatgtactgggccagctcgacgctgtgcagcaacacggttttgcccgacatgttggcgccggtgattaccgtaggtcccgtcgtcaggcggatgttcacgggctggaatcgcttcccggccgcttcgagcgaaatccgcagctcagggttgaacaagcctcggaaggaggccgtgtcctgcgttatcgcgggacgggtaaggccccagtcgcgggcctgcatcgccttggcgatcaccacatcgagccatcccatcaggtcgagtgcctgttgcaacgctttgtggtatttccgcaattcgacggagagcctctcccgaatgcagtcttcgatctccacgctgcggaaatagagctcctgcacttgagactcgtcggctccggcctgtttgcgggccttgatctgtttgcgcagggtcgtcagctcctccgagtaggcgtcatagacgaagaaatgggggagccggttgccttccggatcgagcagatcgacgaccccgttcagctcgggaagttcggcaagacgcccttgcgatgccagcggtcgaagctcttccgccagcagcgcgaaaaacttcaattcgaacagctcgatgtcgtcgaatacgcagttgccgcccgtgcgttcgatcgttgagcggatgtcgcgcaacagggccagtttgcggcgaatcgtttcggtgcggtcgcgtccctcttcggtttcgagcaggcgcagcaccgaggtgatacggtcgtgttccgccgtgatcgccgactcctcgccgagccatgtcatttcatggagcatacgtcgcccgacggaggaacagatctccattccttcgacgacgcagcgcagtccgctggtatgttgtatggcctctttgagtcgcattcgctttctggttattcgatgcaattttacacgggttcgcgtatttatttcacggccttctgccgtgtcagagcgtttgaccttcctctgactcccctcctcggaggggactttaagatcctcgattctgttcgtgtgagccgtattcgtttctattcgggcattttctttacgtcgtaaaccggtatctgcaacgcctcctgcatcgcttcgcacaactgtcgggagtcgagcaccagccccgacggagccgtcggattgaccgtgacggccagcagccggctgcggtgtaccaccctgatccggtgcccccggcgcaggaaagcgtaaaacgcttcgggcgaggcgaacacccgcgtaaagtcgcggatgatcaactccacttcccgttgttgcgttcgcagcagttggaacagcttgtccgtgacgatgccggtggcgtaaatccgccggccgtgccggaacaggttttctccgctccgttcgagcatcagcaccgagggtaattcgaggtcgatcggttcgccgccgtcgctgacggcccacaccccctgcgtcaggggggcgagccgggtacgcagcgccttttcgatctcttcgatcccgatcagttcgtaaacgtatttcgtcttgcggaccagttcgggaatatttcccgcgacggcagctcccgtggccaggatcatcgcttcggtgaccgctggcgaagccaggctcaaccgcgacagggcgccgtccacgatcgtcgtgcctacgccccgggatttgagcaggtcgatcagggctttcaggcccgccgtgtccgaaggtccggagagcagcaatttgccgctcatcttcgcgcgggccgttatcagccgcccgagcgccgtccgttccaggctcacgtcgaggacctcggccgcgagccgtttttcccggtagtgtttctccgaggtgacgaagatcattccctcgggaatctcgatctcgggtttcgctgtctggcacacctgatcccggctctcgccgtcgattccgaccgaagtcagggcgaaacggtccgcccgaccaccgagttgtcccagaatgtagttcagacattcggttttacccgtgttcttctccaggccgacgatggccaggctgccgaaatccgatatgttcgttacgaatcccaatccggtgcgggctggtcttgcagcgttacgttctaatggttgtggttacgggtcttgcggctcaattcggacggctcgagcgaaagacgtccgccgctcaacaactcggccacgccttccttccgacgtgctttctcgcactcttcgcagtggcattcgtccttgtagtcggtcggttccgtataggtcgtgatcacaccttcgtagttgcggagtaccacgcggttcggagcctgcgagatgacatagttcggcatgacaggaatcttgccaccaccgcccggagcgtccacgacgaatgtcggaacggcgtaacccgaggtgtgtccccggaggttctcgatgatttcgatgcctttcgataccggagtgcggaagtgtccgatgcccagcgacaggtcgcagatataaatatagtagggacgcacacgcatcttcaccagttcgtgcacgagctttttcatgatgtgcgtgcagtcgttcacaccgcgcagcaacaccgactggttgcccaggggaataccggcgtcggccagacgtgcgcaggcctgcttcgattcgggggtcacttcgttcggatgattgaagtgggtgttcagccagatcgggtggtatttcttgagcatgttcaccaattccggtgtgatgcgttgaggcagcacgaccggggtgcgcgagccgatgcggatgatctccacgtggggaatggcacgcagacggctgatgatatattcgagtttttcgtcgctcaccagcagggcgtcgccgcccgagagcagcacgtcgcgtacctgcggtgtacgggcgatgtagtcgatgcagtcgtcgatctgtttctcgggggttgcacagtcgtgctggccggcgaagcggcggcgcgtgcagtggcggcagtacatcgagcacatgtcggtaatcaggaacagtacccggtcggggtaacggtgcgtcagacccggtacgggcgagtcgctgtcctcatgcaggggatcttccaggtcggcgggcgagcgcttcagctcctcgacggtaggaatggcctgcttgcggatcgggcagtgcggattttccggatcgatcagcgtcaggtagtagggcgtgatggccatacggagcgttttgagcgattcacggatgccttcctcctcttcagcggtcagcttgatgtatttcttgagctcatctacggtctcaatcctgttttttacctgccagtgccagtcgttccattgctggtcggtcacttcgggaaagaattcttttctgcggctcattgcgggtgtgagaggtgtcat

SEQ ID NO: 510 - DNA, 10953 bp, unidentified
  source 1..10953: mol_type = unassigned DNA
atggaaaaagttgataggacccactgggagcgggctgaattgttcgagtttttctccgctgtttcccaccctttttacagcgtcaccttccgggtggatgtaacaaacctttaccgctatgtcaaggagcggcatttgtcgttttattacgcgatggggtatctcgtaacggatgccgtgaacagcgtgaagaatttccgctacgccatccgggacggcgaggtgtggctgctggatgagcgcattcccagtctgaccgacctgaaacccggcagtgagcagtttcacatcgtcaccctgccaaaagtcggtggcattgcggagttctgtgcctccgcacaggcgagaagcgctgcccagaagacccttcttgaccaggacgaagagaacgacaacctcatctatatctcctgcacaccgtggtttgatttgaccggctgcaccaacgagcgggattttgaccgggacgacaacatcccccgcatcacatggggcagatatggcgaggaaaatggccgcaagacattggggatgtcggtggaggtcaatcaccgcttcatcgacggtctccatctggggaaattctacgagaaactacaggccgacatcgacgcactataaggaggcattctgatgtatcctgaccgcaagaccgccgaggcccttttgagagaggccgagccgcacaaccccggcccgtggggcgaccacagcccataagtaagcctctcccctcgttttgcattggaggtatcatatcatgcgcaagccccgcatcatctttttcgacatcgacggcactctcatcgacatggagaaaaaacgtatcaccaagccgagcttggacgctctgcgccgcttacagcaaaacggcatcctgctggccatcgccaccgggcgttccccgctcattgttccgagattcgacggcgtggagttcgacgtctttcttacctacaacggctcctactgctacgaccgccgcggagatatttttgccagccccatcccgccgcaggatgtgcagaccatccttaaaaatgcggctgctctgggacggcccgtttcggtcgcaggccggacgcagctgctctccaacggaacggatgacgatttaacggcatattacgccatcggcggacgagcgccggtcatttccgataagttcgatgaagtctcccgaggtgaagttttccagctgctgatgggctgccgcgaaagcgactggcccgccattctcaaaggcacaagcggtgcaaagatcgccgcgtggtgggacagggccgtagacatcatccccacctcgggcggaaaaggagccggcatccagaaagttctggcctattacggcctgacgcccgaggatgcaatggctttcggcgacggcaacaacgatatagaaatgtttcaggctgtcggtcacagcgtcgccatgggcaacgcctcccccgacctgaaagccattgccagcgaggtctgtcgtccctgtgctgaggatggtatttaccactattgtctggaaaaggacttgatttaagctaacaacctaaaaatagcacctcgctctaaatacaggagcaaggtgctattttatattgacatattatctttcttcccagcagtcaacttttccgtttaagtgcactccaaagtccgacgcaatctgcaatgtctggcttgtgccgtccatatagtcaacatctacacgggaaatcttgatttttcagtcgtgctgttataccatgccgcattccacatactgatttgggaaaatgtgcttctcaggtttataatatctgtcttcttactcgtcattgcagcaacctgacttgaaatctgccgcgttttataaatcgtaaaagacgggtcatagtatggaatgccatctttgtgtttttgcacataatgcactccatagtaatcgtaaatatactctcctatccccttttctgtttcaatcgggccggtcactttgcacgagaagattctatttcctgtcacttcatcttctacagggtcatcaacagcattatagggttccatataaaatctaacgtacttgatcgtttttcctgtattattgttccataaaacgattggtgagacgccgccagccgaattgaccgtaaaaataactttcataatttcgacaggcttcacatcactacgcttgaaattttcagcataaaacctttttacatcatcctcggaatacacactctcgtcgtaagcttttcgtccttcttttttgccactctgcctgtaatggtcatacagtgccattgtatcatttccgactatctggacgacatctggattcttcgtcgcataatattccgggtcaaatacccatccgtccggaattgcctccaatgccgccgaagcgccgagcgtcatgcttgagactaccgctgctgcggctatcagacttagcattcttttcattcttcgccattcctttctttttagcagctttttcttttgatccagataatcttccaccctccttcaacatcgtctttcgtttattttagagtttataactctatttgtcaagtagctgtcaaaaatccttatactattttgtgtaaggtggtgagttttgtgcgctacaatgaacgcatccgcgaaatcagggaagatagtgccctgactcagcaaaacattgcagacctgcttcatgttggccagcgcacatattccgattatgaaagcggaaaaacccgtattcccctcgacagtcttttgattcttgcacgattttataatgtctctgtagactatatttctggtgccagcgatataaaaagtgaatatcccaaacaataaaacctccctcatcctgacaaatgatgagagaggtttttattgttctatagattatttcttatcgtcgtctcgttccgccttttcggcctcctgctgctgacgcagctttttgatacgctttttctcgctctcgacgcgaggccatggccacgaaaagccctcgttctctttgcaccagcgagtgagcggatagaacgcgaaggccagcccgaacaggtacagcaggacgtacagcaggcctgaaagcgttaccagtgcgtccagtgcaccgatgagggccataagaaagcccgccttcaggaagaaaagtccgttctgacggcagtactcggggaaattttcagccttgacagcctgacggccctgatcgccccagacccggggatttttcatgaccgaatacccgtaaaagaccagcatcaggccacaggtgagttggaatccaaaaaacatctgcgtcgttcctcgctttattctggtgtaatggtctcagaagaccgcttagttgtcgtactcgcccagcagcggcttcatgaagggcaggaagtccagcgttgcaaagtaatcgcggggggtctcggcgcggcggatgaggcggtgggagccgtcctcgcagagcaggacttcggcgctgcgcagcttgccgttgtagttgtagcccatcgcagagccgtgggcaccggtgtcgtggatatacacgatgtcgccgatgtcgatcttgggcagcatccggtcgatggcaaacttgtcgttgttctcgcacaagccgcccactacgtcatacttatggtcgcagggggcattctccttgcccagcaccgtgatgtgatggtaagcgccgtacatggcggggcgcatcaggttggccgcacaggcatccagaccgatgtactccttgtagatgtgcttctcgtggatggcagttgccaccagtgcaccgtaggggccggtggtgaagcggcccatctcggtgaagatggcgacatcgcccattccggcggggaccaggatctcctcgaatttcttacggacaccctcgccgatggccatgatgtcgttctcagtctgctcaggacggtacgggatgcccacgccgccggacagattgatgtaggcgatgtggacgccggtggccttctggacgcggaccgccagctggaacaggatcgcagccagctcggggtagtaggcgtccgaaatggtgttggaagcgaggaaggcgtggatgccgaagttctttgctccctttgcagccagcttcttgtagctgtcgatcatctgctcctcggtcatgccgtacttggcatccccgggcttgtccatgacctgaaagccctccttgctctcgcccaactggaaggtgccgcccggattgtagcggcagaagatgttctccggcacaccggccacccggtcgaggaagtccaccatcgtggcgtcgtcgaggttgatataagcgcccagctcgcaggccttcttcatgtcctccacgggggtctgattggaggagaacatgatgtcgctgccgctgaagccgcacacctcactgagcatcagctcggtcagggaggagcagtccacgccgcaaccctcttccttcaggatctggaggatgacggggttgggcagagccttgaccgcgaaatactcgcggaagcccttattccagctgaaggctttgttgatgcggcgggcgttctcccggatgcccttctcgtcgtagacgtggaagggggtgggcacgtcctgaatgatgtcctgagccatcgactcagtcaaaaacggtttcttttccatgatatacatccctctcatatatttttacacagccgaatgccgtgcagccagcagttcacagcttgaggttctctcgggtgggggtaaaggtaggcaccatcttggccagctgggccacgacgttgtcgtcgttgtgctcggcggcggcagacagctcctgaagctgctgatagaactcaccaaggtcgatgttccggggcggagccacgaagatcttattgtggccggtacggcgcatcttgtcctgttcctcgtccatcatcagctcttcgtagagcttctcgccggggcggagacccacgatcttgatgtccatattcacgcccggctcgtagccatagaaacggatgagctgctttgcgaggtccatgatcttgaccggctcacccatatccagcacatagatgctgccgctctcggccagtgcgccggcctgcagcaccagctgcgcggcctccgggatggtcatgaaatagcgctcgatgttggggtcagtcagggtgacggggccgccctttttgatctgcgcctcgaacagtgggatgacgctgccgtggctgcccagcacgttgccgaagcggacggccacgcacttcatgtcggtgttgcccgcaaaggtctggatgagcatctcgcacaggcgcttggtgcagcccataacgctggtggggttgacggccttatcggtggaaagctgcaccagccgctccacgccgtgttcgctggcgctgaccagcaggttcttggtgccgaagacattgttcttgacggcctcagcggggctgatctccatgagcgggacatgcttgtgggccgcggcgtggaacaccaccgtggggtggtaggtctcaaagacctcgtccagacgggccttgtcccggatggaacccaccagcaccgtgatgggcacatcgcggccatacttctgctgcagttccatctgcagctcgtaggcgcagttctcgtaaatatcgaagatgagcagcttcgcgggtctgaagcgcatgacctgacggcaaagctcactgccgatgctgccgccgccgcccgtcaccagcacggtctttccggtgagatagcccgagatctgggccgtgtccagcgtgacctcctcacgggagaggaagtcggcagtattcagctctcggaacgccccctgctggggtgcgcctgcccccacaagctgggggtcgctgagtatctgcaccgcacagtgggtggagacgcagaggtcgatgacatggtttaggcggctgccccgcagggtcgggatggcaatgatgatggtgtggatgctgtagcgggtgcacaggtcgggaatctcctccagagtgcccttcaccgggacgccatggatggtctggcccagcttggcggggtcatcgtccaccgccaccaccgggtggccgtagctgccgttgctcttgcagacgttgatggcccacgcaccggcctcgcccgcgcccacgatcatcacagggcggttggggtctttgctggtattgccccgcagccgctcgcccagtgggtgattcaggaagagccgccacgccagacggctcccgccgacgagcaggaagatgagcaccgaagccatcgcgttggccgagttgaagagcacgccatggatgaagcagcggttgaccagatacaccacgaccgtcggggcagcgatcatcccagccagacggatgaggtcccgctctccggcgtatttccagaggatggtgtagagcctcccgcccaagaagctgagcagatagaccgccacgatccacggcaggttcgcgtagagcagggcacggttgtgaggccaccacgaggcctcgactgcgccgtctgcgcggagcaggagcgcaaaataaaagctgaaggctacgatggctgcgtccagcaccaccagaaaggcccggcgggccagcacctgcagcatacttgttttcttttccttcacagaaagtcctcttttgcatcggggccggtgtcggagagacgccagccgccgtttttttgacccaagggcctatcgccccatcgtatctgtatcattatactcgattcttctccccatgtccagcgcttttgtgtcttctctcccctgccaccacgtcccgcagctcctcgccgaggcccagcggccatgccgccgcaaagcagaccagcgtcatccccgcaccgcccagcgccaccgccgccagctgcgcgggcactcctctcgccagccatggggtcagaagcttccgcagcgccagccccgctccggcaccggccatccccgcaagacccggcgcccccagccaccgccacagtcgcagcggcaggccgcagctggacagcagccgcccggtgttggcggcgcaggtgtagaggctggacagcaggatcacgaagagaaaccccttcatcccgaaccggggcagcaggagcaccacccccgcgatgcggaggcaggagtcccacatactataccggaagacggctttctgctctcccatccccttcatcgcgccgtccaccatgctctcgaggtacatcagcggcatggccgggccgaggatgacgagatagctgcccgcctccgcgctgccgtagagtgcctcggccagcggctgtccccacacccagaatgctgcccccgccagcgccgaaaaatagcctgtgagccgcagcatccggtcgatgaggacggagagccgcctgctctgcccccggagatgggcttgggtgatctcgggcatcaggaggacggacagactccccagcagcccaaagggaaaggtcagcaggggcagggccatccctttcaggtttccgtactgggtcacagcctcggcacgcccgccggagcattgcagatagaccgcaaggcaggccgggaccagcatattctcggcggtgtggagagcgctggcgaggcatcgcccgccctccaccggccagaggatgtcccagagccgcctccccgggtcatggggacgctgtacaggctgtgagccgaagcagcggcgggcctcccggcagtagaacagggccatcagaccggtgctgacggcctcgctggccgccgttgcgcccagcactgccgtacagcgctgccccgcatcccatccgagagcgtcggcccggcccagcgcggcccagacgatgccgatgcggacggtctgctcagccagctggctcaggacattcggctcgacctgccgccgggcgatgaaaaagccccgcagcaccgacgacaccgccatccacggcagacccagcgacgagacgcgcaatgcccccgccgcccgggcatctcccagccaccaccgtgcggcgaggccggccagaccgaactgggccgccagcgccgccactcccagcccggcccccgccagcagaagacggcgcagcatcccccgggcctcggccgggcttcgggccagctcttcggccatcaggcgggtggccgccaccgatacgcctgccgtcgccagcgtgacgaaaagcgagtagactgccagcaccagttgatacagccccatcccctcgccgcccagcgcgttcgccagccagatgcgcagtcccatccctgccagccggagcaggacatcggctccggtcatcagggccgcgtttttcagataactcttccccactgcgccccctccctttcctgcttgtatctttttataggtatgcacgccgctctgggaaatatgagcggcggcgtgggttgtttctttcccagttttatgatatgatatatattgtatctggcggagcgttttctgccagacaggatctaagaatgcaaggaggaagcgcaccccggtaccacggccgtgcgcaatgagacaatgagcgaagaatgtacccatgactgctccaactgcggggcagcgtgttcttcccgcaatgctgcaccccagcatgacgcccccaacccgcacagccgggtcaagaagatcatcggtgtcgtgtccggcaagggcggcgtcggcaagagcatgaccagcgccctgctggcctgcgccatggcacgccgcggctaccactgcggcatcctcgacgccgacatcaccggcccgtccatcccgaagctgttcggcatccatggccgtgccatggcggacgacaagggctgctggcccatccagagccggatgggcatcgacgtcatgagcatcaacctgctggtggagaacgaagaggaccccgtcgtatggcgcggccccgtcatcgccggtgcggtcaagcagttctggaccgatgtggtctggaaggacgtcgatttcctgttcgtggatatgcctccgggaacgggcgatgtgcccctgaccgtcttccagagtctgcctgtggacggcatcgtcgtcgtggcaagcccgcaggagctggtgagcatgatcgtcgccaaggctgtgaacatggccgagatgatgaaggtgcctatgctgggcatcgtcgagaacatgagctacatcgtctgccccgactgcggcaagcacatcaatgtgttcggcgacagccatgtggacgaggtggccgcaaagcatcacctgcccgtactggccaagtgccccatcgacccccagctggccgcgctgtccgacgccggcatgatcgagacctacggcggacagttcctcgagggtgccgctgacgcctgcgagaagctgctgaagtaagacttatcccccctgtgccgccctttccgggccggtgcagggggatttttattctttcacaaaatcaggcgttatcgccattttttgaagcacccgttcttttttgtgaagtatgttcatcttttctgtagtttttttgaaagattttccagcttttgcagggcgggccatcttgtaaatcggcggataaagctttataataacgaggtgtgctgaggttcgctgtcctcgccgcggaaacgggagagccggggcctcatgatagagctacacgatagagttaagggaaaaggagtatcttactatgctgacgaatgaatatctgaagcgtgtctacgagggcctcgagaagcgcaatgccaacgagcctgagttcctgcaggctgtccgcgaggtgctggagagcatccagcccgtcgtggagaagcaccccgagtacgagaaggccggactcatcgagcgtctggtcgagccggagcgcatcatctccttccgtgtgccttgggtcgatgatcagggcaaggtccaggtgaaccgcggctaccgcgtccagttcaacagcgccatcggcccctacaagggcggcctgcgcttccacccctctgtcaatcagggcatcctgaagttcctcggctttgagcagaccttcaagaacagcctgaccaccctgcccatgggcggcggcaagggcggctctgacttcgacccccacggcaagagcgacatggaagtcatgcgcttctgccagagcttcatgaccgagctgtaccgccacatcggccagttcgtggactgccccgccggtgacatcggcgtcggcggccgcgaggtcggctatatgttcggccagtacaagcgcctgaccaacagttttcagggcggtatgctcaccggcaagggcctgactttcggcggctctctggcccgtaccgaggccaccggctacggcctgtgctacttcaccgctgaggccctgaagtgtatgcgcaacgacagcttcgagggcaagaccgtggtgatctccggctccggcaacgtcgccatctatgcctgcgagaaggccacccagctgggtgccaaggtcgtcactatgtccgactccaacggctatgtctacgaccccaacggcatcgatctggcctacgtcaaggatctgaaggaagtccgccgcggccgcatcaaggagtatgctgagacccacaaggatgcgacctatgttgctgactgcaccaaggtctggactgtcccctgcgacatcgccctgccctgcgctacccagaacgagatcaacaaggagtccgcagaggctctggtgaagggcggctgcaccgtggtctgcgagggcgctaacatgcccagcacgcccgaggccatcgaggtctatctgtccaacggcgtcctgtacggacccgcaaaggcctccaacgccggcggcgtggctacctccggtctggagatgagccagaactccgagcgtctgagctggacctttgaggaggtcgatgcaaagctgaagggcatcatggagggcatcttccacgcttcctatgacgcttctgtggctgccggctccgagggcaacctgatggtcggtgcaaactgcgccggcttcctgaaggtcgccaccgctatgatggctcagggcatcacctactaa

SEQ ID NO: 511 - DNA, 6097 bp, unidentified
  source 1..6097: mol_type = unassigned DNA
atgtctgcacaaaaaaacaaacaaatggatatgcttaatggtccacttctcaaaaaaatactatttttcgcccttccacttgcagccagcagcattctgcaacagttatttaactcagcagatgttgccgttgttggacgttttgcaggcagcaagtctttggcggcagttggtggcaacactccggtaattagtttgttaataaacctgtttgtaggtttgtcagttggtgccaacgtagttattggaaactatatcggacagggcaaaaaagaaaaagttaaagaagcagtacacacggttatggcaatggctgttatttgtggtgtatttcttttaattataggaacagttcttgcaagaccaattcttatggcaattaatacaccggatgaagttttaccattggctatgctttatcttagaatatattttgtaggcatgccttttgtaatggtatacaactttggtgcagcagtgcttagaagtataggcgataccaaaagaccgctttatgccctgattgtgtccggcattataaatatatgccttaatttagttcttgtaattgtttttaaattagatgtggcaggtgttgctattgcaactgtaattgcagattgtgtcagtgcaagtcttgtgacttattttcttatgacaggggatgaaatggtaagatttaatcctaagaaaatgtcattaaagaaggaacaggttataaaaattataaaaataggtgcacctgcaggtttacagggagtagttttctcggtatcaaatgtgtgcattcagtcagccattaatggctttggtacaaaagcaattgcaggttcttcagcagcattaaattatgaatactttacttattatgttattaatgcctttaaccagacaacagttacttttacaagccagaattatggggcaaaaaagcttgagcgatgcaagaaggcatttagactatgtcttgtgtggggaatggcaattacgggaataatgagtcttattttcgtattgtttaaggaatttttcgcaggagtttacacggcagattcacaggcaattgattatgctgttatcagaatggttcacgtattgttgcttgaacttttaacaggaacttacgagatttcaggtggagcaatgagaggtatgggatactcactggttccggcgttgcttactgtagtaggttgttgtggatttagagtggcatggctttatacagtatttaagatttgtcctactttttcaatgcttatgaatgtgtacccggcaacatgggttataacaggagcacttgttatgggagcttatttaattataagaaaaagggtttcggataaataatctgttaaagaaatatttttactgttgacagactgtggctgcaagagtattgtttgttatgcaacttaatttttagtgggataaatacacaaaaatatgaaaagtatgttttaaagaaatagattatttgctataatttctattataataaaatactgtcagatgattagactgcaatgaaatattttatatacaataagtgtatagactggagaaggaatgaagattattatagtaggctgtggaaatgtaggaattactcttgcagaacagcttagcacagaaggacataacattacggttattgatacaagggaacaggttgttgagagtgtatataacagttatgacattttaggtgttgttggaaatggcacaagttttaatattcagatggaggcaggagttgaagacgcagatttgctagttgcggtaacgggttcagatgaacttaatttgttatgttgcctgattgccaggaaagccggtggctgtcatacaattgccagagtaagtaatccaatatacaacagggagatatcatttattaaagaagaactgggattatctatgattattaatccacagttggcggctgcaagagagatgagccgtcttttaaaattcccatcagctttgaaagttgattcttttgcaaaaagccgagtggaattaattaattacagaattgaagaaggaaatattctttgtaacattaaattaaaggatttaagtagtaagttaaaagttgacgtacttattcctattgttgaacgaggcgaccaggttattattcctgatggtgagtttgaacttaaggctaaggacattatatccattgtaggttctcagccgagaactcttgatttgtttaagaagatgaaggtcccaacatcagcagccaggaaggttttaattgtaggtggtggaagaacttctatttatcttgcaaagcaattaattgagatgggaataaaggttaagattatagaaaaaaatcctgaaaaatgtgaggtccttacagaaatgttgcctaaggcaatgattatatgcggtgacgcaactgataaggaactacttatggaagaaggattgatggagacggaagcatttattgcatcaacggattttgatgaagaaaatattatgcttgccctttatgctaagagtcttactaatgcaaagcttatcacaaaggtacatagaatttcttatgatgagattattgacagccttgatgtgggaagtattatttatcctaaatatattacggctgaatcaattattaagtatgtaagagctatgaagaattctattggaagtaacatagaaactttatatagacttaatgacaacagagttgaggctttggaattattaataaaagaagattcacctatggttggtaagccattaagtgagttaagattgaaacctaatgtattaatcggttgtataacaagaagaggtcaggttactattcctaacggtcaaagtgttatacacgtgggagatactattattcttattacaacaactacaggcttccaccagttggaagatgcgttaatgtaggaggaaatatgaattattcaatgatacgatacattcttgcatgggtgtttacttttgagggaatgtttcttatgcttcctgcaattgtaggtggaatatatggtgaaaagcaggggcttgtttatctggctattgcagcaggatgccttcttgtggggactttaagcagaatcagaaagattagaagtaaggtattttattcaaaagaaggttttgtggcagtttctttaagctggattattatgagtttggtaggtgcattgccattctttattacaggagatattcctgcatacgaagatgcactttttgaaacaatatcaggttttacaacaacaggttcaagtattttgtctaatgtggaagctttaacacattgttcattgttctggcgttcatttacacattggattggtggtatgggagttttggtatttattatggcagttcttccattatcaggtggctcaataatgcatcttatgagagcggaaagtccgggcccggcagtaggaaaacttgttcctaaaataagacatacagcaatgattttatatggaatatacattgtgtttacacttgttgagataatagctttgttaataacaggtatgtctccgtttgaggcaatgacattaacttttggtacagtaggtacgggtggttttggcgttttgaatgacagcattgcttcctatagtcttgcatctcagattgtaattaccacttttatgataatatgttcaattaattttaacgtttattacttattattaataagaaagactaaagaagcttttatgaatcaggaattaagatattatcttggaatcgtatttggttcagcacttcttatagccattaacattaaaggaagttttgataatttctttatggcatttcacacagcgttgttccaggtggcgtctgtttcaagtacgacaggttttgcaacaacagactttaacctgtggcctgaattttccaaaaccatattagtacttcttatgtttgtaggtgcatgtgccggaagtacaggtggtggtattaaagtttcaagattagttgtatttctgaaagctataaaaagtgaggttatgtcaattactcacccaagaagtgtacagaaggttcagactgacggtagaccgttatcgaatgatgcagtaagaagagtcttatgttatttaggtgcttatgttataatagtactagcttctatattattaataagtttggacggaaaagatatgacaactaaccttacagcggttatggcaacatttaataatataggcccgggtcttaatttggtaggacctactagcaattttggagattatagtgtattctctaagatagtactaatgtttgacatgctggttggacgacttgaaatattcccattgcttattttgtttgcaccgggattatggacggttccaaagagacgactggcaaagaaaaagaagaattttgaatagaaagtaattaaccgaagaggacgataatgaatatttactattttaatattactgttttaagaaacagaaatgtttttggagaagttgtaaaaactttagatgatgcacgcgcagaaaaaattagcaggttaagggttacggcagataagcttagaagtgccggcgcaggaattttgattaatttcataaaagaaaagtacaatattgccggagatgttaaggtagacaagtttggaaagccttactttgaagatacggatattcattttaacatctctcattcaggttgctatgtaattgcagcagtttctgatgaagatataggaatagatattcaaaagataaaaagcgacaagcatagaattgctgaaaagaattttttgccaagcgaatgcgcttacataaacgaaattgaagacgaaaaaatcaaccagcagagattttgcgagatttggacaataaaggaagcatacttaaagaacataggcataggacttagaaaacctcttaactctttcgaaatagattttagcgaggacgcacctcagatagttggaaagaaagagtacaagttcgtgcaacttaagttcgatgaaaaatacatcgttacagtatgtgcagaccaaagtgatgaaatatttgatgtggaagaagtactggtagtttaagatagtgaatagggaagatagagaattttttaataaattacgtgtcacataacggttttgttctacgacacgtaattccgcccaaaacaataaaaaaataggttgcgtactaacaaaaatgttagcgggcaacctatttttactatattacaaactctattacttgctccaacgtcctgacgcaccgcaaggaagcaccagtccgtttgatgaaacattaacacctatttcatcagcttcaacatgtccgccgaacttgcttacaatagcagtgttaatcatatagtttaatactgcaggctgaagccctgtggtgtatgagttaataaggaagaataaaggatcatcacttaaaatctttgaacaaagttcaatgaaaggaaatacactttcttcaatcttccaaatttctccttttggtcctcttccatatgaaggagggtccataataatgccatcgtatttattgccacgtcttatttcacgctcaacgaattttacacaatcatcaacaagccatcttacaggtttgtcaataagacctgatgaagtggcgttttcttttgcccaggcaacaacaccctttgaagcgtcaacatgagtaacgtgggcacctgcgtttaacgcagcaagagtagcaccgcctgtgtaagcaaaaagatttaaaactttaacaggacgtccggcatttctgattttttcagaaaaccagtcccaattagtagcctgctcaggaaaaagtcctgtgtgtttaaagctaaaaggcttaaggttaaatgttaaatccttgtaattaatggtccactgttcaggcaaattaaaaaactgccactgtcccccacccttgttacttctatgataatggccattaggtttgaaccatttcttgtcatgctttggagtattccaaataacctgtgggtctggtcttacaagaaaataatcaccccaacgttcaagtttttccccggaagaagtatcaagtacttcataatctttccaattatctgctatccacat

SEQ ID NO: 512 - DNA, 9164 bp, unidentified
  source 1..9164: mol_type = unassigned DNA
ttacttattgttcttcttctcattctcaagcttcttcatagctcttaccttaagtgaaagaccgaagaggttgatgaatccgtcagcatcatgatgatcatacatatcacctgtcttgaatgatgcaattgactcgttgtaaagtgaatatggagatgttgttccagccttgatgatgttacccttgtaaagtctgaacttaacttcacctgttacatattcctgagtcttctcaacgaatgcctgaagtgcttcacgaagaggtgtctcccactttccttcgtaaacaacctgtgcaaacttgtttccaacatccatcttgaatgttgttgtatctctgtcgagaactaattcctcaagctgctgatgagtttcgtaaagaattgttccaccaggagtctcatatacaccacgggacttcataccaacaacacggttctcaacgatatcaatgataccgataccatgcttggcaccaagtctgttaagctctctgataatatcagaaaccttcatagccttgccattaactgactttggaacacctttttcaaatgtcatagtaacatattctggttcatccggagcttcctcaggagtgcatccaagaactaataaatgcttgtagttaggctcattagctggatcttcaagctcaagaccttcatggctgatatgccagatgttacggtcacggctgtagctgcagtctgtgctgaatggaagatgaataccatgctgtctgcagtattcaatctcatcctcacgagactgaagcttccagttagaatctctccaaggagcgataatcttgatatctggagctaaagccttgattgtaagctcgaatctgatctggtcattacccttaccagtagcaccgtggcagatagcaacagcaccttccttacgggcaatctcaacaagtctcttagcgataagaggtcttgccattgaagtaccaagtaaatatttattttcataaacagcgtgtgcctgaacacatggaacgatgtagttgtcgcagaactcatcagtgatatcttctatatataacttagcagcaccgcatgagagagctctctgctcaagtccgtccaactcctcttcctgaccacagtctgcacatacgcagacaacatcatagttgtatgtttcctttaaccaagggatgatggcagttgtgtcaagtccgccagaataagcaagaataactttttctttcattatatattcctccgtatattattaagtttacatagtaaaacacatatgctatgcatctgcagattataataaactactttatttaaaaatgcaacaacaaattatgcatattatacattaatatacaacaaaaatgtataaatataaaatttcttcaaaatatcctttacataagaaaaaaagttgctataatgtaggttatcaatttacattttgcgttattttatgcataaatgttgaatatatgcattttgcttcgcaaaacaaggaggagttatgattaaagtaggcattatcggtgcgacaggttacgcaggtaacgagcttgtcagattattattaggacataaggatgcagagattgtatggcttggttcgagaagttacatagatcagaattattcagatgtatatagaaacatgtttaagcttgtagatgcaaaatgtatggacgacaatatggagcagcttgctaacgaggttgatgttatatttacagcaacaccacagggcttatgtgcatcacttgttaatgacgaaattctttcaaagactaagattattgatctgagtgctgatttcagacttaaggatgttaatgtatatgaacagtggtataagcttgagcataaagcaccacagtatattgatgaagctgtctatggcttatgtgagattaacagagacaaggtgagcaaagatacaagaatcattgcgaatccgggctgctatacaacaacatcaattcttacactttacccaatggttaaggaaggaataatcaatccggatacaattataattgatgccaagagtggaacttcaggtgcaggacgtggagctaaggttgccaaccttttctgcgaagttaatgagagcatgaaggcttatggtgtcggaactcacagacatacacctgagattgaggaacagttaggttatgcatgtggaagagatgatttaaagcttatcttcacaccacatttggttccaatgaacagaggaattcttgtaacagcatacgccaaccttgccaaagatgttacatatgaagatgttaaggcagcatatgacaagtactatgataaggaatatttcgtaagagtacttcctaaagatgtatgccctgaaacacgctgggttgagggaagcaactttgttgatataggatttaagattgagccaagaactaacagacttataatgatgggtgcgttagataatcttgttaagggtgcagcaggtcaggcagtacagaatatgaaccttctcttcggacttccagagaatgagggattacagcttgcaccaatgtttccataataaatgtagcgtaaattcagaatttacacgacgaaatatgcacaatgacagagtatatgtgatggtacaataggaggatgttatgaatataattaaaggcggtgttacagcagctaaaggattcaaggctgccggatgtgaagcacagattaaatataagaacggaaagaaagatatggcacttgtatacagtgagaagccatgtgttacagcaggaacatttacaactaacaaagtatttgcagctcctgttaaatgggacagaaacattgtatataatgaagactttgcacaggctgtagttgtaaacagcggtgttgccaacgcatgtacaggcgttgaaggagataacgcatgtgcagaagaagcaaaggcagttgcaaaggttcttaatgtaccggagaatgcagtacttatcggttcaacaggtgttatcggaatgcagcttcctgttgacagaatatgtgcaggaattgaaaagcttgctccaatgcttgatgcttcattagaagcaggaacacaggcagcagaggcaattatgactacagatacaagaagcaagcaggttgctgtagaagtagaggttgcaggtactaaggtaacaatcggtggtatgtgcaagggcgcaggaatgattcatcctaacatggcaacaatgctctgctacataacaacagactgtgatatcgacaaggcacttcttcagaatatgacaagtgcaattgttgatgattcatttaatatgatatcagtcgatggagatacatcaactaatgatacagctcttgttcttgcaaatggaatggctggcaacaagaagattacagaagagggtgctgattataatgctttctatgaaggcttaagctatgtatttacagagctttccaagatgattgcaggtgacggcgaaggctgtacatgtcttttcgaggttcaggtaaagggtgcaacaactaaggcagaagccaagacacttgctaagtcaattgttacatcaagtcttactaaggcagcaatattcggacatgacgctaactggggaagaattctctgtgcaatgggatattctggtgctgactttgaccctgaaaaggttgatatattctttaagagtgaagcaggtgagcttcagattgttaaagatggaactgctacagattacagcgaggagaaagcaacggaaatactttcacagaatcctgtaattgctattgcggatgttaagcagggcgatgcaagcgctacagcatggggctgtgaccttacatttgattatgtcaagataaatgctgattacagaagctgatctgacacagcattttaaagcaaatatatctgaataaatatgaaatggagattattatgagcgcaaaagatatgacagaggaacttatgaaggcacaggtgcttgttgaggcacttccttatatccagaaatttaacagaaagataattgtagttaagtacggcggaagtgccatggtagatgaagaacttaagagaaaagttattcaggatgttgttcttcttaaactcgttggttttaagccaatcatcgttcatggcggtggcaaggaaatcagcaaatgggttgaaaagtcaggcatgacacctgaattcaagaatggattaagagttacagacgagccaacaatggagattgccgagatggttcttaacaaggttaataagagtcttgtgtcaatgattgagcagcttggagttaaggcatgtggtatcagtggtaaggatggcggcatgttaaaggttgagaagaagtattctaagggtgaggatataggatatgttggtgaagtgacagatgttgacacaacacttcttgattcattgcttaaggacgatttcctcccagtaatatgccctattggatatgatgatgattttcatgcatacaatattaatgcagatgacgcagcatgtgcaattgcaagagctgtcagtgctgaaaagcttgcattcttaacagatatcgaaggtgtatataaggattttgacgataaggattcacttatatctgagctttctacttcagaggcgagaacacttttagagagcggaacaatcggcggcggtatgcttcctaagcttaataactgtatagatgctattgagcatggtgtatcaagagtacatattcttgatggaagaattccacactgccttcttcttgaaatatttactaacaagggtgttggtacagctattctttcagatgatgcagaaaaattctttgattcagataaataattgcgaaccgtaagcgttgaggttataatattatattggcccatgtgaaaatgtgtgctcataagaataggaaagtgagagtaatcatgaatacacagcagattatagaaacagcagaagagaagctgattcatacatacaaccgttaccagatagtacttgataagggtgacggagtaagactttacgatacagatggtaaagaatatcttgattttggagcaggtatagcagtatttgcacttggttataacaataaggaatataacgatgcattaaaggcacagattgataagcttatacacacatctaattatttctataatgaaccggctgtagaggctgcaacagcacttacaaaggcttcaggaatggacagagtattctttactaacagtggtacagaggctattgaaggtgcagtcaagcttgcaaagaaatattattatgtcaagaacggaaaagctgatgcagagattattgcaatgcagcattcattccatggaagaagtatgggagcacttgcagtaactggtaataagcattatcaggaagcattcggacctatgataccgggaattaagtttgcacagtataacgaccttgacagtgtaaaggaacttgttaatgacaaaacttgtgctataatatttgagacagtacagggtgaaggaggaatttatcctgctactaaagaatttattgaaggtgtaagaaagttatgcgatgagaagggaatccttcttatacttgatgagattcagtgcggaatgggaagaacaggaagtatgtttgcattccagcagtatggcgttaagcctgatatccttacagttgccaaggctcttggctgtggagttcctgtaggtgcatttgcagcgacagaggaagttgcgaaggcattagttccaggagaccatggaacaacatacggtggtaatccacttgcatgtgcagcagcaaccaaggtgttcgaactttttgagaagcagcatgtattagataatgtcaaggaagtatctgcttactttgaagaaaagcttgatgagcttgttgagacaatagatgttgttgtcgagagacgaggaatgggacttatgcagggacttgagttatcagttaatcctaaggatgtaattgcgagagcacttgataacggacttattctgttctcagcaggaactaatgttataagatttgttccaccacttgtaattactaaggcagatgtagatgaatgcatagctaagcttaagaaatccttctagaatcaggagtttactttatgaaattaagaagatttatcagtatgatgctgattgttaccatgctgacagtctttgcaggctgtggtaataaagatgacaggacacaggctgcgaagaagcttaatcttagtggacctattacagttaatgtctggtataatgacagtgcatatgagtcttatcttgaattcgttgccagacaatttaagaaatctaatgaactggtgactgttaagccagtatatattgaggcggattcatatattaattatatatatgacgaatcggtaaggaataacaatgcatgtgatatatattttctgacatctgaagagatggagaaggcttatctttcaggtcttacctctgagaatgatatgtatcctgaagtctataatgagaatgtgtatggtaaggctgcaatgactgcatgttcgtatggtggtaagttatatggttacccggtgtcgttcaacacttcatttcttgtatataataagaaatatgcagaagcagttgatactatagaccagattcgtaatataagtgataattatcagattacagatgagaatcaggatgtttcaatggtgtttgaatgggatcctgattcaatgttccttaattatgcagcagcaggagcctatattaatataggcggagttaatgcagagaacagggctgaggtatctcttaatgaggaaaagattaagaaggttcttactaagtacgctcagttaaaagatgcatttggtattgacagaaatacagtaagtcttaaagactgtgcagatctgttttctactggaaatatgctctatactgtgcttgatgcagacagtcttgcagagattaatgttacagatgtagattatggaatatgtgagtatccttcaatgggagatgaccttgattctaaggcaatgtctgttactacgatggcagtagttaatccgtacactaagaatgtagatgcatccaaggctgttgcaagagcaatttcttatgattatgcagattatcttggaagcatggctaagaaaagctgtgcaagggcggatttaaaggttaagagagcagaaagctaccagaagttacaccagatttattctgactctgttgtaaaagccaaatatatcggtgttggagaagtatacatgagatatgagattatgcttcatcaggtatatgatggtggaaatgttgatacagcttacagtacatttgcaacaacaatagaaaaaacaactaaaaataataatgaaaacagtacgcagagtacgaaataacattatgaataaatatcctgttattaactaataattatcctatgcagattaatgaggaggttagttaatggcaggatttttgattgcaataatatcaggtgcacttatgagtttacagggtgcatttaatacaaatgttacgaaagcaagcagtgtgtgggttacggcaatgtttgtgcagttgacagcactggcgacttgtgcgattatgtgggtaattgacggaagacctgatatcatgaagctgtttaaggttgataacaagattacacttcttggaggtgtgataggtgcatttataacatttacagttataaaaagtataagtggtcttggaattgctaaagcggaggttacgattgtagttgcgcagataattgtttcgtatctgctgggacttttcgggctgtttggaagtgagaagactacattttcatggattaagctcgtgtcgcttcttattacggttgcaggagtatgtatgttttattttcttggtaatccgtcaacggattaatatattatgaataattatgataaatgtcagaattatctggcaggaaggaacagaatggaagatttattcagcgtatgcggaaagatacgattaagaaaaggtgaaggaagaaccttaaaggcaggcggtgcctgggtatatgataacgaaattgaatggatgtctgacggaataattgacggacatcttgttgaggtgcttgattttgatgattatttcatgggaatcggatttattaacagaaaatccaagattacagtaagaatgctgagcagacacacagatgttgttgatgagacatttattgaggagagagtaagggctgcggttgaatacagatttaacacagtagatacctctgcgtgtcgtcttatattcggggaggcagattttctgccgggacttgttatagataagtactcagatgtgcttgttgtggaatcacttgctttaggaattgacagatttaagtcacttattgtcgaaaaagtgaaggaaatccttcgtgaaaaaggcattgatatccgtggagtatatgaaagaagcgatgccaaagtccgtactcttgaagggatggagagagttaagggctttattggtgatgaatttgacactaatgttgagatagttgagaatggtgtccactacatgatagatgttgtgaatggacagaaaaccgggttctttcttgatcagaagtacaacagacttgcaatgcagaagctgtgcaaggacaagcgggtattagactgttttacccatatgggtacatttgcattaaatgcaggaattgcaggtgctaaggaagttactggacttgatatatcagaatatgctgttgaacaggcgagagccaatgccaagcttaacggacttgagaatacagtacattttaaatgtgcaaatgtattggatgagctgccaaagcttaacgaagcaggtgagaaatatgacgttgtaatacttgacccgccggcatttaccaaatcgagggaagctacaaagaacgcaatcaagggctacagggaaatcaatatgaagggacttaagcttgtcaaagacggcggctatcttgcaagctgttcatgctcacacttcatgacacaggagcttcttaccaagactattaaggaagccgctaaagctgtacataaaagactccgtcaggtcgagttcaggacacagtcacctgaccacccaatactgtgggaggcgcaggagagctattatctgaaattctacatcttccaggttgttgatgaaaaatga

SEQ ID NO: 513 - DNA, 9784 bp, unidentified
  source 1..9784: mol_type = unassigned DNA
ttatttcactacctcatcccatgtggttgcatcaccagtgtaaattgtctttacctgatcactactgagttcatctgttgtattgtttttatttacaataactgcaataccgtctgtagcaattacctggctgtccagtttatctttttcttcatcctgtaattcacgtgatgccattccgatatcataacttccatcgattgctgatgtcatacctgttgtagagtctgtagtctgaagctcaatctctgctcctgtattgactttcttatacgcctcgatcaatttttccataaccggtgatacggaagaggatccgccgacaactgcttttccggatggcttgcttcccgcataagcttctgctgaatcgtctccgatatatccgttgtctgaaattacctgctgtccttctttgctcatgatataagcgatgaagtcttttgccacttcattatctgcacctttctttgttgcaatgttaaatggtctgcagattttatattttccatctttgatgttctgctctgtagcttcttctccgtcaatctttaaagcttttactgtatcatttaatgatccgagtgatacataaccgattgcataatcatctccggctactgttgtaagcattacggatgtgctgtttgtaatctgtgcatcatctgttgtcatatcaactttttcaccgtctttcttttcttcaatcccgaaaagttcgatgaatgctcctcttgttcctgaaccatcttctcttgaaacaattgtgatatcatttgaagaatcccagtcgctttcactcttgctgctcttgtcatctgaggaagcactgtcggaacttccacatccgactgcaagtcccgctgtcattgttgctaccgataaaattgcaataaactttttcaacttcataatcatactctccttagattctcatcttttttcattctgctttttttccttgtcgctttcgacaatagttatcttataagacgtatgttaaatccaaaatctgcgaattgttaaatatatgtaaagtgtatgcagaaattttatagaaatgtaaaatcacttttttcacagccggattttatgactgtgcgctttcaaattgaatttcttaatttttcatgctataattcctctacaggactgtctgaaaatgctttttctgatatgttcttattacttatttacaaaaacaaacaaaaaatttacattataaaaaagaaagaggattataattctatgtggattgcagatcaatggaaagattatgaagtaatcgattgtagtaatggtgaaaaattagaacgctggggacaatacactctggtccgtccggatccgcaggtaatctgggatactccgaagacagaacgcggctggaaacatatgaacggtcactatcaccgcagtaagaaaggcggtggggaatgggaattcttcagtctcccggaacaatggcagattcattataaagaacttacattcaacctgaagccttttagtttcaaacataccggtctttttccggaacaggcaacaaactgggactggttctctgagaagatcagaaatgccggaagaccggtcaaagtgctgaatctttttgcttatacaggcggcgctaccctcgcagccgcggcagcaggagcaagtgttacccatgtagatgcttctaagggaatggttgcatgggcaaaggaaaatgcagcttcttccggattgtctgacagaccgatccgctggctggtcgatgactgtgtaaaattcgtagagcgtgagatccgccgcggcaatcactatgatgccatcattatggatcctccgtcatacggacgcggacctaaaggagaaatttggaagatcgaagatgcaattcatccgctgatcaaactgtgtacacagattttgtcggatgacccattattcttcttggtcaattcttacacaaccggacttgcaccggctgttttgacctatatgctcggaacggagcttaagaaatggaacggacatgtggattcacaggagattggacttcctgttacacattccggactggtgctgccttgtggagcttccgggagatgggaagcggtttaatacaataggaactgaatttcctggtcccgaataaaatatagaagcgctttctgtgcctaaaagtttctaaccatgatctcatatacacagaaagcgcttctatatttttattcagttacgttttcgcatgctctactcattaaacaacttctcatgaatgttttctatattctttataccatttttctgcttcttcagtggtcatatgcattccttcagccagttgttgaattgtttcatttttacccagattaacaagttctgccaaatgtataattgctctaataccttcgattcttcagatcctccacaatttcattataccgttttttatttaaccggtagaaaaataatacaacagctgttacaatccacagaatccccggaatggttgtaaatgcatatttcataatactgataaccgtatcattttgtgcctgatttgccacgtatccatattttccaagtaatgccgcaagcatcgctgtaccgattgccattccaatcttatttccaagagaaacgaatgcatattgaaatccatcattccgaagtccggttttccattctccgtattccacacagtccggaatgatcgcatagattgctgtattaaatcctgaaaaaaagaactgtgtaacacctgccaaaatatagaatacaactgctgaatcttttacattaaagaaatacattgccagcattgaaatacctgttaaaaaggcaaatatcgaagctgtccttcctttattgttaagttttcggaatactggttgaaaacatgcggcaccgataatggatggaataataatgcacatagaataagtagtataataagatgcatttccttctacatatgtaaaataatataaaatgtcagcatttcttccatataatgtaaatccaaataaaacctgtccgattaatgcaagtatatacggtctgttctgcatcacggcttttaactgtactttaattgatattttttccttttccggaattgtcacctgctccttcgtcttcgcaaagcagaagaaatggcatgccgcaaatatacatccataaataattgctacaaataaatatccgttcttcgcactctggcttcccagctttccaatcaaaggtactgtaataatgttgataatcccgattgcaatcatagccgcaaccgaacgcgaagtattaatttttgcccgttcatcaatgtcctgtgtcatcgcaccgcaaagtgttccatacggaatatttacacatgtgtatcccagcacaagcaggcaatatgtaataatcatatagataacctttgccgtatctggccagtccggatgtgcccagaatgtcaacattaaaagcactgccgtaatgggtgctgcaacaagcagccatggacggtaacgtccccatcttgtttttgtcttatccgtcaaccctccgacaatcggatcattaatcgcatcccagaatcttgaaaataacatcaatgctgaaacagccgccatactgattccaaacacatctgtataaaatatcattaaaaaattacttacaaacatccaactgaaattgcatccgacatcaccaaatccatatgcaattttactgatcaatggcacttttccattcttaccctcgtttcccatggctcctccttatcagcgtttctgacaaaacttctgttctctcctgatctaatctttattcctgtacattaatgattactttcatcgttgtttcccggttatcatcgatatactgataagctttcagatactcctggaatgcaaatgtttttgaaatcagtggtcttaaatgaaccttttcttcatttacaagtctgattccgtcaacatagtcatcgtgccggtacatcattgtgctcttgatatccagttcatgatcattatccaccgcaagatcaatctctgccattcctgcaaacactgcaaccaatacaataatgcttccttttcttgcatacttgattgcctgtcccattgtgatgttatttcctgcacaatcataaatcacatcggctttgtctggtccgaatgtttccaacattgcttcaccgaaatctttttcttttgtattcacacagacatcaatgccacattctttcgccttatccagacggagatcactgacatccgtgatcataacttttgctgctcccattccctttgctgcctgtgccacaagattaccaatcggaccggcaccaagcacggcaatgttcattcctttcacatcaccaacctgctttactccgtgaactgcaacagccagtggctcgatcattgcaccttcttcatatgacatttcttccggaattggtgttactttcgatgcatctactgcaaaatattctgatgctgttccggttgtctggaatcccataacttttaattcttcacacaaattgtattttccgtgtctgcatggataacattctccgcaataaacctgtggctcaattgttactttctgaccttcgtgaaatactgtcacatctttcccaagttttacaacttcaccggatacttcatgtccctgtgttaccggatatgaggtaaatggatgcttaccgtgatatacatgaatatcagaaccacaaatgccgatattcataatctttaccaatacctgatcatcttttacctccggaactggtacctctctgaaaataatctctcctggatttgtcattacctgctgtaacatattgttttcctccttcattcttttatattgtcttttattaaatgttttattaaagtaattacattattgtacaaccactctattttgtcaatatatgaatgcctatttctacttgttgcacaagtttgatcaacttttttatgcatatttaccaactggatatgcatagaatttgccactggcaacttctcttgcatacttagatatctataaaacctgccaattgcagcttcttccgaacatctgacaataaaaaaagaggtaaatattcaaagtccgtaatcattacgagccttgaatttcacctcagtttttcattcttattctttttcctacaacatatcaaatttataaatgctgtatatattcagagaggaaatgttttgccgctccgacagctgatgcctctcttttataggagcaattttttaagtaacgtacatcatgttcaaaaccattatatgccatcactttttcccccagtggtatcatatactctgataaataccccccgacttctcctccaagtatgatatctgtgtcatacgccattcgcagattggaaatcaaaatagccagattatccagatactgattccatttttccacagtctttgtatttttctgctccactttttccataaattgttccaacgtcatttcctgctcttcatcagtcaatgcactggctgcgcaataggcatctgcacacccggcttttccgcaataacatttctttcctcccggcaccagaatcatatgtccgaattctcctgctttctgattctgaccagccaccagttttccattaatacagaatgcgccgcctaatgtattgttgagcgaaagatacacagcatcctgatattcatgcatatcttctgccatcatcgcagcatttgcatcatttgcaaaatacaccggataagaaaatacctgttccagaaagctcagactgaaattctccaattgcagtgcatgagatttcacaaccattctattcgcctgatcaataataccgggaatcgaaattccgattcctaatatcttttcccggtcttctacatccttcaggaagtcctccaccatttcagctacttttaagcaataagatgtttctgttgaaaattttaaccgcatccggattgttttttctatttcatactgcatgttcagcaatacgattcccagatgatttgctgtgatcactacaccgactgcatatttatatgccggattaatccctatccgttttgctttacgaccgccggtagattcatattctcctatctcgatgaccatattccggtcgatcagttcgtttacattagaaagcaccgtcggcatacttaagctcagattctgcgccagctctgcctttgatgtaattttattattgatgatatagtttacaattttagattttgtaatattctttttttcatttcgccctgccatatcagacctcttttataaattattttacaaaagtatcttagtccttttttgctattctgtaaagaataaatatgttgcttctaaaaaactttttcccaaggcacaacgatataaaacaagccaccgggacagataccactcttttttctccatcccaatggctcaatttaatattcctattacatccgctaacgaatcacagacccgatacgtaagttcccgtatctcctgtgtcggctgcacaagatccggcaccatgatcacctgcatgcctgcctgatgtgccgacaggattcctcctggcgcatcttcaaacgccatacaatattccggctgtattcccagactttcacatgctttctgataaatctccggatccggcttcgctttcttaaccatatctccacagaccacactgtcaaaatacgaatctattccggcccggatcagattccccatggcatactctctgctggaagatgtcgctactgccatcttatgtccttgcgattttccataagccagcagttcttttgcaccttttttcagcggaagaccttctttatccacaattttccagaagttatcccgtgtcagttttccaaattcttcaaatggaaagtcttcccggatatattttctgaaatattcattccggcctgcgcggttcattccgagtgtgtgatagatgacgtcccccatatgcgggattcccaattcatcacctgcgatctcccatgagcgctgtacaatacgctcagaatcgaacaacagaccatccatgtcaaatataaaagcttttatatccatcctagaactctatgcctcttccaagtgcatccttcagataatctgcaacttcttctaatttatgtacggcctccatcttctcttcgaattcatccccgatggattccttattaatgagtgcctgctgaatcttctttacatctttgattaaattctctgtcatatcaaaaacctcccttttactgtctatcaggaaatttactttccgatgatcgatttacctcaatgtatgtatcagcattataacacaaaactttttactattctctgaaattatgttacaatttgattaatttttgcaaattattatctttttctcagatttgttcatgcatcattcgaacgaattcttccattacacgtgttttatatttgtgtgtcttgtaatagaagaatacttttctctttgcttcttccccatctaatttgtagtacaccagattttcaaatgtcgggagctggcttaccaggatatcactgatgaatgttgctccaagctgcgtagacgaggccatatatgctgtcgactgctgattgaattccaacacaatattgggcttaaatccaacatttcggcacagcctgtctcctctggttctggtatcatttccctgagtcagcataataaacggaagatctgcaaatctccctaacggaactgccggatatttctggttcagataatttttatttttgatattcttataagaaagctgatacattcccagttcttcatttacggcaaaatgttttggaaccgcaagtaatatattttcttcgcaatataattctttattatatagaatactgtcatagtgataattatcaatgacaaaatccagcgcattactgcccagcatttcttccagttcggctgtattcccctctatcagctgaatatgtacatccggaaatttctgattaaattgggtgatcagagacggtaccacatatgcggcaaacagcgtacttgctcctactgcaagattccccgtcttcagacccgccaggtcattgatgtaattctctacccgctgttcgatctgggtgatctcctccgctgcctcaatatatacttttccgacctctgtaagctgaagcggtgttgtacttctgtcaaataacggttccccgataatctcttcaatctttttgatccttgcactcaaagacggctgactgatgtacagattctgtgccgctttggtaaaacttctttctttatacacttcataaacatattttttccatacaaacatacacgtaacctctcatatcctgctatcatctgtttcctcttttcacatgacagctatagtcagactcttataattgttataacactataagtattagattctctgtccacacggacgtatcattatattaatgaaacaattattccaatatgaatttggggtttattggaataaagataaaataataaaaagcggggaataaaattatgaaaccaatcgtacgcgccgggcgcatgaaaccagtacactctgatatccgtggtccattattcgtagaagctatgaaacgccagaaacaggggatcgatatcttaaaattaaataccgggaatcctgcaacctttggctttggtctgcctgacagcatcaaaaacgctctgatagaacacatgcaggacggtgtcggctactgtgacttcaaaggaatgcctcaggcaagacaggcaatctgtgattatgagaccagtaaagggatcaaaggtatcacatcagatgatgtattcatcggtaacggtgtcagcgaagttgtatcgttcgctttaacacctttgttaaatgatggagatgaagtcttagttccttctcctagttactccctctggggcaattccgtatatctcgaagacggtaaaccggtcttctatacctgtgatgaacaggccaactggtatccggacattaaggatatccgttccaagatcacagataagacaaaagcaatcgttatcatcaatccgaataacccgaccggtgtactctatccaaaggaactccttcttgagatcatccagattgcaagagaatccggacttctgatctttgcagatgaaatctatgaccgtctcgttatggatggcaaacagcacatctctcttgcttcactgacagaggatgttccggtcattacattaaacggtctgtccaaatcacactgtctgtgcggataccgctgcggatggatggtcatcagcggtccaagagaactgaccgaagattacagacaaggcatcatccagttaacatctctgcgtctgtgcgccaataccatggcacagatcgtcatccctgcagctcttgatgatatggagacacctgcttctatggttcggccgggtggcagaatctatgagcagcgtgaagcaaccgttcgtgaacttgagaagatcgacggtctgtcatttgtaaaaaatgacgctgcattctatgtcttcccgaaactggacgtgaagaaatttaacatcaccaatgacaagcagtttgcccatgatctgctggatgtcaccaatatcctgctcgttcccggaagtggattcgactggaaagatccggatcacttccgtatcgtcatgcttccgcaggcagatatcttaagtgatgcgattcgccggatgggaacattccttgacggatataagcagaaataa

SEQ ID NO: 514 - DNA, 8063 bp, unidentified
  source 1..8063: mol_type = unassigned DNA
tcactcgatatagatcattttctttgtcatccctccgtcgatcgttacgttctcgccgttcataaaatcattttcctcctggcagatgaacaggcacaaacgggcgatgtcttccggtttacctactcgccccgacggatgttgggcgtgatcttctgggcgaagctgttcgtagtcgcgcgtctcgatccagcccggcgaaatcgagttgaccgtgatatgccattgggcaagcgatagtgcaagggcgtgtgtcagcgaatagataccgcctttggatgccgcataaccttcgctgccgggttcgctcatcagatagcgagtggaacagatattgacgatccgtccgaacggattgggtgcctcctgtgattggcggtgaatggccaatctgcgggaagtgatgaaaaccggacgcaagttcacggataatatccggtcgaaatcttccacaccggtttccgtgataggggagaaacaactgattcccgcattgttgattatgatatcgatatcgccccattccttgaaaatctgctgcatgcagttctctagcgcttcttggtcacttacgtcaacatggaaaaaagaggttccggtctgcaacgctgtctcttttcccgccgcttcgttacggtcgcagaacgccacgcggtgtccggcggaacggaaagctcttacgatcgctttgcctataccttccgcacctcctgttacaaagactctcctggttttgtggataacggttgttttcctaccattgtacggatggttcgtacgtccctccttgcgggatttatattcttcgtatttcttttccagatagttgtctgccatgatctttcgctttttaataggatggcaaaagtaatcataattgaatctatttacaatggttgtaggtgaacgatatgcaatcggggaattattgtggattcggagcacgaagttgccaaaatgccacggccgctgcggctgccacattaagtgaatcgacaccgtgcgacatggggatgcggacaacatagtcggctgcggcaatcgtttcctgcgaaagtccgtccccttcagtccccatcacgattgccaatctgggttcggttgccaagacaggattatcgatggaaatagaattgtctgtgagtgccatggctgccgtacgaaaacccagtcttcccaagtcgccaagagaaccgtccatccaagtccagggcacaagaaagactgtccccattgacactctgactgcgcgacggttcaatgggtcacaagagttgcgtgtcagtaatacggcatcaattccaagagccgccgccgaacggaaaatagcaccgatattggttgtgtcgacaaccccatcgattacgacgatgcgtcgggccttctggcatacatcttccatgccgcgtggctcaggacgacgcatggcgcaaaggacaccgcgtgtcaggacatagccggtcaatgtcgcaagcaactccctttctcctgtatagacaggcacgttgctacaacgttcaatgatatcggaagcatctcctgtgatatgcttgtgctcgcacaaaatggctaaaggttcgtagccggcatccagagccctcgtgataacctttgggctttctacgataaaaatacctttgtctggctcgatacgattgcgcaactgagcttcggtgagtgtacagaacatctcgactccgggatgagataaagaagatatttcgataacaggcatttgacaagtcttttaataaatagcaatcttgattacaccgtccagtttgttttcaaaaactcgataagcctcctcgatctcgttcaatgcaaagcggtgggtgataaggggagtggtgtctatcttgccttcctcaatcagttggagaatctcagcacaatcacaaccgtctactccaccggttttgaaaatcaggttcttaccatacatgtcaggcagagggaaaagtagaggtttatcgtaaagagccacgattgtgactgtcgcgtttggacgagcgcattcccacgccatctggaaactgtcttcgctccctgccacttccagaacaacatctgctccgccgtggtcactgtttttgagtacaaactccttacagttatcaggagtcgtgatcaatacgtcagggtaatgttcacggataaaccgaaccctttcaggagacttttcacagacaatgatatgcttcgggttcttcagcatcgagcagagtaaagtacaaattccggtaggccctgcaccgatgatgaggaccgtgtctttctccgtaatttccgagatgcgagtagcccaaaaacctgtggcaagtatgtctccgacaaacagagcctgctcgtcactgaccgtgtcgggaatgcgattcagtccttgatcggcatagggtactctgacatattccgcctgtcctccgtcgatacggcagcctaaagcccagccaccgttgaggtcggtacaattattgacatatccgtgttggcaaaagaagcattttccacagaaagtctcgacgttcacggttactctgtctccgggtttgacagatgtgacacctgttcccacttcttcgacgacacctaccatttcatgtccgacggttgttccgggtattgcgcggggtacacttccgtgcttgatatgcaggtcactggtgcagatactacccagggtcacacgcacgatcgcatcccgtgcatccgtaattttcggtttcggtttttctgttaaaccaaatttgcctttttcaatatatgtatatgcaagcatgatatgatctttattgattaattgattctttctataacaaaggtagcaataatcggtgagatatggaaaagtagagcaaagttattgagaaataggctttttaagaaaatagcttctgcaactgaatgacggaaaaagccaagtctgaaccaagttaggacttcgctacgttaccgattcgttaccctgcataattggtggtatcggaacttaggaagaatagagaaatacgctattatatagtgagttactgacaactcatgcaacaatttcggtaacggatgatagttgcaccgttcctctgcgatttgcgtatcgacgaaggactcttcaccaagtaattttgaaaccaaaaaagttcagaaagatgaagagtacattttcagttatcttctacctcaaacggcaggtagtgaaaaaagacggtacagtgcccgtcatgggacgtatcacggtggacggaagccagacacaattcagttgcaagctgaccgtcgatccgaagttatgggacaccaaaggcgggcgtgtcacgggcagaagcacggcggcactcgaaacgaaccgcctgctcgacaagatgcgcgtgcgcatcaacaagcattatcaggaaatcatggagcgtgacaactacgtcacggcggaaaaggtcaagaacgcctttctcggacttgaacaccgctaccataccttgatgcaggtattcaaccggcataatgaggactacgagaagcaggtggaggcgggcatgaaaaccaaagccacgctttccaagtacaagacagtgtacaagcatctgcaagagttcctcaacatccgctaccatgtgaaggacattgccttgaaggaacttacccctgcattcatctccgacttcgagatgttcctccgcacggacaagcattgctgtaccaataccgtatggctgtacgtgtgcccgctgcggacgatggtgttcatcgccatcaacaacgagtggctgacgcgcgacccgttcagggagtacgaaatcaagaaggaggaaacgacccgcagcttcctgacgaaagacgaaatacggcagttgatggaagggaatctgaagaacgccaagcaggaactttaccgcgacctatacctgttttgcgcattcacgggcttgtccttcgccgatatgcgcaatctcacagaggaaaatatccgaacctacttcgacgaccatgagtggatcaacatcaaccgtcagaaaacgggcgtggtttccaacatccgcttgcttgacatcgccaagcggattatcgacaaataccggggattgtgtgaggacggcaggatatttcccgttccccactacatgacctgtctatacgggatacgtgccgttgccaaacgttgcggcatcacgaagcatatcacgtggcatcagagtcgccatacggcagccacgacggtgttcctctccaacggcgtgcccattgaaacggtgagttccatactggggcacaaaagtataaagactacccagatttatgcgaagataaccaaggagaaactcaaccaagacatggaaagtcttgccgccaagttgaacaccattgaggaatttaccggatgtaacatctaaagcagaacagccatgaaacgaggaatcattatcatagaggacaagaaggtcagcgtaaccggtaacgaggtatggatgaccgccaccgaaatcgccgggctgttccatgcaggcgttccggcagtgaacgccgccatcaaagccgtccgcaagtcggacgtgctgaacgactatgagatatgccgctacatgcggcttgaaaacggtttgtatgccgatgtttatgcccttgaaatcatcatccccatcgccttccggctgaacacctactgcacgcacgtgttccgaaggtggcttgtggagaaggctcttgccaaagaaaagcagcaggcatacgtgatgctcatccacaaggcaaacggatattgctgaacacacaaagacattgatgatgccgacaacagaaagaggaaacggacagctccacgaccggggttgtccgtttcctctttgtgcatacagccgccttatctcaccctttcagcggttttctataatttgcttccaacacttcgcgcagtcccgattccggataaagcacctttcctgccagcaggataaaaggcaatatcctgttgttgcggtattcctgcaaggtgcggcggctcacgcggagcagttccgccacttccttgtccgtcaggtatcgctccccatccaatggcggacggtaactttccaaaaaatcggagagccatttggattccttccgcatcttttgcagcaatacggctactgattcacaatccatcgtgataacattgttgtcttcgttcataatcatatccgttttaagtcagacaaggctatctgtcagtggggcaaatcgtaccgataagcgggatgagccttttcacatcttccggcttgtagtaaaaacggaagccgatttgcgaataaccgataaagcccctgtcacgcagtttctgcaacgtgcgttggctgattctcaactgcccacaaacctcttcgcccgtgagccacttgccgagccttttggcatcccccttgcgctgcaaggcggcgaccttctccacgaaggcatccgtttgtgccaccatttcctcgaaggtctttttctcgatagatactatttccatatacaaaacgatttttgaatttgctgcaaaggtaacggcacgggctgaaacgcccatcggttttgtctgaatggcagcttgttgcgccgattgtccgggttgcggagcctttttcataaaaatcttacgtgagtcacgtagtgagttgttaaagccgcccttttccattgccgaactttgccgcagaaacaataaaacaagcgcatatatgaaagtgataacgattgaaagttccgcataccggactatgctggaacagatagcggagatagcaggatatgtccgcgaagcgaaagaagagcgacggcggaaggaggcggaaacgaaagaccgcctgctcaatacggcacaagccgccgaactgctgaacgtgagtacccgtaccctgcaacggatgagggacgaccatcgcatagaatatgtgatagtacgcggcacttgccgctaccgcctctccgaagtgcaaagactgttggaaacaaataccatcaggaacaaggaagaaacagtggaagccctgctgcacaactattcgttgcggacgggcggcaagaaaaccgacaaaggaaggaggaaataagtatggaactgcttacccgaaacaatttcgagggatggatgcagaaaatcctcgaacgcctcgaccgtcaggacgagctgctgctggctatgaaggcgcaggggcaacaaccgccgttcctgtccgaaggcatccgccttttcgacaatcaggacctgtgcatgctcctccagatcagcaagcgtaccctgcaacgctaccgcagtgagggcgcactctcctacaagaccttgggcaaaaaaacctattacagcgaaacggacgtgttggacttcctttccaaacatgtgaaggacttccggcagaacgacatcgagttctacaaggcacgcatccgcaatatgttcaataaataaccaattaaaatttaatcagatggcaaagaaaaaagacgaaaaggacgtgctgattgtccgtgacgagaagacgggtgagatcagcgtggtagccggactgaatgcggacggcacgcccaagcgcacccccgccaaggcggagaacgcgcagagtttcctgcaattcgaccggcacggagacgtgctggacaacttcttcaggaacttcttccgccagtgcaaggaacccagccgcttcggtttctaccgggttgcggcagagcaggccgacaatctgctggaagtgatgaaggagctgctgaagaaccccgaagcctacagtgaattgcttgcaccccacaaggtggacacttccggctacgagcaggaagtgcagaaagtgcaggaggaacagcaacagcaaaaacaagaagaacaacaacctgatcaggaaaataaagaaaatcaggaagaacctaaaaatcaagaagaaatggaacagaaacaagaacagaatcaggaagccccgcagcagacgcagggcagacagggctaccagcccatcgacgagaacaaaatcaactggcaggagctggaagagcgttggggcgtgaaacgcgacgagcttgaaaagtccggcgaccttcagaagatgctcaactacggtaaatcagacttggtgaaggtcacgcccaatttcggcggcgaggcatttgaattggacgcgcgactctccttcaagaaggacggcgagggcaatgtcagccttgtgccacacttcatccgcaaggagcagaaactggaagaatacaaggaacacaagttttccgatgaagaccgcaagaacctccgcgagacgggcaacctcggcagggtcgtggaccttgtggacaaggaaacgggtgaaatcacaccctcattcgtcagcatagaccgcaagacgaacgagattacggatgtgccggcaagcaaggtgcgcataccggagcgtatcggcaaaacggaaatcaccaagcaggagcaggacatgctccgcgccgggctgcccgtgcgtgacaagctcatcgagcgcaacgacggtaggaagttcgtcaccaccctgcaagtgaacgtggaacagcgcggtgtggagttcgtgccgggcacaggcaggtcgccacgtaccgcacagacgcaggaagccaaggagaatcccagccaagcacaagcacaagcgcagtcgcaaggtacggaaaatgccgccggtacgaacaaggagcaacgccgcaacacatggaccaacgaggacggcagcatccgctccatcagcaaatggagcaatgtgaactttaccgaccagcagaaagccgactacgtggcgggcagagccgtgaggctggagaacgtaactgacaagcagggcttccacgccacgatgtacatcaagttcaacccggaaaagggacgcccgtaccgctacgataccaatcccgacaacgcgcagcaggtcgccccaagcaacgagagccgcacgcaggtggccgtgaacaacgagggcaagaccaacgaggcgaccaagaacctgaatgagccgttgcagaagggacagaccacccccaaggacgacagccagcagcggcagcaggagaaaccgcagaagagaacgggcaagggcatgaagatgtaa

SEQ ID NO: 515 - DNA, 8349 bp, unidentified
  source 1..8349: mol_type = unassigned DNA
cccgtaccatgttataatagaactaggcaaaaacaagactattataacaacttttttgaaattgggcaacagaaaatcaacttcagtttcttcgaattgagcctacccgacgacgatccagtctataccctgaaaaaagtattggaggaattagatttttcgggcctgctggcctgttattcagataagggaagaaccgggtttaacccaatcatgctgtattctgttgttacctacgcaaacatgcgcggggtaagagctgttgaccgtattgtagacttatgccagagagatcttgcttttatctggctgaccaaagggcagaagccccagcgggatgttttttacgattttaaaggaaaaaagctgacgggagaagccctggatgaactgaattaccagttcatgcgccgcttggagaaggaaggccttatcacactcaaagagctttacattgacggaacaaagcttgaagcgaacgcaaacagatacacgttcgtctggcgtggaagcctcaactatcaccttgcctgcctgctggatgccatcgatgccctttatgccaagtacaacgcattcctgtcggagaatggatatgggacgaaatacgatctcggggatgcccatatgttcgtgatcgaaggaatggacaaagtcaggaaggtcatcgaagaaaacaggaaacggaaactgacaaagcataaaaagatctccaataacaccctcattgagatcgaccactgttctccccttgagatcctgaagctgcagaaaaacctgatgtggattgcgcaaggggaagggattgaattcgttttcggaaaagggaaacataagccggggattcagaaactctatgaggaactggaagaatgcggcagccgcctgatggggtataaggaatgcttcgagaacatgggaaaagaccggaacagctattccaagacggacctggaagcaacattcatgcggatgaaagaggatcatatgctcaacgggcagctaaagccggcatacaatgtccagatcgcagtagagaattactttatagtccacggatatgtgagtaatgaccggacagactatcatacgctgatccccgttttgaaaaagcaccagaatgcgtttggagacaccctggaggcggtgacggccgacagcggctactgcagtgaaaagaacctgctgtatctcaaagagaacgggatccgaagctatatcaagcttccggatcatgagaagcggaaaacccgggcttataaggaagatatcgggaagtattacaacatgacatacgccgtctttgaggatgaacgctattacatctgccatgatggaagagagctgcgtcatatccggacggaaagcaaagagcaggagggttatacccagacggtagaggtatatggctgtgcggactgcatggggtgtgagcataaatccaaatgtctttataaatacaatgctgggaagaatccagaccggaataaagtcatgaagatcaacgaacgctgggaagaactgcgggaagaatccaatgcaaatatccagagtgaggaagggattttgaaacggcagatccgttccatccagacagaaggacactttggagatatcaaggaaaacgaaagcttccgtcggttcaactaccggtcagaggagaaagtttataaagagttcatgctgtatgcgatcggacgcaacatcatgaaataccatcggttcttacatcatgaaatcgaaacgtacgaagggaaaaaggagcagaaagcagcttagccgaagatgtgcttcaaaaaatccagacaagggggttttgcgccctaaaatagaagctgcaaaaggaggagacaatcccatagagaattccggcttaaaaaaagcccggattctatgggaatgtctcctcactagctgtcagaggtaaaaaatcggtattaaccgacagcccctttaatccttttaataatgaaaagatacgttcgacagtctctttttttatagaaaatttatattttttacattatttttagagcatttcacttaaccgggaagtttcccgtatttcattggatttcgagtcgaaaaatccttgctaataaatattctctatgttataataaatgctgcgggcaatgacaaaaaattaacaataccgttaaagcccggtaaactcgcactttttaatgaatatggaggagaaaacatggcaaaaaaaatcgttttggcgggtgcatgccgtacagccatcggtactatgggcggaagcttaagcacaactccggcagctgagctgggtgctattgttattaaggaagctttaaacagagcgggagttgctcccgaagcagttgatcaggtatatatgggatgtgtaatccaggctggccttggtcagaatgtggcacgtcaggcatctatcaaagctggtttacctattgaggttccggcagttaccatgaacgttgtttgtggttccggtttgaactgtgtgaaccaggctgcacagatgattctcgcaggcgatgcggatatcgttattgcaggcggtatggaaaatatgtctatggctccttatgcgattcctcagggacgttatggatacagaatgggtaacgccacaatggtggataccatggttaatgatgctctcaccgatgcttttaatcagtatcatatgggtatcactgctgaaaacattgcagagcagtggggacagacaagagagcagctggacgagtttgcagcatggagccagcagaaggctgttgcagctcaggaagcaggaaaattcgatgcagaaatcgttcctgtggaagtgaagaagaaaaaagaaaccatcattgtcaataaggatgaaggccctcgtccgggaactacggcagaaggcattgcaaagcttcgtcctgcattcaaaaaagatggtattgtaaccgcagcgaatgcttccggaatcaatgacggcgctgctgcagttatcgttatgagtgaagaaaaagcgaaagaacttggtgttacacctatggctacatgggtagccggcgcactggctggcgtggatcctactatcatgggtatcggacctgttgctgcaaccaagaaggttatggctaagacaggaatgaatattgatgatttcgatctgattgaggcaaatgaggcgtttgccgcacagtctctggcagttggacatgatcttggcattgataatgacaagctgaatgtaaacggcggagctatcgcactgggacatcctgtaggagcatccggatgccgtattctggttactctgcttcatgagatggtcagaagagatgcgaagaagggtcttgcgactctgtgcatcggcggcggaatgggctgtgcaaccatcgttgaaagagattaatatagcattttaaaagggaatgattagtggactttttgtctgctaatcattcgttatgcagtaaaggtttctgaatattgttgattaaccgccgcaatggcgggagaatccgtctgagggcggaaataagaaagggagagtggcatggaatatattgtttatgagcagaagggtgcttatgcggttattactatcagccgtgaaaaggcgctgaacgcactgaattcacaggttctggatgaactggacaagactcttgatggagtgaacctggacgaagtgagatgtctgattcttaccggagcaggaacaaagtcttttgttgccggagcggacatcggagaaatgagtacattgacaaaggtcgaaggagaagctttcggcaagaagggaaatgatgttttccgtaaactggaaaccttccccattcccgttatcgctgctgtaaacggttttgccctgggcggcggctgtgagatttccatgagctgtgatatcagaatctgttctgataatgcagtattcggacagcctgaggttggcctgggaatcactcccggattcggcggaacacagagactggcccgtctggttggaccgggaatggctaagcagatgatttacaccgcaagaaatatcaaggctgacgaggctctgagaattggtcttgttaatgcggtttatactcaggaagagctgatgggagccgctgagaagatggctgccggaattgcaaagaatgcgcctattgctgtgagaaactgcaagaaagctatcaatgatggcctggatgccgatatggatgaggcgattgtaatcgaggagaagctgtttggcgattgcttcgagagttatgatcagaaagagggaatggctgctttcctggagaagaggaaagtggagaagtttcttaataaataaggaattgtaatccgtcactccgccgggtacaggggctgttgctccttgtaccccggctcaattataaaacacaaggaggctatacaacatgaaggttggtattattggtgcaggtacaatgggatccggtattgcgcaggcttttgcccagacagaaggatacgaagtatttttgtgcgacattaatgaagaatttgctgctaacggcaagaacagaattgcaaaggctctggagaagagagttgcaaaaggaaaaatggagcaggctgcggctgacgcaatcctcgctaaaatcactaccggtgtaaagaccatctgtacagactgtgatctggttgtggaagcagctctggaagttatggatatcaagaaacagacctttaaggaactgcaggatatctgcaagaaggattgtatcttcgctaccaacacttcttctctttccatcactgaaatcggcgcaggccttgacagacccgttatcggtatgcatttcttcaatcccgctcctgttatgaagctggttgaggttatcgcaggactgaatacacctgactgcgttgttgaaaaaatcaaagaggtttccgcagctatcggaaaaactcctgtacaggtaaatgaagcagcaggcttcgttgttaacagaatccttgttcccatgattaacgaagcaatcggtatttatgcagaaggcgttgcttccgtagaagatatcgataccgctatgaagctgggcgctaaccatcccatgggacctctggctctgggcgatatgattggcctggatatcgttctggctatcatggaggttctggaatctgaaacaggtgacccgaagtaccgtcctcacacactgcttaagaagatggttcgtggcggacagcttggacagaagaccggcaagggcttctatgattacagcaagtaaacagcccgcggttttcgcgattaataaagataaaacggaggagtaattaatcatggattttactttaagcaaagagcatgaaatggcaagaactcttttcagagaatttgcagaaaaagaagtaaagcctcttgcacaggaggttgatgaaacagaggagttccccagggaaaccgttgaaaaaatggctaagcttggcttctttggaatcccggttccgaaggaatacggcggacagggatgcgatcctttaacctatgctatgtgtgtggaagaactgtctaaggtctgcggcaccacaggcgttattgtatccgcacatacctctctttgctgtgaccctatcatgacctatggtacggaagagcagaagcagaaatatctggttccccttgcaaagggcgagaagctgggcgcattcggtctgaccgagcccggagccggtaccgatgcacagggacagcagacaaaggcttatctggatggagatgaatgggttcttaacggatccaagattttcatcaccaatggtaaagaagcggatgtttatgtaattttcgctgttaccagtgttgtagaagataaaagaggcagaaagaaaaaaatgatttctgcatttatcgtggaaaaaggaactcccggcttcacctttggtaccaaagagaagaagatgggtatccgcggttcttccacatatgagctgatcttcaccgactgcagaatccccaaggataatctgcttggcgcggaaggcaagggctttggtattgccatgcatactctggacggcggacgtatcggtatcgctgctcaggctcttggtcttgcggaaggagctcttgagcgtaccgttgaatacgtaaaagaaagaaaacagttcggcagagcaatcggcgctttccagaacacacagttccagcttgcagatatggataccaaggtagaatgtgctcagctgctggtttacaaggctgctatggcaaaagctacccagaaggtttattccgtggaagctgccaaggctaaactgtatgcggcagaggttgccatggaagttacaaccaaggcagttcagctgcacggcggttatggttatacaagagagtacgatgttgagcgcatgatgcgtgatgccaagattaccgagatctatgaaggaacaagcgaagttcagagaatggtaatctccggtgcactgttgaaataacaccgctgaggttaagagaatataagaaaacaaggagaggaatacaatgaaaattgttgtttgtattaagcaggtacctgatacaaagggcggcgttaaattcaatcccgatggtacgctggacagaggtgctatgcttacaatcatgaaccctgatgataaggcaggtctggaagctgcactgagactgaaggacgagtacggtgcagaagttaccgtaatcacaatgggtcttcccaaggcagaagaggttctgcgcgaagctatggcgatgggcgcagataacggtattctcgtaactgacagagtactgggcggcgctgatacatgggcaacctcccagacaattgccggagctatccgcaatctggaatatgatctgatcatcacaggccgtcaggctatcgatggtgataccgcacaggtaggacctcagatttccgaacatctgggaatcccggttgtctcctatgcacagaaaatcaaagtggaaggcgacagcgtaatcgttgagcgtcagttcgatgacagatatcatgtactgaaagcgaaaatgccctgcctgatcacagctctgggcgagctgaatgagccccgttacatgactcccggcggaattttcgatgcttacaagaaagaaatcaccgtatggggaagagcaaatctggttgatgtggacgattccaatctgggtctgaagggatcacccacacagattgccaaggcttccgataaagtaagaaagggcgcaggacagaaggtagttctggatactccggaagaatctgcatctttcattgttgaaaagttacaggaaaaacacgttatttaataataaacagaaaagtgtggtgaataaggatgaatttagaagaatataaaggagtatttgtctttgcacagcaggttgataacgtagtgagcggaatcgcatttgaactgattggcaaaggtaaagatctggcaaaagatttaggaactgaagtgactgcagtactggttggttctgatgtgaagggtcttgctgacgaactggctgcttatggagctgataaggtaatcgttgttgacgatcctgaattgaaagaatacagaacagagccctatgcacatgcactggcatctgtaatcgagaagtataaacctgaaattttcctggttggagctactgcaatcggccgtgacctgggccctcgtgtctccgcgagaatccatacaggtctgaccgcagactgtacacagctggatatcggtgatttcccgttaaatcctatccccggacaggagcagaagcacaatcagctgctgatgacccgtcccgcattcggcggcaatacgattgcaactatcgcatgcccgaatttccgtcctcagatggctactgtacgccccggcgttatgcagaaggctcctaaggtggaaggtgctaaggctgtagtggaagagttcaatcccggattcactccgaacaacaaatatgtggaaatcatggaagttgttaaatccgttgctgatacagcagatatcatggatgcaaagattctggtatccggcggacgtggagtatgcagccctgagaacttcaaaattcttcaggatctggcagatgcagtaggtggaaccgtaagctgttcccgtgcagttgttgatgcaggctggaagcctaaggatcttcaggttggacagaccggtaagactgttcgccctaatgtatattttgcaatcggtatttccggagctatccagcatctggctggtatggaagaatccgatctcatcatcgctatcaataaggatgaaacagctcctatctttgacgtagctgactacggcatcgtaggtgacctgaacaagattgttcctgtccttaccgaaaaaatcaaagaagcgaaagctgcaaaataa

SEQ ID NO: 516 - DNA, 5528 bp, unidentified
  source 1..5528: mol_type = unassigned DNA
atgggaaccgttttcaataaaaaggagcttttggtcctcttgcaggattttcactgccttacggggctgcgctccgccgtttttgattcgtatggaatcgaagtgcttgcctatccgccggaactgccagcttattgccgcttgatccgcagtgtgcctgatggcaagaccggctgttacctgtgtgaccaggcggcttgccgcaaggcaacgcggcaaaaacagacgatcatctacccctgccatgcgggattgatcgaagtgatcacgccggtccaaatcgatggtgctgttgtgggctttttgctgttgagccacattgtacagggggccgatgagcagagcgagtggagctatgcgcaaaaatgctgctcggcttacgcaattgataaaacggcactgcaaaaagcctataataccttgccgcgcacgccctatccggtgctgaaatcagcagcggatctgctggctttggcggcggctgcattgtaccaaaaagggctgacgcggctggcagcgggcagtgcgcaggaaaagctgagccactacctggcggaacatctggatgagacattgacaaacgaaacgatctgccgtgatctttcgttaagccgtaccgggctgtactatctttcccggcagctctatggctgcggcatcaacgagcagatcacgcacctgcgcatccaaaaggcaatgaagcttctttgcgatacgaatctgtccaatgcacagatctgccagcagatcggattcctggatgacaattacttttatcgtgttttccgtaaacaaaccggtctgacaccacgccagtaccgtgattctatcttagcagatacagcaaagactgagtagagacgattgttttcaatactggattattgttcaaacaattctgagggaagcggcaatattgaattgtggccggtgacgtgctataataaacccacatacggtaagccggcacggcgcaattttgactgctgccttacggaaaattcgcagctgcggagtataaactgctatgaaaaaatataagatcgcggtggccgggaccggctatgtggggctttcgattgccacgctgctttcccagcaccatcatgtgacggcggtggatatcctgccggaaaaggtcgcattgatcaacgcgcgcaaatcgccgatccgggatgattacatcgagaaatatctggctgagaaggagctagatctgaccgctacgctggacgcaaaggcagcctacgccgatgcggactttgtggtcattgctgcacccaccaactacgacaaccaaacccagcactttgacacctctgcagtggaggcagtcatccgtcttgtcgcggaggtcaatccaaatgccgtcatggtcatcaaatcgacgattcccgtgggctacacggtgtcggtgcgggaaaggctcggcagccggaacatcctgttcagcccggaatttctgcgggagtccaaggccctgtatgacaacctctacccgtcccgcatcatcgtcggcaccgaccccgaagatgcgcaccttgttgcagccgcccacgagtttgcggcgctgctgcaggagggggccatcaaggagaacattgatacgctcttcatgggctttaccgaggccgaggccgtcaagctgttcgccaacacctatctggcgctgcgcgttgcctatttcaatgagctggatacctacgcggagagcaagggcctgaacacgaagcagatcattgacggcgtatgtcttgacccgcgcatcggcagccattacaataaccccagcttcggctacggcggctactgcctgcccaaggacacgaagcagctgctggcaaactacgccgatgtgccggaaaatcttatcgaggccattgtggagtccaaccgtacccgcaaggacttcatcgctgaccgcgtgttgaagctggccgggtactacggctacgatcaggaaaatgagtttgacgaaagccgcgaaaggcccgtcacgatcggcgtctaccgcctgacgatgaagagcaacagcgacaacttccgccaaagctcgattcagggcgtcatgaagcgcatcaaggccaagggcgcacaggtcatcatctatgagcctacgctggaggacggtaagaccttcttcggttcggcagtggtcaacgatctggacaaattcaagcggcagagtcgggccattctggccaaccgctacgatgcctgcctcgacgatgtgcaggacaaggtctacacaagagatctattcggcagagactgaaacgcctttctgccgctttttgacagtggagtaaggctctccatgccattaccgcacaatatccctgtgacttttaaagagaggaacatctgttatatgaaatatgattatctggtagtcggctccggtctgtacggtgccatcttcgcccatgaggccaaggtccacggcaaatccgtgctggtcgtggataagcgccccaacattgcgggcaacatttataccgagaacatcgagggtatcaacgtccataagtatggtgcgcacatcttccacaccaacaacaaaaaggtctggaactatatcacccggtttgccgagttcaaccgctttacaaactctcccgttgccaactataagggtgagctgtattcgctgcccttcaacatgtatacctttaataaaatgtggggcgttgtaacaccggaggaggcagccgccaaaattgaggagcagcgccgtgagatcacccacgagccgcagaacctcgaggagcaggccatctcccttgtaggccgcgacatttatgaaaaactcatcaagggctacaccgaaaagcagtggggccgcgactgcaaggacctgcctgcttttatcatcaagcgcctgcctgtgcggctgacctttgacaacaactatttcaacgcgctgtatcagggcattcccatcggcggctacaccaagatgatcgccaatcttctggacggcatcgaggtgcggctgaacaccgattacctcgaaaacaaggccgcgctggacgcactggctgacaaaatcgtctacaccggcccgattgacgcttattttgactacaaactcggcacgctggagtaccgctctgtccggtttgagaatgagctgctcgacaagcccagcttccagggcaacgccgccgtcaactatacggaccgcgagacgccatggacccgcatcatcgagcacaaatggttcgagttcggcaaggacgagaacggcaacgacctgcccaaaacgatcatcagccgcgagtattcctctgagtggaagcccggtgacgagccgtattaccccgtcaacgatgctaaaaacggcgcactgtatgccgagtacaagaagctggccgacgccgagccgaaggtcatcttcggcggacgcctgggtgagtacaagtattacgacatggatcaggttatcgccgccgttctggaccgctgcgaaagcgagctgcactaaagtacagccaagcgaaggcacaaaatccaaaaggcagcaaagcagaccccaaaagctaaaatcggggtttactttgctgcccttttttatttgctcaatccgctggcaccgcttgccacaacgccgccgtccataagaatgtctgctccggtcagaaagcccagccgctcatccagaagaagcgcaaacaaagcggcgatttcttcaggctttccgttgcgcttgagggcggagtattttttgaatacatccgcctgcccgctttccagtgcgcccatcggcgtgtcaaagttgccgggggtcacgcttaagcagcgcacatttttcccgccaaagcgtgcggcatcggtcttggcaaaccaaattacaaaatgcttgctgatggcgtaggccagacccgggcgggcgtccttaggggcaatgcctgcccgcgccaccagctttttgatgaatttttcacggtcggtgcgcgccagcttgtacgcacccttgggcatgacaaactgcggggcaaggtaggcgctcatgctggaggtgtcgatcacacagccgcccggtgccatgacctcataaaaggcatcgttgatattcaccgtgcccagcgcattgccgcgaagaattttctctgcatcgcccatgtgagggctgagacccgcaatgtgcaataccgcttttacttcgccgcattcggcggcgtgtttggccagcgcaaagcagctttcacggtcggaaacatcacagctgaacgcctcagcctcgccgcctgcactgcgcagatcgttgactgccttttccagcttggacgccgtgcgccccaccaaaatcgtgtaatatccttcttcacagacgagcttcgccgtggcaagccccatgccgctgccgccgcctgtgataacacaaaccttcttcataataggcacccccttttctttgtgtcagtgcagggaatccagtgcgtggagatagcactcccactgctggtcattcatttgcataagcttgcagatagattcatacagcttcttcatgcgatttttccctcctgcttgagccatacagcgagatcatgcagtgtttccttgtagggacgcggggcaaagccaagctcgtttttcgctttggagcagtcaaaatggttgttgcgctccagattgtaaacggcaaactcggtcagcacagcaggcttaccggtcttggcggcgcgggcctccatctgcttggcggcaaaatgcgcaaaagacagcggcagataaaacaggcagccgcggcagccggtatcagccttgagcatctcacacagctccttcagcgaaacctcgtcattggaaaggatgtagcactctcccttgcgcccacggtcagcggcggcaatcgtgccggcggccagatcgcgcacatcgacaaggttgaacgagccctgcataccgatgggcatctcaccgttcaaaatctggatcagcgtgcgggtcgtctgcccgatggcggggtcgtttgggccaagaataccgctgggatgcaccacgcaggcattcagcccgtccgcggcggcgtccagtaccttctgggtcgccattgccttgctgcggctgtaccagccgaccacgcgatcatcatcgtagggaacaaagctgtatacctcatggatgctctcgcccttaggcagctcggggatggcgccggtgctggaaacatagacgaactttttgcactccgggtgatttttggcggcattcagcatattttcggtgccgcccacattgacggcgatgagtttttcactgtaattcgggttgatcgtcaccatgctcgcgcagtggatgcagacagtctggacgcccggttccacggcaaagaatttctcgcagtcctcggcactgcagaggtcaccctcaaaaatttcgacggccttcggcataaattttacagcggggtcgcccttcagcacaaaagcgcgcacggcatcaccgcgatccaaaagctgtgcgcagacattagtgcccataaatccggcagcaccggtgacaagatagatggttttcat

SEQ ID NO: 517 - DNA, 13378 bp, unidentified
  source 1..13378: mol_type = unassigned DNA
atggaagaagcattaattcaatataggaacgtagaaatccatcaacaggaactctgtgtgctgagcgatgtaaatctggaattgcgcaaaggagagttcgtctatctgatcgggaaggtaggttcgggaaaaacgagcctgctcaaaacactgtatggcgaactggacgtgatcgacggtgaagcggaagtattgggctataatatgcgttcaatcaaacgcaagcatatccctcagctgagaagaaagctgggaatcgtatttcaggactttcagctgctgacggatcgtaccgtatacaacaacctggaatttgtacttcgtgccaccggctggaagaacaagcgggaaattcaggaaaggatagaggaagtgctcgatttggtgggaatgtctaacaaaggctacaaactccccaatgaactttccggtggcgaacagcagcgcatcgtaatagcacgtgccgtactcaattctccggctattattctggcggacgaaccgaccggaaatctggatgtggagacaggtaagtccattgttgaattgttgcacaacatctgtgaatcgggttcttccgtggtgatgacgacgcacaatctgcaattgctgaaagaatatcccggcagcgtatatcgttgctccgagcatcgcataacggatgtgaccgacgaatacatgcccaggcagagaacaatagaaatagatttaaatatagataactaaaacagtaacgaaaatgaaagttttaaagtttggaggaacttccgtaggttctgctcagcgcatgaaggaagtagccaaattgattaccgatggtgaacagaagattgttgtcctttcagctatgtcaggtacaacaaacacattggtggaaatttcggactatctgtataagaagaatccggagggtgccaacgagattatcaataagctggaatcaaaatataaacagcacgttgatgaactttatgcaactcaggaatataaacagaaagggctggaagtcatcaagtctcactttgactacatccgctcctatactaaagaccttttcactttgttcgaagagaaagtggttttggcacagggagagcttatttctacggctatggtgaacttctacctgcaggaatgtggtgtgaagtccgtgttgctcccggctttggaattcatgcgtactgacaagaacgcggagccggaccccgtatatattaaggagaaactgcagacacaactggaactttatccggatatggagatttacatcacacaaggttttatctgccgcaatgcttacggtgagatcgataacctgcagcgtggtggcagcgattacaccgcttctttgatcggtgctgccgtgaatgcttctgaaatccagatatggacagatatcgacggtatgcacaacaacgacccgcgcattgttgacaagacagctccggttcgccagttgcattttgaagaagctgccgagttggcttacttcggtgcaaaaatcctgcatccgacttgcatccagcctgctaaatatgccaacatccctgtacgtctgttgaatacaatggacccggatgcgcccggaacgttgatttccaatgacacggagaaaggcaagatcaaagctgtagctgctaagaataacattacggctatcaagatcaagtcaagccgtatgttgctggctcacggtttcctgcgtaaagtcttcgaaatttttgaaagctaccagacttccatcgacatgatctgtacttctgaggtaggtgtatctgttacgatagacaacaccaagcacctgaatgagattctggacgacctgaaaaaatacggtacggtcactgtagacaaagatatgtgtattatctgtgtagtaggcgacttggaatgggagaatgtaggttttgaagcaaaagcacttgatgcgatgcgtgatataccggtacgaatgatttcattcggaggaagtaactacaacatctctttccttatccgggaatgtgataagaagatagcgttacagtcgctgagtgacatgcttttcaacaacaaataattccacaaataatactgagcgcttttaccgatactgataaaagcgctctttttaactaactaaacaagtttcttgaatgatgaaaggaatatttccaatcgataaattccgtactttgcagacacctttctattattatgatacgaaagtgctgcgtgatacattgtcggctattaaccaagaggttgccaaatatcctagctattccgtacactatgctgtcaaggcaaatgccaatccgaaagtaatgaccattatccgtgaaagcggaatgggagccgactgcgtgagcggtggagaaatacgtgccgctatccgtgccgggtttccggccaataaggttgtttttgccggagtcggtaaagcagactgggagatcaacctcggactggagtatggcatcttctgtttcaatgtagagtctattcccgaactggaagtcatcaatgaactggctgcggcacagaataagattgctaatgtcgctttccgcatcaatccggatgtaggagcacatacgcatgctaatatcactaccggtctggctgaaaacaaattcggtatcagtatgcaggatatggacaaggtgatcgatgtcgccttggagatgaagaacgtgaaattcatcggcctgcacttccatatcggttctcagatattggatatgggcgattttatcgcgctctgcaaccgtgtgaatgaattgcaggataaactggaagcgcgtcatattctggtagaacacatcaatgtcggcggtggcttgggtattgactacggacatccgaaccgtcagtccattcccgatttcaagagctactttgctacctatgccggacaactgaaactgcgcccttatcagacactgcacttcgaactgggacgtgcggtggtaggacaatgcggttctctgatatccaaagtactgtatgtaaagcagggaaccaagaagaaattcgccatcctcgatgcaggtatgacagacttgattcgtccggctttgtatcaggcttaccacaagatggaaaacattacttcggaagaccccgtagaggcatatgatgtagtaggccccatctgtgaatcatcagacgttttcggtaaagcgattgatttgaataaggtaaagcgcggagacttgattgcacttcgttctgcaggggcttacggcgagattatggcatccggatataactgccgtgaactgccgaaaggatacacttctgacgaattggtgtaaataaaatgtgaatgtagtttaaaaatacagggaggatggaacaattttaactgaaatcttgttatttttgtaatgagttcaaaagaaaactacattaacaacttaataaaaatatacgattatgatttcagaaaaattacagaaagcaatcaatgagcagatcactgcggaaatgtggtcttctaacctgtatttagcaatgtctttctattttgagaaagaaggtttcagtggatttgcacattggatgaagaagcagtctcatgaagaactggaacatgcttacgcaatggccgattatatcattaaacgtggtggaatggccaaagtcgacaagatcgatgtggttcctaacggctggggtactccgctggaagtgtttgagcatgtttacaaacatgaatgccatgtatcggaaatggtagacaagctggtagatgtggctgctgctgaaaaagataaagctactcaggatttcttgtggggatttgttcgcgaacaagtagaagaagaagctaccgcacagggaattgtggataagatcaagaaagccggtgatactggtattttctttgttgattcacagctgggacaacgttgatggcaatctgaaaaatagaaaataagataggagaagctgtttggatttatattcagacagcttcttttttttaacttactttgctcatatttaaaaatctgttatctttgcccactgcaatgagttattctgcacacaaaggatcattcatttgctacagtctaatttggagtatatgatcagatttttatggctcctgatgatgtttagctgtttggcagccgcatcttttggacaagcaactacttcctctatgagcggaagagttgaggacgaacaaaacgaaccgttaccgggtactactgtaattgcaatacacgaaccgtccggaacacgctatggtacagtgactaacctgcagggaacttaccatttggaaggtatgcgcaccggcgggccatatcggattgaattttcgtatgtcggctatcggacagctatttttaccggcatatctctgaaacttgccgaaacctatgtctgtgatgccaaattgaaagaatctgccgaactggatgaagtattcgttataggcacggcttctaaatttgccggagaaaaaaccggagcatctacccatattacatcaaaagatatttctcgtctccctaatatttctcgtggtctgacggccatcaccaagatgtctccttacgctactaaaaatggctttggggggcgtgaccaacgtatgaacaactacacgattgacggagcgaacttcaattacagtgcgggactggatggtgctgttttgcccggaggcggaaatccgatttcaattgatgcgctggaagagatacaggtgagtatcgctccttttgatatacgtcagagcaattttgtcggaggttcggtaaacgcggtgacaaagagcggaacaaatcggtttcgtggttccgcctatatgtacacaaagaatgaatatctgcgtgggaacaaggtagacggttatgacctcggcgaccgggaggaagagcggcgtaatgtatatggatttactttcggcggaccggttataaagaataagctattcttttttgtgaatggagaatatgaatatagtccgcagcccatccataaatggaaactgtccgatgacggtaaggacgatagccagaatatgatttcacgtgtgacggcggaagacatgagccgtttttcgcaggatctgaagaacttgtatggatatgataccggttcgtggacagattttgccggacgtacggatgtgtatcgtgtcatggcacgtatggactggaacataactgacaaacaccgtttcatgctacgttataactataccggacagaaaaaagataataatctggtaggatcggcgttgagcattaatggcggaccggtcagccgctattcgatgtctttccgtaattccacctggcagcaattggataatgtgaattcgctgactgcagagttgaatagccgtttgagtgctgctttgacccatcagcttttggtgagtctgacttttaatgatggaaacaaaagagaatgtaagggcgattttcctacggtcgatatcatgaaacccgatgaaacggggacaaaccgtgcatttatgaatgcaggatacgagcagcatgcgtggaaaaacggaatccgtgaaaaggtttggagcattacagataacttttccgttcattggggaaaccatagtctgacattaggggcaagttttgaatcgcagaacgtttcaaatagctatatgcgctacggagcagggtattaccgttacaacagttacgaggacttcgtgaataaggcggctcctgtagcctttgctctctgttattctttaacgggagacgcagaagctccggcttccgttcattatgatcagttttcgctgtatgcgcaagatcaatataacgtgaatgaacggcttaaactgctttatggtatccgcatggatattccgctttatgtcaacaagcgatatgagaatccttccatcacctcttacgaattttatggtacgaagctgagtaccgcttactggccgaaggcgactccgctgttttcgccgcgtattggcttcaattacgatttatcaggtgatcagacactgaaacttcgaggaggaacgggaatctttaccggacgcttcccattaattttcctgtcgaagatgcaggaaggaagcggtatgctgaagacgaccgtctcggtacttcagaatacaaacgatcctcgtgagaaagagctgttggcggctttggcaggcggtattcgtaatcctcagcagatcttgtcggagattgcccctcagtatccggattgtttccccacagaaccgggagcagtaaatgagatcataacgattgaccgccactttaagactccgcaggtatggacaacttctctggcactggactatcgtttgccatttcctttccggtccgatttgacgttggaggctatgtatatcaaggatatcaatgccattctgcaacagaacgtgaacatgattgctctggatgactccaagatgtcccgcctgtccggtgctgacgatcgctatatttatccgggaaataaggacaaccgcatcaatgcggatatcacccgtgccatgctgatgacgaatacaagcaaaggacatagctatacgctgaacgccactatgaatatggagccggtccgaaatctgaatctgatggtatcctatacttatacccgttcccgcacgttgtcgaataacgcgagcaaccagatcgaaaatgcgtggcaacaggaaccttccgtgcagggagccaactatctgtccatgcacaatgcttcttatctggactccccccaccgtgtcattgcatctgcatcctataccatcgaatacgcccgaaactttgccaccggcatttctctgttttataccgggcagtataatggttcttatacctatctgattgatggagacctgaataacgacggctctcaatatgacctgatgtatataccggctacccgtgatgaactgaattttaccgacttgaagaaaacagacggaaccgtgctgtttccggcggctgagcagagagaggctttctgggcttttgtggagcaagatccgtatctgagaaaacgaaagggaaaatatgcggagacaaacggagcgtttcgaccttggtatcaccgttttgatttgcgtgtggtacaggactttaaggtgaaggcgggaaagactacaaatacccttcaactgagtgtggatataatgaatatcggaaatttgctgaatgatgcctggggagtacccaaaggttctactatcaacaaaccgctgcaatataagggcttgaatgaaaagaatgaaccgatatataccatgggtacattgacagaagacggagagacaatattgccttaccgtagttttgctcccgttcgttcctctgtcaattgttggcagttgcaatttggaatccgttacatctttaattgaaaggataatctttagatgaataatgaaaatagaaaaataatcttcctgtttcctttactgatctatttaatttcagcactggtcggttgtacctcttcccaagagcggcgtatactggttgttcattcttatgaagaaacgtacactgcttatcccgagtttaatcgtctgatagctaaacaattcaagaaagaaggagtcaatgctgatattcggacgctctatctggattgtgaatcctataaggaagagacggaactgaagcgaatgagatatttgcttgattctgtatccggagactggcgaccggaagtgattctggtgaatgaagatcaggcgacttactctcttctgaagtgtggtgatccgctagtgaaagaggtgccggtggtctttgccggagtcaattatccgaattgggagttgttgaagcaatatcccaatgcgacgggctttcatgataagatcggctttgttcaaaatgctgaaatggccagaaaactctttggggatagtgtccgtctgtttacacttctggattctacttttctggatgtgcagataagaaaggacgcgaggaagcaattggcaggacatagagtaacaggtttcatggattatcccgacattccttctgtggaacagtatcggctggtaagggaagagggatatattcgttttctttccatttctatacgtagcaaccgggacaagtctgaagccaatctgatgtgggcgttgaataagaactatcgggggcaatgctatattcagttgaagcgggattttacgaccatcaatattggggccatctgtgtgagtcccagtctgactgtgatcaatgagggttttgaatgtggagagaaactgcttggaggatatctgacttcgttgccggttcaggtagaagaggaggtaagagctgctgtacatatattgaatggagcttcatcgtcggatatgccggtgactgagagcaagaaggaatacctggttgactggaatgtgatgaaacagttggggataaagaaggagaagattcctgctaattataagattgtcaatattccctttagtaaggaatatccatatttttatatttcttccatcgtgtctttggctggattgttgtttgccattgttacctgtttgttgtggctctatcttcgtgagcagaaaaggaaaaagcaggcactttatgcattggcagacgaaaaggaaactctggcattggctattgagggaggaaccacttacgcatggaaattggaagacgagttctttgtctttgaagatgccttttggagatcacaaggtatgtctccccgcaaattgccttttacggacttggggaagtttgtacaccccggccattgggacagtgtaaagcttagccggagaaacctgaaagaagcaagtaaaaagatagttcagctacgctgcgattttagcggaagaggatatcagtggtgggagtttcgctatacgactaatctgctggaaggagggggatacaagaccgccggacttttgctcaacatacaagagatgaaggatcgggaagaagaactggacgctgcccgtttgctggcagaaaaggcggaactgaaacaatcctttctggcgaatatgagccatgagatacgtacaccgctaaattcaatcgtaggtttttccaatattctggctagcgatgaagaattaagttcggaagataaacaggagtatattgacaccattaataagaatagcgatttgctgctcaaactggttaatgacattctggaactttcccgcatcgagtccggatatatgtctttctgctataagaaatgtatagtgaaggaactgcttaatgacgtctatatgactcaccaagtgttgattgcaccccgtcttgattttcagaaagaggaagaagatatatgtctggaaattgatgttgacagagagcggctgatacaggtccttacgaactttctgaataatgcgaccaagtttacggaaagtggatttatcaaaatcggctactactatatggaggaagaagaggcagtgcacatttatgtagaagataccggcagaggcattccccgtgaagaacagcagatgattttcagccgcttctacaagcagaatgaattttcgcagggagccggactgggactgtctatttgcaaagtgattgtggaaaagctgggtggcaagataacccttcaatcggaagcgggcaaaggaagccgattcacggtcattataccttgccgggtcatatcatgacgtatcgcgtaaaatgagtcgtaccgacgtataataaatatgtaatattcaaaacatagctctccggaaatgggcagagctatttctttttccctttctccatagttcccagatagatttccagtgaacgggtagaaatctgtatttcacggaaagatactcctaaagaagcgatcaacagaatcaaagccagcccgaacacatacgccgacagtaattgcagtccgatgtagatgaggaacatgctgactacacagaaaaaaagacttgcaatgcccagcccctgcatcgttcgtgtcaggtttaagcgttttcttaaattctcgatttgtgctaccgtgatatccgtaggattttccatgtaacggtcccgcaactgtcgtaccaattgtgcatacgataaaaaacggttggtataagccagtaaaatcagcgaaacagccgagaaaagcagggcaggagtagtgagagtcaattcttccatcttgaaaacaaattagtaagtattaggtattaaagtattaagtatcaagtattaggtattatgctatgcagataaacgatcggcagctacggtaatacctaatacttaatacctgatacttattatttaagcactccgagttctttgccgactttgatgaaggcagcgatacatttgtcgaggtgtgctttctcgtgtccggcggagatctgtacgcggatacgagcctgttctttcggaacgaccggataatagaatccagtcacataaatcccttcttcctgcatgcgtgcagcataaatctgcgacagtttggcatcatacaacataacggcgcagattgcactctgtgtcggtttgatgtcgaatccggcggctgtcatctggtcgcggaagtagtttacattctctacaagcttgtcatgcagcgcattgctttctttcagcatcttgaatacttcgagacttgcaccgatgatacccggagccaatgagttggagaacaggtaaggacggctgcgctgacgcagtaagtcgataatctccttgcgaccggtagtgaatccgcccaatgcacctccgaaagctttgcccagtgtgcctgtatagatgtccacacgtccgtgagttttgtacagttcgctgacgccgtggcctgtagcgccaaccacaccggcagagtgcgattcgtctaccataaccagcgcatcgtacttctcggcaagatcacaaatctgatccatcggcgctacgttgccgtccatagaaaatacaccgtcggtgacaacgatacggaaacgttgcgcctgagcctcttgcaggcatctttccaggtccttcatatccgcattggcataacgataacgtttcgccttgcaaagacgtacaccgtcgatgatagaagcgtggttcagagaatcggagataatggcatcctcttcgctgaaaagcggttcgaatacacccccgttggcatcgaagcaagctgcgtacagaatcgtatcttctgtctggaaataatccgagatggcagcttccagttccttatgtatatcttgcgttccgcagatgaagcggacagatgacataccatatccgcggcggtccatcatttcctgagaagctttgatcaggcgggggtggttggacagtcccagatagttgttggcgcagaagttcagcacttctttgccttttacagtgatggcagcttgctgcgcactttcgataagtcgttcttctttgtaaagtccggcttccttaatttcagccagtgtctggctgagatattcctgcattttaccgtacatagtgtttgagtgattaagttatactgcaaaggacacgatttttcttggaataaacaatatctttttgatttaaatctgaaaaaaaagtgcttactttgcgcactatttagcttaacacttttatttaaaaggaaaaatgaaacacattttgattattggagccaccggacaaatagggtccgagttgacgatggagttgcgcaggcgttatggaaacacaaacgtagtagcgggttatattcagggcgcagagcccaaaggcgagttaaaggagtcgggaccgtcggctgttgtcgatgtaacgaatggtgaaatgattgaatcggtggtgaaagaacaccacatagatacaatatataatttggctgcactgctttcggtggtagccgagtccaagccgaagctggcctggaagattggtattgacggattgtggaatgttttggaagtggcgcgtgagcagggatgtgcggtatttacccccagttctatcggatcgttcggtgcaagcacgcctcatacactgacaccacaggataccgttcagcgtcctcgcaccatgtatggtgtcaccaaggtgacgacagagctgctgagtgactactattttaacaaatacggtgtcgatacccgtgctgtccgtttcccgggcatcatttcgaatgtgacccctccgggaggaggaactaccgattatgccgtagatatttattattcggcagtgaaaggagaaaaatttgtgtgcccgatcaaagaaggcactttaatggatatgatgtatatgccggacgcgctgaacgcagcaatcatgctgatggaagcagatccgaccaggctgatacaccgcaacgctttcaatatcgcctctatgagtttcgaccctgagacgatataccatgccatcaagaagcatgtgcctgcgttcgaaatggtctatgacatagatcctttgaaacagcgcatagccgacagctggcccgatagtctggacgatacctgcgcccgtgaggagtggggatggaagccggcttacgatttggagagcatgacggtggatatgcttgaaaagctaagagagaaactgaaaaaatgaaaaaacttattgcgggggtactggtgctcagtgttctgggttcctgtggaaacaagaaaacgagcatcgacccctttgcatctatcacacatgaggtggattctatccggcataaagccgattcaatccatcaggaggagttgccggaagaacctaaaccgacagaagcggacgaatctttcgacgatttcatctacaattttgcttccgatgatgctttgcagcgtcagcgtgtgaaattcccgttgccctattacaagggagacgagaagaccaatatcgaagagcgcaactggaagcatgatgacttatttaccaaacagcattattatacgctcctgtttgataaggaagaagatatggatctggtgggggatacctcgctgacctccgttcaggtagaatggatattcgtgaaaacccgaatggtgaaaaagtattattttgagcgtatcaagggggcatggattttagaggctatcaatctgcgtcctattgagcggaatgagaatgaggactttgtggagttcttcagccattttgctgccgacagcctttttcagagccaacgtgtgcaggaccctttggcttttgtcacctcagatccggatgatgacttctctattctggagacctctctggatttgaaccagtggttcgccttcaaaccggcactgcctgcagaccgtctctcgaatatcaattacggacagcggaatgatgataactcgccgacaaagattctcgcattgaaaggaattggaaacggcttctctaatattctctacttcaagcggaaggcaggcgaatggcagctgtataagtttgaagataccagtatttag

SEQ ID NO: 518 - DNA, 15035 bp, unidentified
  source 1..15035: mol_type = unassigned DNA
  misc_difference 12874: note = a, c, g, or t
  misc_difference 12875: note = a, c, g, or t
  misc_difference 12876: note = a, c, g, or t
  misc_difference 12877: note = a, c, g, or t
  misc_difference 12878: note = a, c, g, or t
  misc_difference 12879: note = a, c, g, or t
  misc_difference 12880: note = a, c, g, or t
  misc_difference 12881: note = a, c, g, or t
  misc_difference 12882: note = a, c, g, or t
  misc_difference 12883: note = a, c, g, or t
  misc_difference 14984: note = a, c, g, or t
  misc_difference 14985: note = a, c, g, or t
  misc_difference 14986: note = a, c, g, or t
  misc_difference 14987: note = a, c, g, or t
  misc_difference 14988: note = a, c, g, or t
  misc_difference 14989: note = a, c, g, or t
  misc_difference 14990: note = a, c, g, or t
  misc_difference 14991: note = a, c, g, or t
  misc_difference 14992: note = a, c, g, or t
  misc_difference 14993: note = a, c, g, or t
ttactcatcccagcttagcctgtgaagattgcccttgcacaacaggtcggggtagttccattgtctgagcgtttcatatacggcaaccgctacagaatttgacagattaaggctgcgtgcctcattaatcataggaatacgcactgtggtgtcgggattatcgtgaagaagctgctccggcagtcccgctgtttctctgccaaaaagcaggtatgcaccgtcgggatatttaatgtcggaatgtatatgccgtgcctttgtggagaaataataataagggccgttggttcggctgaaaaaatcatttatattgtcataaacagtaatatcaagtaaatcccagtagtccagtccggctctttttaccgccttttcgctaatgctaaagccaagaggccttactaaatgcagccttgcaccggttgccgcacaggtgcgtgcaatatttccggtattttgcggaatttcgggttctaccaaaactatattaagctctgccataaaatatattgtcctttctgttataaattattactctctgtacaaaatagaaaaaggaagtgattttaaattgaacaacgaagttttacttctggaaaatatattaacattctatactctatacaggaggtgtaaaaaaatgactaaaaatgcaatgagcgttgccaagggtgttgctgccgtggtagctaccggtgtggtagtaggctatgtaagcaacaaggttatgcagaaaaaccctaaaaccgttaaacgcaaggcaaacgatgccgtaagtgcaatgggacaaattgtaaacgatatttcttatcttttaaaataataacaagcaacacaaggtgcacagggcaagctttccctatgcaccttattttcagtttttctgccttataggcttttctgggcataaataaagcttaccttatagttcctccgcctactacatactctccgtcgtaaaaaacaacagcctgtccctttgtaatagccctttgcggccggtcaaactctactactaccttgtcgttatctacagggtgtatagtagccggagcctcattttgactgtagcgtgttttagccgttaccttaacatcactcttaggagcgtctatggcaatccagttaaggtctgcagccgtaagagtgtttgtaaacaggtctgaattttcgcccaaggttactacattgttgtcagggtttttatcaagtacaaatatagggtgccggtagcttatacccaagcccttgcgctgacctatagtgtagtggataatgcccttgtgtctgccaagcactgtgccgtccttgtacacaaagtccccctgtggggtatgcacgcccattgtattttccaaaaagcctgcatagtcgccgtcctttataaagcatatgtcctgactgtcgggctttctggcattaattaaattatgctcctctgccaaggctctggactgctcctttgtcattgagcctaaagggaacaaagtatgccttagcatattctgtgtaagcacatacagcacatatgtctggtcttttctgccgtcaaccgccttttttataagcaccctgccgtttgagtctacttcccgctgtacatagtgaccggtggcaatgtagtcgtaattcaaaagctttgccctttcaagcattttggcaaactttatgtatttgttacactctatgcaagggtttggagtttcgcccatttcgtagcttttggcaaatctgtttataacctgctccttaaactgctcgccaaaattaaaaacatagtggcgtatgcccagcttgtagcatactgttcgggcgtccataacatcctccagcgaacagcaggtgcgtgtattgcttacgccaatatcctcgttattaaaaagacgcagtgtagcaccgtcggtttcgtagccctgctgttgtaaaagcaaagcacaaacagagctgtctacaccgccgctcatacctaccaaaactctttcagccatatttttcaccttctaaattcaaatagtctgctttgtagctattataacacattacaaaaaatacggttacaaaaatttatgggaatacaacccctgtattcccataaataaataccaaataccgtttaaggcttattatattttaacgatatttataaattagtccttcatcattgtaacaagcacagccttttgtgcgtgcagtctgttttctgcctcttcaaaaatctcatccgcgtgtgcctcgaaaacatcggctgtaatttcttcgccacggtgtgcaggcaggcagtgcagtaccatacagtctttatttgtaacgctcataaggtcagcgtctacacagtaaataccggcaaaggattttgcacgaagctgtgcctcctgctcctgtcccattgaagcccatacatccgtataaactacatctgcattctttgcggcctccttaggctctctgtacaagccaaacttgtcaccgtattcctttgcaaaatcaagaatttccttaggtgggtcgtaaccctcagggcaagcaacggtaacgctcatacctgttttaagtccgcctacgattaatgagtttgccatattgttgccgtcgccgataaagcaaagctttagcccctctaaagagcccttgctttctcttattgtcataaggtcagccataacctggcaagggtggcagaaatctgttaagccgttaattacaggaattgaaccgtattcagccagtgcctctacctctgcctgctcaaaggttcttatcataatgccgtcaagaaatcttgacaaaacccttgcggtatcctgtacaggctcgccacggcctatctgcatatcgtttgcagacaaaaacagtgggtaaccgccaagctggtacatacctacctcaaaggaaacacgggttctggtagacgccttttggaatatcatacccagtgttttgccggcaaggtgcttgtgctcaataccgtgcttttgctcatatttcagctggtcagcaaggttaagcatttctataatctctttaccgctgtagtccagcagctttaaaaaatgtttcattaattgctctcctttatattgaatttatattaattaaatactaagtaattattgtctgaaatattaaaaattacagacacttcttaaatatttcaaggcccttgttaatttcgtcctctgttatgttcagtggcggaaggaaacggattagagtcttggctgtaagaaccaaaagtccgttttcaacacattttgcggctacctctttagcgttgtccttttcaagtacaacgcctatcatcatacccataccacgaacctgacttacaccgtccatagcggacagcttttctttaatatactgtcccttttcctgtacagactttaaaaattccggagtatttacacggctaagcacctctaaagcaccggcacaggctatagggtttccgccgtaggtagtaccgtgagtacccggcgtcattacatttgcaagggcctcactgcacaggcaggcacccataggcaatccgccgcctataccctttgcagaggacacaatgtcgggcttaattccaaactgctcgtagcagtaaagagtacctgttctgcctacgcctgtttgaacctcatctataattaaaagcaaatcgttttccttgcagtagtcggcaagctgctgtacaaactccttatcaagcgggtttacaccgccctcgccctgtataagctccaccataacagcacaggttttttcgtttaccttttcttttacgctgtttatatcgtttgccttagcaaaggtaaagccctcggtaaacgggaaaaagtaattatgaaaaacctcttgacctgttgccgccagtgttgtaactgttctgccatggaaggaattttcaagagttacaatttctgttctttcttttccgtacttttcaaagctgtactttcttgcaagtttaattgcacactcgttagcctctgcgccgctgttggcaaaaaacaccttgctaaagcctgtagccttgcaaagctttttggctagctctgtttgcagtgggctgtaatataaattggaaatgtgctgcaatgctgccgcctggtcagaaaccgcctttacccagccgtcgtcactgtagcccaggcagtttacgcctattccgcttgtgaaatcaatatattccttgccgctttcgtcccaagcccttgcacccttgccttttaccaaggctacattaaacctgccataggtatgcataaggtattggctttcgtcggcctttatttgttccagtgtcataatacttcttccttatacttaaattattttttctcgtaggagtaaacaaaaatatcgtcacgcttttcaaagccaatactgctccaaaagctctgaccgcaggaattgtcctgataggtaaaaatatgggttttatgtattccctgctgtgccagcttctctatagccattgtagccatagcttttgctatgccctttcttctgtattgcggcataaccgccatatggtgtataaagccacgcctgccgtcgtgacctgccagtacagttcctactattttaccgtctgctacagctatttggctaaggcccttattcctgttaaggtaatactcaatttcttctctttggtcggcctctgacaaggctcttttagaggtaatttgccacatagcaaatatttcatcgtagcagtctatagtcatttctttaatttgtaccgacataatccaccccatataattttaaaatataatgcaaacctgccccaatagaaaagcagtccattaataaaacattgtaccgataccctcgtcagagaacatttcaataagaattgaatgctctattctgccgtctataatgtgggcacgcttaacgccctgtcttactgcctctacacagcagtcaattttaggtatcataccgccgcttataatgccctcttttttcagcataggaacctcgcttacattcacaacaggaattaaagtattctcatcgtccttatctctaagcaagccacgaatatctgtcattaaaataagcttgcacgcacccagctttgcggctatttgtgcagctgcaatgtctgcgttaatgttgtaaacattgccgtcgtatccgcctgcaacagtggagataataggaacatagccgttgcttacggcgtcattaataacctgtgtgtttacctctcgtatttcgcctacaaagcccaagtcatcagctgtaataagcttgtctgccataagcatttttccgtcaagtccgcacaagcctacagccttgccgctgtggtcgtttaggcactgtacaaggcttttgtttaccttgccggcaagcaccatttcaacaatttccattgtttctgcgtctgttacacgcataccgtttataaacttgctttccttgcctgtttttttcagcatttggcttatttcagggccgccgccgtgaacaagcacaacatttacgcctaccaagtgcattaggactatatcgctcataacagcacttttaagctcggggcttatcatagcgtttccgccgtatttaacaacaatggtttgtcctgcgtacttctgaatatacggcagtgcctgtataagcacatttgctcttttttcgttagaaatatccattttttattcctcgctgtgtaaattaaaatatactgttttaggctttagaaagcaggcggtataatttcaagtcctgttttttcgtcaagaccgcatacaatattcatattttgaattgcctgtccggccgcacccttaaccatattgtcaatagccgaaacagccaccaatgtgcctgtgcgattgtccatatgcaatgaaacatcgccaaagtttgaatacttaatgttgtgaatatctgcaacctgtccctttggcaaaagtcttacaaagtattcatcgttataaaactcctcgtaagcctgtcttacctgctcctctgttacgccctccttcagcggtgcataaacagttgaaagaatacccctgtttaccggcagcaaatgaggaacaaatgtaatcttcaccggcttgtttgccaagtgtgaaagtgtttgctcaatttcaggagtatgacggtgacaagcaaccttgtaagggtgaaagccctcgttaaggtctgtaaagtgagtgttttgggacaagcctctgcctgcacctgtagcaccgcttttgcagtcggctataatgccctttgtttccactaagcctttagctacggcagggccaatggcaagaggtacgcctgttgtgtagcagcccgggttggcaatagttttcttgccctttatattatctctgaaaaattcaggcagtgcataaacggagtttttatgaagctccttgtcggtatattcaccgccgtaccattccttgtagtcgtcttcgttttcaagtctgaagtctgcacccaggtcaataaaaatcttatccttatcagagcacaccttagcaagctcctgtgaaagtccgtgtggaagtgccgcaaatataacctgacatttgtcaacaacccggtctgcattctcgcaaaccatatcgtttaggttgtaataagacgggtatacctgactaatagccttaccctcaaaactgactgagcttattgccgtaagctgtgcctgcgggtggctcataagcagtcttacaagctctgcacctgcgtagccggtagctcctataattcctaccttaatcattttatcatcctcttaatttttaatttatttctaaaaatctattttcaaaaccgtatgggtaattataattttactctgaaaattatttaataagctctctaacctctttaacggcgttaagtacatttgccgggccgccgtatgggcttctttcctttacgcacttttcaagcgagatggcctcgtaaacgccctcgtcaaaggtgtcgcaaattgccttgtattcctctataggcagggtttcaagggtttcgcccttttctatgcacagtgcaaccaatgagcctgttgccttgtatgcatctctgaaaggaagtccctttttaaccaaatagtctgcacagtcggtagcgtttataaatccgcctgcggcagccttgcgcatattttgcggaataaccgtcattgtatcaagcataggcgtaaaggcagtaatacacattttaacagtgtcaacagcgtcaaacacagcctccttgtcctcctgcatatccttattgtatgcaagagctatacccttcattgctgtaagcaagccctgcaagtcgccgaacactctgccggatttaccacgaacaagctctgcaatgtcaggatttttcttttgcggcataattgatgagccggttgaaaaagcgtcgtcaagctcaataaacttaaattcccatgagcaccacataataatttcttctgaaaatcttgaaaggtgaaccataataatagacagtgccgaagcaagctctaagcagaaatcacggtctgacacaccgtcaaggctgtttcttgtcatactgtcaaagcctaaaagccttgttgtaatgcttctgtctatagggtatgttgtgcacgccaatgcacagctgccaagagggtttacattcattcttttctgtgtatcctcaagtctggacaggtcacgcaaaagcatttcggcataagccataaggtggtggccaaaggttataggctgtgctctttgcaggtgtgtatagcccggcataacggtttcggcatactcctctgccttgctgcaaataacctctattaagcccttaacaagagattttaattcatctatctgatttcgcaggtacagtcttacatcaagtgcaacctggtcgttacggcttctggctgtgtgcagtcttttgccgttgtcacccagtctttttgttaattcaccctcaataaaggtgtgaatgtcctctgcctccatatcaatgcttagcttaccgctttctatgtcggccaaaatttcctgcaagcccttgcagataatatctgcctgctctttttctataatgccgcactgtccaagcatagttgcgtgtgcaatactgcctgtaatatcctccttatacattctgctgtcaaaggatatagatgagttaaaatcgtttgttgttttgcttatttccttttgaaatctgcctgtccacagcttcatttgtttcacctcataaattagtatatgggacgagcggcaaaaagcacccgtccctttagtattaattgctatttaatagtgcctaatcaaacaaaatcacttaattaagcccttttttgctcttacctctatcggcaggccaaacagattaatgaagccctcagaatcattctggtcgtaaacctcgtcctcatcaaatgtagcgatctcctcgtcatacagtgagtatggtgaagtaacgcctgcatcaataatgttgcccttgtacagctttagcttaacatcgcctgttactgtctgctgtgtgctgtcaacaaatgctgagatagcctctcttaatggtgtgtaccactgaccgtagtatacaagctctgcaaaacggttggcaacaatctctttgtaatgctgtgtatctctgtcaaggcaaatttcctcaagctttgcgtgagctgtatatagaattgtaccgcccggtgtttcgtatacgccccttgccttcataccaacaagtctgttttcaacaatatcggttataccaatgccgttttctccgccaagcttgttcagctttttaataattgaaacgccgtccagcttttcgccatcaatagctgtcggaatacccttttcaaatgaaattgttacatatgttggcttgtcaggtgcctgctcaggtgaaacgccaagctccaaaaagccctctttattatacattggctcgttagccggattttcaaggtccagtccctcatgtgacaagtgccacaggttcttatcctttgagtagtttgtttctctgttaatctttagaggaatcttcttagcctcggcataagcaatttcctcttctcttgacttaaactcccatgttctccacggtgcaataattgtcatatccggtgcataagctttaatagcaagctcaaaacgaacctggtcgttacccttacccgtacagccgtggcaaatagcgtcagcaccctctgccttagcaatttctacaagtcttttagcgataataggtcttgcaaaagatgtacctaacagatacttaccctcgtaaacagcacctgctttgattgtagggaatatgtagtcctctacaaactccttgttaaggtcttcaatatacagctttgaagcacctgttgcaatagccttttcctcaagaccgtcaagctctgtaccctgaccaacatcgccggaaacagcaataacctcgcaattattataattttcctttagccaaggaataataattgatgtgtcaagaccgcccgaataagccagtacaacctttttaacatctttctttttctttgccatgataatgacctcccgtatatttaaataaaatgcttttatttattgattacaagttatattatactcacgctatgcaaaaaatcaagaaatatttgtatatttattcaaacccttgattttttgtagcaatatatattttaatttaacatctttaaaaacttatctctagattttccacattttcaacatattttttgacaacagctgtacttcaagctgtttatgagtatacattattcaaatttttatgcatttttattcatatatacgcaaggtattgtatattgatttaagtaatgctataataatttcagcagctattaacatattttataatacacatttctaaaaaggagattttactatgagcagctttaagaaaattaaacccatagaaattacagaaaacccgtttaagctgataggcaatgactggatgcttgtaacagcagaacatgagggcaagtgcaatatgatgactgccagctggggcggtgtgggcattatgtggaataagcctgttgccttcacctttataagaccacagcgttacacctttggtatgcttgaaagcgaagatatgttctccctttgcttcctacctgaaagctaccgcagcgtgctaaagctttgcggcacaaaaagcggcagagatattgacaaggtgtcggaaacaaacctgactgttgagcatactgacggtgtgccgtactttgcagagtctaagcttgtgctggtttgcaaaaagctttacggtcagttcctttcagagaatagcctaacggaaatgtcgctaaagtccaactacaacgccgagggcagtgactggcacaagatgtatataaatgaaattgtaaaggttcttgtaaaggaataatatgtcaaaaacagcattagtaacaggcgcttctaagggtataggagcagaaatagccctgcagcttgcaaaaaacggctttaatattgccattaactacaacaaaagcaaggcagaggcagaaaaggtgcggcagaaaatagcagaccttggaggctgtgccgaaatattccaagcagatgtaggcgactatacagcagtaaaaaatatggcagacagcatatacaagaggtttgggtttattgatgttcttgtaaacaatgccggcatagcacagcaaatactgtttacagatattacaccggaaatttggtcaaatatgataagcacaaaccttaccggtgtgtacaactgctgcaacactgtgcttccgaaaatgatacattcgcacacaggctgtataattaacatagcctctatgtggggagaaaccggcggaagctgtgaggttcactactcggcagccaaggcaggagtaataggcctaacaaaggcattggcaaaggaagtaggtctaagcggaataagggtaaactgcgtttcgcccggggtaataaaaaccgaaatgatgtcctccttctcggaggacaccctaagagagcttaaagaggaagcccctcttaacaggctgggcactgcactggatgtagcaaatgcggttgtctttttggcagatgaaaaggcatcgttcattacaggtcaggtgctaagcgtaaacggcggaatactgatataacaaaataatacacaacgaaaaaggctttttgattgggaacattccctttcaaaaagccttttttgtatatacatcatatggttttcattttatcgatttccgatttttattttgttaattacaaagcctttggatttatccgagcaaagacacctcttttttgtcattcatatagaacattgcataggcaaaggaagcaagcattaaaagcaggctctataataaaagtcgtggtaagtaaaaaagcctgcaagcctagacaaagctccacgcattttaaaacgacacaaggcagacacctttttgagagtatctgccttgtgttagttaatttataaggatttacttattatcttcaaatgtctgagaagccaggaactgtaggtgagcaagctttttagctgcctgctgttcagctctgttaaacagaagatctgctctctcagggtttgcacgagaaagtgcgttataacgaacctcgcccataataaagtcacgatagctcattgtaggagccttagaatctacgataagcggatttttgccctgctcaatcaaacgagggttgtaacggtagatgttccaatagcctgactgtacagcctttttctcttcgatttgagctattgtcataccgcccttaataccgtggttgatacaaggtgcataacaaataataattgacggaccgtcatagctttctgcctcaacaaatgcctttatacactggttatagtcggcacccattgaaacctgtgctacatatacattaccgtatgtcattgcaatagctgcaaggtcctttttgtttgtagccttacctgctgcagcaaactgtgcaatagaaccgctaggtgtagcctttgaagcctgaccgcctgtatttgaataaacctctgtatcaaatacaagaatatttacatccttaccggaggcgataacatgatccaagccgccaaagccgatatcgtatgcccagccgtcgccgccgaatatccacatagacttcttagcaagctggtctttatctgcaagtgtctttttagcaagcttgcctgcctcgcagtcacagccgctgatttcctcaagcttctcaataagtgcctgagcagctattttgttctcgcctgagtttgttattgttgaaaggtattcctcacaagcagatttaacatcttccttgcttgtcttttcggaaatttctcttacataatctgcaagtctgtcacgaatagcgttttgtcccaaaaccataccgtaaccgaactctgcgttatcctcaaacaatgagttatgccaagccgggcctctgccctctttgtttactgtgtaaggtgtagccggagccgaagcgccccaaatagatgaacagcctgtagcgttggcaataaacattctgtcgccaaacagctgtgtagcaagctttgcatatggtgtttcaccacaacctgcacaagcacctgagaattcaagcagcggctgcttaaactggctacccttaactgtagtttccttaaacttagcggcaacatcaggcttaacaggcaggtcaagaccgtaagcaaatacctcctgctgatccatttcaccgtcagccggcttcatctcaagagccttgttgcccttcttgccaggacaaacctgtgcacaagagccgcagcctgtacagtcaagtgtagaaactgtcattgtaaatgtcatacccggcatagccatcataggggctttctttgttgcggcaggggnnnnnnnnnncggctgtcatagcaacaggacgaatagcagcgtgcggacatacatatgaacagaagttacactgaatacaattctcggaattccaagacggaacatcaactgcaatgcctctcttttcgtatgcagctgtaccctgaggaactgtaccgtcaatgtggtttttaaacgcagatacaggaagctggttacccttgtaagcatttacagggtgcagaatagtatttacatactccaaaacctccggcttaccgttagttgatacaaccttttccagctcgccctcggcgtcagcccagcttgcaggtacctctacctttacaaagtctgttgcaccacgctcaatagccgcatggttcatatcaacaatagcctgacccttcttgctgtatgactttgtagcagcgtccttcatatatttaatagcatcgtccttagggataatgttagcaatagtaaagaatgctgactgcaaaattgtgttgatacggccgccaagaccgatttccttaccaatcttgataccgtctattgtatagaaattaatcttcttttgagcaataattctcttcattttagcaggaagcttttcttcaagctcctcgccggaccaaggacagttcagcaggaagctgccgccctctttcaggtcgtccaccatatcgtacttatgtacatatgacgggttatgacaggcaacaaagtctgccttactgatgtagtaggttgacttaatcggcttgtcgccaaaacgcaggtgagatactgtcaagccgcctgacttctttgagtcatatgcaaagtagccttgagcgtacatatctgtatggtcaccgataattttaattgagtttttgttagcaccaactgtaccgtcggcaccaagtccccagaatttacatgagcttgtgccggcaggtgttgtatcaggattttcaacaacaggcaaagaaagatttgtaacatcgtcaacaatgccgattgtaaatcttctcttaggctggtctgcttccatattgcggtaaacggcaataatgtcgccaggtgttgtatcctttgaagacaaaccataacggcctgtataaacattcacgcctgtaaacttagaaccgttaattgcggccaatacatcaaggtacaaaggctcaccaatagaaccgggctcttttgttctgtcaagcactgtaatatttttaactgtttcaggcagctggcttagcatatagtcagctacaaacggtctgtaaagtcttacctttagcaaaccaaccttttcgcccttagctgtcaggtagtcaataacctcttctgtacagtcgtttacagagcccattgctacaataacattttctgcgtcaggtgcaccatagtaattgaaaggcttatagtctgtaccaagcttttcgtttaccttgttcatatattctacaacaatttcaggtacagcgtcataatatacattacaagcctctcttgcctggaagaatatatcgtcgttttgtgcggtacctcttgttacagggtgctcagggttaaggcttcttcttctgtatgcgtcaactgcgtcccagtcaagcatatctgcaagatcctcatagtcccacatagcaaccttttgaatttcgtgtgaggttctgaagccgtcaaagaaatgcataaacggcactctgccctttattgctgacaaatgagcaacagcggcaaggtccatacactcctgtgggttagtagaacacagcatagcgtagcctgtttgacgacaggcatatatatctgaatgatcaccgaaaattgacaaagcgtgtgatgtcaatgcacgggcagaaacatggattacgctaggcaacagctcgcctgccattttgtacatatttggtatcataagcagcaagccctgcgaagcagtaaatgttgttgttaatgcacctgcagaaagtgaaccgtgaacagcacctgctgcaccaccctctgactgcatttctgttacctgtacttctctgccaaacagattttttctgcctgctgtggcatatttgtcaacctcatcagccattaccgatgaaggtgtaataggatagatagcagcaacatctgtaaacgcatnnnnnnnnnnggctgcgttgttaccatccatggttttcatttttcttgccat

SEQ ID NO: 519 - DNA, 15437 bp, unidentified
  source 1..15437: mol_type = unassigned DNA
ctattcgccatatattgataatgactctttttccagctccatataatcaatcttatcagcctttgtccttggaaacttctcaactacagtaaaatatttagggatttcatactcctttagttgaataacctcgccattgaatgtttttctctctttttgtaattcctttattatgcgctcacttgtcattgttttatcattcaaaataataaatgcgtgtcccacataaagccatttcgaatccggatgttttactactgcagcagattctattccttcgattgtatttaatgccatttgcacatgatcacaatataccttgttaagtgtagaaataatataaaatctcgatgatcttccagttaattcaaagctgccatctaaaagaagtcttccgttcgttcccgtcttgaaatattctttaccttgatatctaaactttgactgtctggtgagctcgggatttccatagtactccttaaatacattctttccggagatacagagcatcccttcctgttcataaggtaactcttccatattttcattgactacaatagcactcacaccataaaaaggctttcctacgcttaaaaaaggaacattacagccatatgcgtttgtatttccaccacatgtctctgcatttcctgagccatttataatctctacttctttgcagttgtgctccctaaaaaagcagattgctcgctttgccatttgttcattcaaaaaatctccaccggaaataaatgtctctacacttgataaatccatgttgtccggaatatttcgcatagtcaattccaggagcgccgggcttccgaatatgatattaggtgattgcatataaaagtctgcaattgtatctttggaaatatccgggccaattataaccgttctcccacatagtaaagacattaatacactggtcacaaatccataaggataacaaaaaggaacacataccagacttttttctccggattgttgggttacatgggaagatttttttaaatagatagcggttgctataatattcttatttgttaataccactgacttaggatttcctgttgttccacttgtatataaaatcattgcctcacaattttttattccaatgcttctttgtatcccttttgacttcctgtttagcaatgattcatatgaaattaccgcattttcggcatgttgagatggcatctgctccaatgtaataatacatctggtgtttccttctccacacaaaatctttttatcctcttctgtgtatttttccttcacaagaacagaacttccgtacatttttaagtagcgttccacttcttgcactgttgcatgtgaattcaaaaaagtaactataactcctatactgtttgctgctaagaaaagttctattccctgataacaatttggtacaaccatcgtaagaatatcacctttttgtaatccaatacgatacaatgatcttgctaatatctgtgcattttcaattaatctttcaaagctgatcttcttacctacatcttctattgcaatttcttttctatactttctacttgcatatttgattaaagaaaaaatactgcatccgggaatcaccggatgtttctgaaaaaaagtagcatctttctcatgcaatcttaatttggacggatagcctgtctgtttaatcgtttcgctcataacttagtattctcctcttacatctttatctaccgagtgcagccatctcttccaacttccgaaaatctactttgccaattggggtatgtggaaattcttttacatatcgatactctaccggacacatataggtcggtactttatccttgcagattctccggaataaatcattacactgaacctgatccatagtcatagcttcgtcttttaagattacatacgctacggcttcatagtaggcactattttgtttgcatcttgcaacaactgtacaatcctccacaggggcggctgatttaatggcttcttctaccagattagggaaaatctttgccggctgcccatctactgctgtaagataaattcttcgaatccttccctgatgaaacagtagtccatctttgttgatatatcccagatcaccggtgcgtatccatttttttcctgtctcatccaacgtaatgatctcttgggtcgcttcttgatttttatagtaaccaagcataatggatgggctggatatcaaaatttcccctacttttccatatgataattcttcattcgtatccatatccacaatttttactgtattatgaacaagtggaattcccacactgccaatagcatttgctttcggagtactgataactgcagttgctgccaattctgtcattccataccctttacatacctcatatgagcaatggtgctgtcttaaaaatccatttactttttcttccattactgtatttagtgaatctcctcccacacctgctgatatgagaaaagacagatccattttctgcgtctttttactttccgccaaatattttaaatgatcagataatgcagaaaaatgatttggtcgatatttcacaaattcattgggaaagtttttagaatcaaatacaggatataaaatcacttgcaatccataacataatgtcgtatgtatcgccaatgtcaaaccatatatgataaaaggcggaagatcattaaaatacttatgctgtcttttaaaagggatgcctaaatattgatatccatgtgctaccgaattgatattatcatctgaaagcataactcctttcggaattcccgttgtaccacctgtatgtgcaataataaagcatttctctttttcatattttgctgtttttgcctgtccgtccttcccgagtcttacgaaatttttccaggaaagagcatgcttgtctacattttttccaaatgttttgatactataagcagctttcttaattcctcttaatgactcaccgggggatactacaatttttttctttacatgacttccccgtagtgccttttctattacaggataggcaaaatccacggtaagtacatattgcgcattacattcttgcacatacgtctgcatttgctgttcattggtacgaagatccaccagattcacaacagccccgagtttatttaatgcatatagactgtatacagtttccggcatatttaccatgcaaaaaattactacatcatttttacgcacccctgctgcgtaaaaagcatttgctaccatatctattttttcaaataattctccataagtaatcttgtgtccgaaataattcaacgctatatcccgaggataattcttgttattccggtaaaccaattcatacgccgtgcactgcggttcacaggactggattgcttcttcgctgtaatattgaagccatggtttatcaattgatggataaccggataattcttcttttgtcatacttgattctccctttattcttctgtttataacttattgatgaattcgtaagttttagttattcgtctgcaagtatatttataaattgtctctcccataaatcacggatttttcatattcccaatctaacggtggatattctttgataatctcatttttttcctcttccagccttttatggtcaacctcattccttgtcgttatttttaaacatccttccattaactcccatcttaatgtagccatactgtaatacttgagccatggtttatcgattgaaggataaccggataattcttttgtcataggtatttctccttgtaagtatttttatgaaatctcatgtcatcgtctcagcccatataaacattgaaaaacaggaacccttttcattacttcattaacaataattgtcagtactgaggatgccagtaaaatagcaatccactgtacacctgccaatactgctaaataggtgactacataatatgccacaataatcaaaagctgcatgtgcagaaaataaaagttaaatgaattgtttgaaagccatttgagtaatttcccatttccatccatccaaatctgccctgctcccatagctgctaatacaactgatacacgcactgttgaccatatcattctgcatatagcatagcttactgtccatatctccatatcacgaataatcactaacgtaattgatgcaataacatttataaaaaaagcagacacactgaatgtcttccagtacttccttgtaaattcataaaatggttgattatcatataaaagtaaccctaataaaaaaaatagtccaaatgccagataggtctcctctgttgttccgtaacttaatatgcaattcagtatcactaataaaaggatacttttccatgacacaatctctttattagaaagttccccgggcttacttagcaacctccgaataaacgggtatgacaaaattacatacgtcccaagataaagtaaaaaccataactgcgatggtgaaaaactgccatcatatccgtaaaaatttgaacttatatgcgaataaaaataccaccaggcacttaaaaagtttcctatataatcaaaatgatttttcatcgcaaaatatgattgtataggaacccagaataacacgcccatcacaccaggtatcacaatcttttgcatccgattctgataaaattcacgaatcgtcctctttttcaagctaagcatggaagataccccagcggtaaaaaacaaaattgccatcaaacccggacttgccagattataaacgattgtcaaaaaaaagacttttctctccttctatatagaaaccttctttgcaatgaaatacttcgcttgcatgccatataaagagagaatagacgcataataatctgatgttatctataaaattttttcgcccattaacttctctgttggaattattcatcctttgtattccttttcatttcttactttctaaacaaaaaggcattctgcagtgatggaataagctgttctctgtacttaaaagcctcctgttgctcaatatcatctctatccatgtaatgagccttttcctcttcttcacgctcgtatataacctgtgttttgatataatcttcaatatgtttattccaatattgttccggggacatccctttcaacaattcttctctggttatcttcccatacttctccataatttcatatttcattgtggccagttcatcacgcagtaattgcagacctttatctcttgtatattgcgagatatccatagcttttccacgactaatatacatagttccttcataaatcatggtagctactggtatgacgggagctttcgtgctacatgccattttccaaattccggaataaagttttcgaacaattagattgggactcatgttccagacaccttccggaaatatcaatatatttccaccgtgtcctaatactctttccgccttacgcaatgccgctgcccggttttccttatcatatcggtctaccagtattaccccaaccaaccacatggcgattccttccacatcatacagtaattccgatctcccatttgtcatcagataaaccgattctcctgctgttgaaattgcaaattccacatcttcggcagaatatgtatgtgttgccgcataaattttaggtcccttaggaagttctcccatacttacaacaacctttttcattccgcacattttttcatccagtcgccgaaggacgggataaataattctcctgaaatgaataccgaaaacagatatggtttttagcggatcattacctgtaagatacttaaaaaaccaattattccagtatttcattacattttctcctcattcgtatcaaaataacctattgtttatctaattactatttacatagtaactatatatatgtaattcgtcaagctgttacttttttcatagtattgttatatagcgtaatttttataaattatcttataaactcaggagtcattatgcagaatgtagttttttctatgaaagaatatggacatatagaaattcatttgaaagaattaatggaagaacgaggagtaaccagaaacgctcttgccagagctacgaacactcgttttgaagtaataaataaatggtatcagggacatgttgaaaaaatagatgctgatgtgcttgccagaatttgttatatcttagattgtaaccccggagatattattttatataaagtctccgatgaatgattttaaaaatatcttataatacacaaaagcgccagaaccgacatttgccgggactgacgcttttcattttatgattcttattttgtctcttctgcttcgccgtcttttttcttgttgaatacaaacagcttactgaatacatagttgccgatgatgaccagaactgcggagatcagggttgccaccagcagatttacaccgattgcggtcagtacctgcatcactaccatatccagaatcagcgtggatactctggaaagtacgaatttcggtgcttcggacagcatcggagcattgctcttgaatacaaacttacggttggtaaaatatgcgaaaatgacacccgccgtccagttgataacacttaatacaacattctgaaagggtgtgggatacattgtgttgtcaaataacaggaagtttgccaggaattttgctgcccaggatacgaccgtggtcagtccgcctacgatcaggtatgcaatgatctcttcatacttgatccaaagtgcctttattttttctaccatattgttcctcatttctctgtgctaaggttaataaaactattcagaaccccattcgcaaaatcgcctctacgaggctttctttttgctcatgtggttacttcgccctataaatagttaactacaaataacaaatatacacaaatatccccttaaatgcaagcattccaaagacatttgtgtatatcttaatcactgtttatgaaattctataccaccgtatggcttataaatttaccacgttacggttctcaccacgcataaatgccttaatgttctcgtagacgccctgtacgcaacgggtacgtgcctccacgctggcccatgccaggtgcggtgtgatgatcagcttgttactgtcttttaactggcttaaaggattagataactccaaaggctccttttccaggacatccagacctgctgcctgaatctctccggccaccagtgcttcatagagatcagcgttatttaccacggggcctcttgccacattgatgaggattgctgtctttttcatcttacgaagggcttccttatcaatgaaattacgggataagtcacttaacggacaatgcagggacaggaaatcgctctcttttaacagggtatccttgtccacctgcggataatccgtacaggtgctcttgcccgtgatggaataaaagattaccttacagccgaaagcggtagcgatcgctgcggctctcctgccgatattccccattcctacaatgccccatgtcttaccttctaattcataaaaaggtctgtcaaaattagaaaaacgatcctgtgcactgtaagcgccggattttacatattcatcatagtagggcagcttctggctcaatgccagcgccagagtaaacgtatgctgtgccaccatggctgtggaatagtccaccacatttgccaccttgatgcctctggacttgcaatatgccagatcacagttgtcgtatccggtggcaagctcacagatcaacttcacgttcggacaatttttcagggattcttctctcatcggagccttgttgcagacaatgacatccgcatcgcccacacgctctgccacttcctgtgcagtaacggtattcgggtaactggtcacttctcccaattcattaaaacagtccaccggcacatccgtgccggcgctgtttctctccagtaaaacaatcttcatctcttgcaatttctcctgtcttttgttttcttttcgtaatagcataataacatagtagaataaacgatttctccgggctatcgccctacttacttattccatcatacagcaacagcgtaatgaaatcaattcattacgctgtccttttctgcttttgaaacatattactgccggagtaatcccgcctctgtggcttacaatctcttcagcagttcttctctctgtgcctcataaccgggcttgccaagcagagcgaacatattcttcttgtagctctctacaccgggctggttgaaaggatttacacccagcaggtatccgctgacaccacatgcgaactcgaagaagtagaacagctcgccaagatagaactcatttacctcgggaacggttaccatgaagttgggaacctgaccgtcggtatgtgccagaatggttccgttcatagcgctcttattgacgaaatcaacggtcttgcctgccagatagttcagaccatccagatctacaggctcctcgccgatcgtaagctcctctctcggagtgtcgatattgatcacggtctcaaacattacacgggaaccgtcctgaatgaactgacccatggaatgcagatcggtggtcaggtccacgcttgcggggaacagacccttgttgtccttaccttcgctctcaccgaacagctgcttccaccactcacttacatagtgaacagcgggctcatagttcgccaggatctcgacactcttgcccttgcgcagtaagatgttacgcagagccgcatactgtaaagcatcgttctcttcgaaatcattctccagggcacgctttcttccgctggctgcaccttccatcagcttgtcaatatcagcaccgctgacagcgatcggtaacagacctaccgcggtcagtacggagaaacgtcctcctacatcatcgggtactacgaaggtctcgtaaccttcctcatcggacagatgctttaagcttcccttcgccttatcggtggtagcataaattctctctgccgcgcccttcttgccgtatttagcttccagcttctccttgaatacacggaaagcaatagcgggctctgtggtggtaccggacttggagatcatgttgatggagaaatctctgtcgcctactacatccatcaggtgcttcagataggtggagctgatggagttaccacagaagtagatctccggagtcttacgtacactcttatccagtacattgtagaagctgtggcttaagaactcgatagccgctctggctcccagataagaaccaccgataccgataaccagcagaacgtcggaatcactctggatcttcttcgctgctgccttgatgcgggcgaactcttccttatcgtaatctacgggaagatcgatccatcccaggaaatcattgcctgcgccggtcttggataccagggtctccttcgcatccagggtaagcttcttcatgtaaccgatctcttcttcagaaataaaagagccggccttggaataatcaaatgtaacttgtctgctcataatgctcctccttatatcttgcagatatatcacgcattcttgcgttacttacttaaaaaatccgtttttattttaacaaagttacatctcattttcaagacatatctatagatccggggaatgttttctgaattctttcggacgtctgacattttccgctatactgtaagtaattcctgaagcaatgcctgtaattcttcctccgtgactctggcgggatcctccggccgttctgttatcgcctttccttccgccttttcgggcgttgcattttccgtggaaaatacttctctgtccagacgatctgacgtctcctccggctgcaccgctctgctgcggatcggcatcagttccaccgtccgtctgccggaagtacgctgccttcttcccgcctttccgctggttgcgatctcctccaccagacttcccgggccgtagagtctctcataatcctgctccgtaacggggatccggcccgacagatgattttccagataatcaatgaggttcgtctttaatattctgcgttttcccttgatatccaccatggctgacaaggaaaaataaagatacattcctaagaagcttactatataaaaaggcaggatttcccccagcatccttccgcccatgatccccttgcagatcccgacaccggcaaacacaatggaaaacagcatgcactggccggacaaatgataccaggcatcaaaggataggtgtccaaacgccagccggttgaggaacttgtccacaaacaccggaatgtttgatactccaccatttaactggtaacaatttgcaaattttactttacactgtttcaacaggcggttattcgtcgttgccatattatctgtctcttttatcatcgtatggtaaaatcctgccagaagcagacgcaccagaatactaagtcccagaaataccagaattccggttgtgatcactttttcttctttgaaaatcgtaaacataacctgcgctcctttctatcgcttccttagagtataacgtattagaggcttgttttgtacgttttttcatcgtcattcttctacgttgccgaacagaaaaagtatttcttttacatttttcgtgaaaagaaaaccttgtacatattgttgtataaatgccgaaaatctgctataatcactccttagaaattcagtttgaaaaggatggttttacatatgatatacaagacaaaaggtacctgttccacttcgatcgatgtagaattaaaggatggtgttattgattccgtaaaattcaccggtggatgcaacggtaatctgcagggaatcagtgctctggtaaaaggaatgaagccggaagaagcaatcagccgtctcaaggggatccgctgcggtttcaagcctacctcctgtcctgaccagctggctcatgccctggaagaaatgatcgcacagtaatctcaccgacaagaaggattttattatgaaaaaaatcgtattgaccggcggcggaactgccggacatgtaacccccaatattgctttattaccggcgctgcaggcggccggctatgaaattgcctatgtgggatcttatgaaggcattgagaaaaagctgattgctgatttcaacattccttacacaggcatttctacgggcaaattccgcagatacctggatccgaagaacttctccgatccgttccgtgtcatgaagggatttgtggaagcgagaaattacctgaaaaattaccagccggatgtagtcttctccaaggggggcttcgtaagcgtcccggtcgtccgcgctgcagcttccttacatattccctgtatcatccacgaatcggatatgacaccgggactggccaataagctgtgcattcccgtggcagaaaaggtatgctgcaatttcccggagactatgaaaaatatccctgccgacaaggctgtcctgaccggttctcccattcgtgcggagctggcacagggcagccggctggccggactgaacatgtgcggctttactgccaataaacctgtcatcatggtcattggcggaagtctgggtgcagctaacgtgaacaaggctgtccgcgatgcattgccgaagcttctggaggatttccaggtagtacatctctgcggtaaggacaaaatcgacaacctgttgttaaatacacccggatataaacagtttgaatatatcaaggcggaactaaaggatattttcgccatggcagacgtggtgatttcccgtgccggagccaatgccatctgtgaacttctggcgctgaaaaagcccaacattctgatccccctgcctgccgccagcagccgcggagaccagctgttgaatgccgcttccttcgaagcgcagggttattccattgtgctgaatgaggatgatattacgacgaatctgctggtggataaggtacatgagctgtacttcaaccgccagaattatgtagaagccatgagccgcagccatcaaatggatgcgatcaacacaatcatgttgctgatcaatgaagccgcaaacaagagtcatacgcaataatgtcatgtattgattgaggggattattttgaaaggattattggaaatctgctgcggcagcttcgaagatgtgaaaaccgcctggcaaaatggtgccgacagggtagagcttaacagtgcactgtatctgggtggtctcacaccttctacggccaatctgatctgtgcaaaagagcagtgcagcatccctattgtaacaatggtccgcccaagaggaggcggcttctgctattcccaggatgaatacgagaccatgctcttagatgcccgcatccttttagagcacggagctgacggtattgctttcggcttcctgacagaggaccatgccatccataggaaccggacacaggagatgatcgacctcatccatagtgtcggaaaagaagctgtatttcaccgggcgtttgattgtgttgcacaacaggaacgtgcggtggaagcattgatcttacttggtgcggaccggatcctcaccagtggtggtgcacccgatgtatggtcgggcagaacgcaattgcaaaagctacaaagccagtatggtaaggatatcacatttttagccggaagcggcgtgaatgcacaaaacgtaaaagctctgatggaatatacgagcatagagcaggttcatacatcctgcagaagctggcagccggatgcgaccgcctccctgcaggacgtggacttctcttatgatagaaaccgaaagaatgcatatgaagcagtggatgccggaaaggtgaaagaaatgcgggcagcaatgcctatattgtaatcagcccatgttctaagcaaaaatcgtagactccgtcttcttccaccgatctgcacgtgcaggtggcgtgggctttgatctcatccttcgcattccccatggccacaccggtgccgactgcttccagcatctcgatatcattgaagccatctccaaaagcgatggcttcctcctttgtaacgccaaaatgctgaagtaccgcgcgcacagcgtttcccttcccacattccagaggaatgatatcagacgctctatcccaccacgctgtaatctgtgtatggtgcgtaccatagagaatcctctcatactcttcttcccggcaggcacacatcatctgatagatatcctcacgaacccgttcatcgaattgtttatcgattttcaatatctcattaccgaatctgaaatactgctccagatccggatctgtaccgttggtgatgataaaatgttcgttactgattgctaccgccctatgcatatctttcagattctgaaggatctgaagcttgtccatccgatcaagcgggcacttaaaaataatctcgtctccgactgttacataagaaccgttaaaggtcagaagcgcatcgaaatcaattcccggaaaacgcggcgccgacagatatcctcttccggtcgccatacacagcttcaccccattctgtcgaagagaaattaatgtatgcagcgtccgctcacttaattctttatgacccatcttcaaaagcgtcccatcgacatcaaaaaatgcaattttaatcatgcttgccacctccatccggctcacaggatatattccatctgccgttcttttgtcttcattcccatcttttcataaaagtgctctgccgaagtgttgcctgcccagacgttcagggttacttcatagcagcccagttcttttgcctgctgtttcacatattcaaacaggctttccccgatatgctgcccccgtgtctgcttgtcaacacaaaggtcatcgataaacaatgatttgaagggcaccatattagtggaaaagggctgctccctgagttggcagaatgcatagcccatgcacagatcgtcctcgtctacggcaacatagatagggtgatcctcctgttccaatagctctgccagctcgcagggggtgtatttcgtagtacccggtataaaaatatccggacggagctctgcatgtatctgtaatacctgccccagcagcgcaagaattcttggaatgtcctttttctctgccttgcgaatcttcatttctattttactcctttattcggcaaatcccgttttattacttctcccagtattataacccttccatgtctagatccacgattaactttccaattttccgttcttttaaaagatagcacatatagataggaagatataccacggctccctcctgttccatatttgctaccgataaaacatatgctttctcaatatgataatcagaaattttcataaagttatccaaggatttgtgtgccttgtaagctttcccggatttcacctcaatgggaaccactttcccatccatttcgaccaaaacatccagttcccctatatttttctttttacagaaataaggttccaaaccattggccgttaattgctgtgccacagcattttcaaagtgagcaccgttatttacttcgctgtttttattgatcagttccagtttggtttccgccggatatgcactggtaagcaaaccggtgtcattggaaaaaagtcggaacacattactgctcttgctcgctttgagaggaataacaggagcttccacgttatacaccggtaacgcaactccggcatctttcagccataaaaagctgttttcatatctgtcaaactttaactctttattcagcattgtaaatacaaattttttattctgtttgttcaattctgccggaatgatatcataaatagatatcaatttcagttttttatcttcactctcatattgagagaaatcctctttatatagcgcaacgatatcccgttgtaccttatccacttcccggatatcttttgtagcaatatagatttttaccgcatccggcatgcctccgacaattagatagataaaaaacagcgacaatagcttctgatgtatgaattcatccacgggctgacatgtttcaaatttcgctttcaacatttccaaagttgtttttgacacattatttgctatcatgaattcttcaaaatccatcggatacattgtcaaaacagttaaatatccaaccggaaccgacgttattcccttaagctctactcctaataaggatccgctcattacatatttgaagctgccttcttctacaaggaattttatttttgtcactatttccggacatttctgtatctcatcaaaaaagacgaccgtttcctgcggcttacaatcctccggcataatcatttttaatttcaccagaaactcattcgcactcatttttacattgagataatccaccaaatccggctgatctataaaattaacttcaaacttacgatatccgcttttggcaatttcctctcttatcagccaggtctttccaatctgtctggcgcctgttaccaataatgctttatccgatcttttcaaccattcttctatgataatagagtcttttctatacat
